United States Patent Application Publication US 2014/0259212 A1 - sequence listing, part 11

SEQ ID NO: 34132 - DNA, 738 bp, Pseudomonas fluorescens PfO-1
  CDS (1)..(738): transl_table=11
atgacggtttacgcaatcatcggcggcaccggcctgacccagttggaaggcctgagcattcgtcagtcgctggcggtggatacgccctatggcgcgccatcggccgaggttcagattggtgagtacgccggcaaggaagtgctgttcctcgctcgccacggtcatccgcatcgctttccgccgcacaaggtcaactaccgcgccaacctgtgggcgttgaagcaggccggagccgaatcgatcattgcggtcaacgccgtgggcgggattcatcctgcaatgggcaccggacatttctgcgtgccgcatcaggtcgtggactacaccagcggtcgcgagcacacctatttcgccgatgacctggaacatgtcacacacatcgacttcagctttccctacagcgaaccgctgcgtcagcaattgattgctgcgttggccgccgaaggttgcgagtacagcgatcagggcgtttacgcctgcacccaaggcccgcgtctggaaaccgtggccgagatcgtgcgcctggagcgtgacggttgcgacatcgtcggcatgaccggcatgccggaagcggcgctggcccgcgagctggatctgaattacgcctgcctgtcgttggtggtgaacccggcggcgggcaagaccactgaagtgatcaccatggccgagatcgagcaggcgctgcatgacgggatgggcaaggtgaaatcgacgttggcgcgggtgctcaagggctga

SEQ ID NO: 34133 - protein, 245 aa, Pseudomonas fluorescens PfO-1
MTVYAIIGGTGLTQLEGLSIRQSLAVDTPYGAPSAEVQIGEYAGKEVLFLARHGHPHRFPPHKVNYRANLWALKQAGAESIIAVNAVGGIHPAMGTGHFCVPHQVVDYTSGREHTYFADDLEHVTHIDFSFPYSEPLRQQLIAALAAEGCEYSDQGVYACTQGPRLETVAEIVRLERDGCDIVGMTGMPEAALARELDLNYACLSLVVNPAAGKTTEVITMAEIEQALHDGMGKVKSTLARVLKG

SEQ ID NO: 34134 - DNA, 798 bp, Carboxydothermus hydrogenoformans Z-2901
  CDS (1)..(798): transl_table=11
atgtctgtaaaaattgcagtaattggtggtaccggtgtttatgacccgaagatgttaaataatctttccagagaaaaagtagctacgccttatggcgatattgaagttacgataggcgaactttcaggtaaaagggtggcatttcttccacgccatggagctggccatacggttccaccccaccttattaattaccgggccaatatctgggggttgaaaacgctgggagttaagcaaattattgcaacgactgccgttggttcgttgaatttaaatatgaaaggtggtgattttgttttaattgaccagtttcttgattttacgaaaaaccgcatttataccttttatgatgggggcgaacgaggcgtaattcataccgatgtcaccgaaccatattgcccggaattgcgaaaaattatttataacgctgcgaaagagttgggatataccgtacatcctgcgggtacctatgtttgtaccgaaggcccgcgttttgaaacggcagcggaaataaaaatgtttgcaaaattaggtggagaccttgtgggaatgaccagcgttccggaagttgtgttagcaagggaagccgaaatgtgttatgcttcaatttccttagtgaccaactatgctgctggtatttcacctaatcctttaacccatgaagaagttgtggaaatgatgaccgctaaaagtgaacaattaaagaaccttattgctaaaactattgagaaccttgatcccgaccggaactgctggtgtcagagggcagtaagtggtcaaagtcagttagggaaataa

SEQ ID NO: 34135 - protein, 265 aa, Carboxydothermus hydrogenoformans Z-2901
MSVKIAVIGGTGVYDPKMLNNLSREKVATPYGDIEVTIGELSGKRVAFLPRHGAGHTVPPHLINYRANIWGLKTLGVKQIIATTAVGSLNLNMKGGDFVLIDQFLDFTKNRIYTFYDGGERGVIHTDVTEPYCPELRKIIYNAAKELGYTVHPAGTYVCTEGPRFETAAEIKMFAKLGGDLVGMTSVPEVVLAREAEMCYASISLVTNYAAGISPNPLTHEEVVEMMTAKSEQLKNLIAKTIENLDPDRNCWCQRAVSGQSQLGK

SEQ ID NO: 34136 - DNA, 864 bp, Geobacter metallireducens GS-15
  CDS (1)..(864): transl_table=11
atgagtgagcaggttatcggcgtcattggaggaagcggtctctacgagatggaagggctgagcgatgtccggagcgtggttgtggaaacccccttcggggccccgtcggacgagttcatgaccggtgttcttgacggggtgcagatggtgttccttccccgccacggtaagggacaccgcctcctgccgtcggaggtgaactaccgggctaacatctacgggatgaagaagcttggtgtaacgcggatcatctccgtctctgccgtcgggagcatgaaggaggagatcgcgccggggcacatcgttatccccgaccagttcatcgaccgcaccaacgcaacccgggccaacacgttcttcggcaacggcgtggtggcccacgtgcagttcgccgacccggtctgcgccgatctctccggctggctgtacgaggcggccttggccgccggagcaaccgttcaccggggagggacctatatctgcatggaggggccggcattctcaacccgggccgagtcgaacctctaccgctccttcggcgtctcggtcatcggcatgacgaacatccccgaggcgaaactggcccgggaggccgagatctgctacggggtcatcgccctctccaccgattacgactgctggcacgagtcccacgacgatgtctcggtggatgctatcctggcaatcattcggcagaacgtcgccatgtcaaagtccatcatcggccacgccgtgaagcggatctccgccgagcgggcgtgcccctgcgcctcggccctcacctacgccatcatcaccgaccgcagcgccattcccgccgaggccagggagcggctcgacctgatcatcggcaagtacctctaa

SEQ ID NO: 34137 - protein, 287 aa, Geobacter metallireducens GS-15
MSEQVIGVIGGSGLYEMEGLSDVRSVVVETPFGAPSDEFMTGVLDGVQMVFLPRHGKGHRLLPSEVNYRANIYGMKKLGVTRIISVSAVGSMKEEIAPGHIVIPDQFIDRTNATRANTFFGNGVVAHVQFADPVCADLSGWLYEAALAAGATVHRGGTYICMEGPAFSTRAESNLYRSFGVSVIGMTNIPEAKLAREAEICYGVIALSTDYDCWHESHDDVSVDAILAIIRQNVAMSKSIIGHAVKRISAERACPCASALTYAIITDRSAIPAEARERLDLIIGKYL

SEQ ID NO: 34138 - DNA, 723 bp, Syntrophus aciditrophicus SB
  CDS (1)..(723): transl_table=11
atgcaacctttgggaatcatttctggaacggtaattccgcaaggcagggaactgtttggcgatcttcaggaggagtttatcgaaacggaatacggccaggccgtcgtcatgcgttcagatgccgtggtttttctgccgagacatggaacggatccgaaccgctacatcctgcctcaccagattaatcaccgggccaacatgaaggcgctttgcgagttgagcgtcagggaaatcgttgccatcaattccgcggggtccctgcatcggaaatggaagccgggaacgattatggtccccgatgattttattatgttgaccggcattcccggtattcatcaaacacaggccgcccatttgaccccgcagcttgacttgaaagtgaggcattatctattggaggctgcccgggaggagggcgtcaatgtgatcgaccggggggtatactggcagatgccgggtccgcgcctggaaacgcgagccgagatccggatgatttcccggtttgccgatctggtgggcatgaccctggcaagcgaagccgtgacggctcaggaactcggcctggcctatggggcgctctgttccattgacaactatggcaacggtctggttgaaaagctcttgacggttgaagaaattgtggctcacgcgcgggaaaacgcccgggtgatgatcggcatagcaacccgatacctggaaaaatatcggattcgaaaatcttag

SEQ ID NO: 34139 - protein, 240 aa, Syntrophus aciditrophicus SB
MQPLGIISGTVIPQGRELFGDLQEEFIETEYGQAVVMRSDAVVFLPRHGTDPNRYILPHQINHRANMKALCELSVREIVAINSAGSLHRKWKPGTIMVPDDFIMLTGIPGIHQTQAAHLTPQLDLKVRHYLLEAAREEGVNVIDRGVYWQMPGPRLETRAEIRMISRFADLVGMTLASEAVTAQELGLAYGALCSIDNYGNGLVEKLLTVEEIVAHARENARVMIGIATRYLEKYRIRKS

SEQ ID NO: 34140 - DNA, 777 bp, Desulfitobacterium hafniense Y51
  CDS (1)..(777): transl_table=11
ttgatcggtggaacaggactagaggcggttgctctgctggatctccgtacagaaagcatcgctaccccttatggaaaggtaacggtggagatcgggcgttttgaggcccacgatgagctcattgtcttcatgagtcgtcatggcaaagggcatacggtgccccctcatttggtcaattatcgggccaatatctgggcgttaaaagaacttggtgtccggaaaatcattgccacggctgctgtgggttccctttcctcccgactccaattgggagatattgtgctcttggatcaatttctggactttaccaagagccgtcctcagaccttttatgaagggggagggcagggcgtactccatgtggatatgacagaaccctattgccggtctgtacaagcggtgattcgtgaagccggagagtccataggggtgcctttgcagggcggggccgcctatgtatgtacagaggggccgcgctttgagactccggctgaaatcaggatgtaccaaattctcggcggagaatgtgtggggatgaccagcgtgcccgaagtggttttggccagggaatgcggtatgtgctatgctacgatcgccatggttaccaatgaagcggcaggaatagccgatcaccccctaacccatcaggaagttgttgaaagcttgcaagctgccggaaagaaggcagccggtttaatacaagaaacatttcggatacttcgccacgaacaggattgtcggtgtcaaatggctaatgcagaggtcggtaagttttag

SEQ ID NO: 34141 - protein, 258 aa, Desulfitobacterium hafniense Y51
MIGGTGLEAVALLDLRTESIATPYGKVTVEIGRFEAHDELIVFMSRHGKGHTVPPHLVNYRANIWALKELGVRKIIATAAVGSLSSRLQLGDIVLLDQFLDFTKSRPQTFYEGGGQGVLHVDMTEPYCRSVQAVIREAGESIGVPLQGGAAYVCTEGPRFETPAEIRMYQILGGECVGMTSVPEVVLARECGMCYATIAMVTNEAAGIADHPLTHQEVVESLQAAGKKAAGLIQETFRILRHEQDCRCQMANAEVGKF

SEQ ID NO: 34142 - DNA, 759 bp, Saccharophagus degradans 2-40
  CDS (1)..(759): transl_table=11
atgccaaataaaatagcagttattggcgggtctgggttttacactatggcgtctgccaacaacgccaaagctttaaacccagttaataccccttatgggtctgtgggtggcttaattgaatactcaatgggcgggcataatattgtatttttagctcgtcacggcggtgagcataaattaccgccgcacaaaataaattatcgggccaatatttacgcgcttaaagagttaggtgtctctcatattattgcagctaatgctgtaggcggcattggtgaaaggtgtgggccgggtgtacttgttattcccgatcagctaattgattacacctttgggcgcgaaggtacattctttgatagtttcgaagatggtatgagccatatcgattttacttacccatttgaagggcgtgtgcgcaacgcgttaattcaagcgagtgccgcatttgaaaaagaatttggcagcgataaagttgtgcgcaacggcgtttatgcgtgtatgcaagggccgcgtttagagacggcagctgaaataaaaaaattaaaaaacgatggcgcctcactagttggaatgaccgcaatgccagaggcggcgcttgctagagagctcggcatcgattacgcttcgatctgtttggtggttaattgggcggccggtttgtcggctggtttaataaccctagaggcaataaatgcagagttagaaggctgtgtaggaaaagccgaatacctaatcggtcaaagtgtgaactatttctag

SEQ ID NO: 34143 - protein, 252 aa, Saccharophagus degradans 2-40
MPNKIAVIGGSGFYTMASANNAKALNPVNTPYGSVGGLIEYSMGGHNIVFLARHGGEHKLPPHKINYRANIYALKELGVSHIIAANAVGGIGERCGPGVLVIPDQLIDYTFGREGTFFDSFEDGMSHIDFTYPFEGRVRNALIQASAAFEKEFGSDKVVRNGVYACMQGPRLETAAEIKKLKNDGASLVGMTAMPEAALARELGIDYASICLVVNWAAGLSAGLITLEAINAELEGCVGKAEYLIGQSVNYF

SEQ ID NO: 34144 - DNA, 747 bp, Methylobacillus flagellatus KT
  CDS (1)..(747): transl_table=11
atgctaggtattattggaggtacggggctgaccaagttggccaatctcaagatcaagcgcaggcagattgtacgcacgccttatggcgaaccttccggccctttaacttacggcgacatttgcggttacgaagtgatttttcttccccggcatgggcatggacataccattccaccccatatcgtcaattatcgtgccaatatttgggcgctccatgccgaaggcgtacgggacattgtgtccgtcgcaagcgttgggggcatccatccccgcttggatccgggcgtgattgcgttgccggaccagatcatagactatacgcacggacgcaagaatacctattatgacggcggcgacctgccggtgaaacatattgatttcacaatgccttacagcgacaggttgcgcaacttgtgtctggaggctgcaaccaatataagtgagtccatcatcgacgggggcgtatatgcatgtgtacaaggcccccgtcttgaaactgccgcagaaatcaaccgcctggaaagggacggcgctaccatggttggcatgacaggcatgccggaagcggcgctcgcacgggagctagatatgcactacgcggccatttgtcccgtggccaatcatgcggcggggcggggaagtagcgcaaagggcatccaatacgacaacatgggggatgtcctcaacaaaaccatgcaacgtgtccgaaatctgatagaaagggtcgtggtaggccatgcctgttaa

SEQ ID NO: 34145 - protein, 248 aa, Methylobacillus flagellatus KT
MLGIIGGTGLTKLANLKIKRRQIVRTPYGEPSGPLTYGDICGYEVIFLPRHGHGHTIPPHIVNYRANIWALHAEGVRDIVSVASVGGIHPRLDPGVIALPDQIIDYTHGRKNTYYDGGDLPVKHIDFTMPYSDRLRNLCLEAATNISESIIDGGVYACVQGPRLETAAEINRLERDGATMVGMTGMPEAALARELDMHYAAICPVANHAAGRGSSAKGIQYDNMGDVLNKTMQRVRNLIERVVVGHAC

SEQ ID NO: 34146 - DNA, 885 bp, Myxococcus xanthus DK 1622
  CDS (1)..(885): transl_table=11
atgtccaaccctacctcgcccgtcatcggcatcattggtggcagtggcctgtaccagatggatggcctgacggacgtcgaatggaagaaggtgacgtcccccttcggtgagccttcggacgagctgtgcttcggcacgctcggagggcaccgcgtcgtcttcctgccgcgtcacgggcgaggccaccggctggcgccgacggacatcaacttccgcgcgaacatcgacgcgctcaagcgcagcggggtgacggacctgctgtcgttgtccgccgtgggtggcctgcgcgaggaatacccaccgggcaccttcgtcgtcgtggaccagttcatcgaccggaccttcgcccgggacaagagcttcttcggcacggggctggtggcgcacgtctccatggcgaagccggtgtgctcgcggctggggaacgcggtgatttccgcgtgcgagggcctgggcgtcgtcgcgcgccggggcggcacgtacctggccatggaggggccgcaattctcctccagcgcggagagccacatgtaccggagctggggctgtgacgtcatcggcatgacgaacatgccggaggccaagctcgcgagggaggcggagctctgttacgcgacggtggccatggtcaccgacttcgactgctggcatccggaccatgacgccgtcacggtggaccaggttgtctccgtgctgctgggcaacgcgggcaaggcgaagggactggtgaagaacgtggtgccgctgctcgggtcgcatactggcccctgtgcacagggctgccacagggcgctggaccacgccatcatcaccgcgcccccggcctgggacgccgccatggtggagaagctgtccgcggtcgcgggccgggtgctgcgccgatga

SEQ ID NO: 34147 - protein, 294 aa, Myxococcus xanthus DK 1622
MSNPTSPVIGIIGGSGLYQMDGLTDVEWKKVTSPFGEPSDELCFGTLGGHRVVFLPRHGRGHRLAPTDINFRANIDALKRSGVTDLLSLSAVGGLREEYPPGTFVVVDQFIDRTFARDKSFFGTGLVAHVSMAKPVCSRLGNAVISACEGLGVVARRGGTYLAMEGPQFSSSAESHMYRSWGCDVIGMTNMPEAKLAREAELCYATVAMVTDFDCWHPDHDAVTVDQVVSVLLGNAGKAKGLVKNVVPLLGSHTGPCAQGCHRALDHAIITAPPAWDAAMVEKLSAVAGRVLRR

SEQ ID NO: 34148 - DNA, 777 bp, Mycobacterium sp. MCS
  CDS (1)..(777): transl_table=11
atgctgggagtcatcggcggcagcggtttctactcgttcttcggacccgatgcgcgcagcgtcaggctcgacacccccttcggcgccccgagcgcggcgatcacggtcggcaccgtcggtgaccacgaggtcgcgttcctgccccggcacggcgtcgaccacgagttctccccgcacaccgtgccgtaccgggccaacatgtgggcgctgcgcgcgctcggcgtgcggcggatcttcgggccgtgcgcggtcggcagcctcacccccgacctgggcccgggctcgatggtggtgcccgaccaactcgtcgaccgcaccagcggacgcgacgacacctatttcgactccggcggcatccacgtcgacttcgccgatccgtactgcccgacgctgcgcgcggcggccgccggcctgcccggggtcgtcgacgggggcaccatggtggtgatccagggaccgcggttctccacccgcgcggagagcaaatggttcgcgagccagggtttctcgctggtcaacatgaccgggtatcccgaggcggtgctggcgagggaactcgagatgtgttatgccgcaatagctttggtgaccgacctggacgcgggcatcgacagcgaaacggcggtccgggctgtcaacgtgttcgccgagttccagcgaaacctcgtaccgttcaagaaggtggtgcacgaggcgatcgatcaggtcgccgtcgagcggacgtgtgaccactgcctaccgcacgacggtgtgacgctgccgatcgagttgccgtga

SEQ ID NO: 34149 - protein, 258 aa, Mycobacterium sp. MCS
MLGVIGGSGFYSFFGPDARSVRLDTPFGAPSAAITVGTVGDHEVAFLPRHGVDHEFSPHTVPYRANMWALRALGVRRIFGPCAVGSLTPDLGPGSMVVPDQLVDRTSGRDDTYFDSGGIHVDFADPYCPTLRAAAAGLPGVVDGGTMVVIQGPRFSTRAESKWFASQGFSLVNMTGYPEAVLARELEMCYAAIALVTDLDAGIDSETAVRAVNVFAEFQRNLVPFKKVVHEAIDQVAVERTCDHCLPHDGVTLPIELP

SEQ ID NO: 34150 - DNA, 807 bp, Rhodococcus sp. RHA1
  CDS (1)..(807): transl_table=11
atgaccgcaatgagtgcacgcgaattgggccgcgcggacgtcgccgtgatcggcgggagcggcttctactcgttcttcgacgaggacgccgcggaagtcacgatcgacactccgtacggcagccccagcgccgcgatcaccgtcggcgacgtggagggcaggcgggtggcgttcctcccccgccacggcgtccggcacgaattcgcgccccacaccatcccgtaccgcgcgaacctgtgggcgctgcgcacgctgggcgtgcggcaggtgttcgcgccctgcgccgccgggagcctcacccccgacctgggaccgggctcgatggtcgtgccggatcagttggtcgaccgcaccagcggccgcacgcagacctacttcgacggaggcggcgtgcacgtccagttcgccgacccgtactgctcggacctgcgcaaggccgccgcccgaccgggcaccgtggagggcggggtgctggtggtggtcgagggaccgcgcttctcgaccagggcggagagtctgtggttcgcccggcagggctggactctcgtcaacatgacgggccaccccgaggcggtcctcgctcgggaactcgagatgtgctacgccaccatcgctttggtcaccgacctcgatgcgggaatcgaggccggcgacggggtacgcgcagtggacgtgttcgccgagttccagcgcaatctcgggtccttgaagacgctggtgcggtccgcgatcgccgccgcccccgagggaccctgtgaagcctgtcgcgtccacgagggtgtgacactgccgatcgagttgccatga

SEQ ID NO: 34151 - protein, 268 aa, Rhodococcus sp. RHA1
MTAMSARELGRADVAVIGGSGFYSFFDEDAAEVTIDTPYGSPSAAITVGDVEGRRVAFLPRHGVRHEFAPHTIPYRANLWALRTLGVRQVFAPCAAGSLTPDLGPGSMVVPDQLVDRTSGRTQTYFDGGGVHVQFADPYCSDLRKAAARPGTVEGGVLVVVEGPRFSTRAESLWFARQGWTLVNMTGHPEAVLARELEMCYATIALVTDLDAGIEAGDGVRAVDVFAEFQRNLGSLKTLVRSAIAAAPEGPCEACRVHEGVTLPIELP

SEQ ID NO: 34152 - DNA, 738 bp, Alkalilimnicola ehrlichei MLHE-1
  CDS (1)..(738): transl_table=11
atgacattggcaatcatcgggggcaccggcctgaccacgctggaggggttggagatcacccgtcgggaggtggttcgcaccccctttggcgagccgtccgggccggtcattcatggcgtgctccaggggcgggaggtgatgtttctcgcccgccatggctatgcccacaccatcccgccgcaccagatcaactaccgggccaacatctgggccatgcgtcacctgggtgtgcgcaaactgatcgcggtggccgcagtgggcgggatcagcgaggagatggaaccggcgcgactggcctttccggaccagatcatcgattacacgtacgggcgccggcacaccttcttcgagcaggacctgaccgatgtggtgcatatcgatttcacctacccctacgaccaggcgctccgggacgtgctgatcgcggcggcggaggaggccgacctgggggcggtgccctgggggacctacggtgccacccaggggccgcggctggagacggcggccgaggtgcgccggctggcacgggacggctgccacctggtgggcatgaccgggatgcccgaggcggccctggcccgggaggcggggctggcctacgccacctgcgcggtggtggcgaactgggccgcaggcaccggggggcgcaccgtcaccatggacgagattgaggcgaatctggtccagggcatgggtcgggtgcggaccttgctggcacgggtggtgccgcgcctctag

SEQ ID NO: 34153 - protein, 245 aa, Alkalilimnicola ehrlichei MLHE-1
MTLAIIGGTGLTTLEGLEITRREVVRTPFGEPSGPVIHGVLQGREVMFLARHGYAHTIPPHQINYRANIWAMRHLGVRKLIAVAAVGGISEEMEPARLAFPDQIIDYTYGRRHTFFEQDLTDVVHIDFTYPYDQALRDVLIAAAEEADLGAVPWGTYGATQGPRLETAAEVRRLARDGCHLVGMTGMPEAALAREAGLAYATCAVVANWAAGTGGRTVTMDEIEANLVQGMGRVRTLLARVVPRL

SEQ ID NO: 34154 - DNA, 879 bp, Hyphomonas neptunium ATCC 15444
  CDS (1)..(879): transl_table=11
atgagcggctggaaactcgggatcatcggcggctccggcctctacgcgctggacggtctggaagaccggcgcgagcataccgttgaaaccccttgggggcccccgtctgatgccctcgtctccggccgcatcggcgaggtcgagcttgtcttcctcccccgtcacggcaagggccaccgcctcacgcccaccgacgtgccctaccgcgccaatatcgccgccctgaaaatggccggcgtcaccgatgtcctctccatctccgcctgcggctcgctgcaggagcagtatgcccccggcgaggtcgtcgccgctgaccagttcatcgaccggaccgtcagccgcgagaaaaccttcttcggcgccgggctcgtcggccatgtctcgatggctgagcccgtctgcgcccggctctcggccctcgcggccaatgcgatggaagcggtcggcggcaaggtccaccgcggcggaacctatctcgcgatggaaggcccgcaattctcgtcgctcgccgaaagccgcctctaccgccaatggggctgcgatgtgatcggcatgaccaacatgcccgaagccaagctcgcccgcgaggcagagctgccctacgccaccctcgccatggtcaccgattatgactgctggcgcgccgacacggacgcggtcacggtcaccaatgtgctcgaaatcatggcgcagaacaccgcgcttgcccgccgcgccatcctccagctcgcccacagcctgaacggtacgccgcgtacactctcgccgcagggcattgaaacctgtctggattttgccctgattacggcgccagacctacgcgatcctgtcatgattgataagctgcgggcgattgcagggcgcgcgctcggcgtttag

SEQ ID NO: 34155 - protein, 292 aa, Hyphomonas neptunium ATCC 15444
MSGWKLGIIGGSGLYALDGLEDRREHTVETPWGPPSDALVSGRIGEVELVFLPRHGKGHRLTPTDVPYRANIAALKMAGVTDVLSISACGSLQEQYAPGEVVAADQFIDRTVSREKTFFGAGLVGHVSMAEPVCARLSALAANAMEAVGGKVHRGGTYLAMEGPQFSSLAESRLYRQWGCDVIGMTNMPEAKLAREAELPYATLAMVTDYDCWRADTDAVTVTNVLEIMAQNTALARRAILQLAHSLNGTPRTLSPQGIETCLDFALITAPDLRDPVMIDKLRAIAGRALGV

SEQ ID NO: 34156 - DNA, 801 bp, Rhizobium leguminosarum bv. viciae 3841
  CDS (1)..(801): transl_table=11
atgaaggcgaccgtcagcctgctcgccgcattgctcggcggcatcaagccgcgccacggcatcgtgctcggctctggtctcggctccctcgtcggtgagctggacggagccgtccgtgtcccttatcgcgacctgccgggctttcccgtcagcgccgtctccggacatgcaggcgaagtcgtcgccggccgcctcggcggcgtgcctgtcgtcatgctctccggccgcgtgcattattacgagaagggcgatgccaacgccatgcgcctgccgatcgaggtgctgaaggcgctcggcgtcgaagcgctgatcctgaccaattcggccggatcgctgcgcgacgacatgccgcccggttcggtaatgcagatcaccgatcacatcaactattccggcatgaacccgctgatcggcgaggaaagcgatcaccgtttcgtcggcatgaccaatgcctatgatgcgggccttgccgcggcgatgcagagggcagcggcgaagcttgaaatcgagctggcgcaaggtgtctatatgtggttctccggtccaagcttcgaaacgccggccgaaatccgcatggcgcgcatcctcggtgccgatgccgtcggcatgtcgacggtgcccgaggtcatcatctcaagaatgctgggcctgagggttgcagccgcctccgttatcaccaactatggggcaggcatgaccggcaatgagctcagccatgaagaaaccaaggacatggcgcccatcggcggcgcccgtctcgccgccatattgaaagacatgattgcggctggaagaggatga

SEQ ID NO: 34157 - protein, 266 aa, Rhizobium leguminosarum bv. viciae 3841
MKATVSLLAALLGGIKPRHGIVLGSGLGSLVGELDGAVRVPYRDLPGFPVSAVSGHAGEVVAGRLGGVPVVMLSGRVHYYEKGDANAMRLPIEVLKALGVEALILTNSAGSLRDDMPPGSVMQITDHINYSGMNPLIGEESDHRFVGMTNAYDAGLAAAMQRAAAKLEIELAQGVYMWFSGPSFETPAEIRMARILGADAVGMSTVPEVIISRMLGLRVAAASVITNYGAGMTGNELSHEETKDMAPIGGARLAAILKDMIAAGRG

SEQ ID NO: 34158 - DNA, 726 bp, Magnetococcus sp. MC-1
  CDS (1)..(726): transl_table=11
atgtctgcccaacgtaaaattgccgtgatcggtggtaccagcctgttggaatcccatcttttcagcggggctaaagagtaccccattgcgaccccttttggaaaagtcaccctgttggaaaaacagggcttggtctttttacagcgccacgggatggaccactacacaccaccacacttgattaaccataaagccaacttggcggggttaaaggagtatggcattacccatctgctggccattggctcagtgggcagcatgaagttggagcacccccccggtacctttttaatcccggatgattttctagggctggatgtctgtcccactttttttgaagatgcccgtggccatcaagtccctggctttgatcccgcatggcggcagcagattttagccgcatggccccccagcgaatcctttggcgctcccgttgacgggggtgtctactggcagacccgtggcccccgttttgaaacccaggcagaaatacgcatgtatcaagcctttaccgatgtggtgggcatgacggtagcctcggagtgcattttggcccgcgagttagacctcgcctatgcagccatttgcattgtggataactatgccaatggtatctctgacgaacccctcacctatgcggcctttaaacaaaaggtggcggaaaatgaggcacgcctgggctctctactgcatattctactggaacgtctctcctcccacccatag

SEQ ID NO: 34159 - protein, 241 aa, Magnetococcus sp. MC-1
MSAQRKIAVIGGTSLLESHLFSGAKEYPIATPFGKVTLLEKQGLVFLQRHGMDHYTPPHLINHKANLAGLKEYGITHLLAIGSVGSMKLEHPPGTFLIPDDFLGLDVCPTFFEDARGHQVPGFDPAWRQQILAAWPPSESFGAPVDGGVYWQTRGPRFETQAEIRMYQAFTDVVGMTVASECILARELDLAYAAICIVDNYANGISDEPLTYAAFKQKVAENEARLGSLLHILLERLSSHP

SEQ ID NO: 34160 - DNA, 795 bp, Mycobacterium avium 104
  CDS (1)..(795): transl_table=11
atgcaccacaatggtcggatgctcggagtcatcggcggcagcggcttctacatcttcttcggatccgacgccgacgacgtcaccgtcgataccccgtacgggccgcccagcgccccggtcaccgtcggcgccgtcggcgggcaccgggtggccttcctgccccggcacggcgcccggcacgaattctccgcgcacaccgtgccgtaccgggccaacctgtgggcgctgcgcaaactcggtgtgcgccgggtgctggcgccgtgcgcggtcggcagcctggtgcccgagctcggcccgggcgccgtcgtggtgcccgaccagctggtcgaccgcacccgcgggcgcgccgacacctatttcgactccggggccgtgcacgtcgacttcgccgacccgtactgcccggcgctgcgcgaggcggtgaccgggctgccgggggtggtcgatggcggcaccatggtggtgatccaggggccgcggttttccacccgcgccgagagccggtggttcgcctcggccgggttctcgctggtgaacatgaccggctacccggaggcggtgctcgcccgggaactggaaatgtgctatgcggcaatcgctttggtcacggatctggacgccggtgtgagcgccggtgagggagtgaaggcggttgaggtgttcgccgagttcgagaagaacatcgagccgttcaagaagctggtgcgcgacgccatcggccgggtcgccgccgagcgcagctgtacgcagtgctcaccgcacgccggggtgagcctgccgatcgagctgccatga

SEQ ID NO: 34161 - protein, 264 aa, Mycobacterium avium 104
MHHNGRMLGVIGGSGFYIFFGSDADDVTVDTPYGPPSAPVTVGAVGGHRVAFLPRHGARHEFSAHTVPYRANLWALRKLGVRRVLAPCAVGSLVPELGPGAVVVPDQLVDRTRGRADTYFDSGAVHVDFADPYCPALREAVTGLPGVVDGGTMVVIQGPRFSTRAESRWFASAGFSLVNMTGYPEAVLARELEMCYAAIALVTDLDAGVSAGEGVKAVEVFAEFEKNIEPFKKLVRDAIGRVAAERSCTQCSPHAGVSLPIELP

SEQ ID NO: 34162 - DNA, 795 bp, Nocardioides sp. JS614
  CDS (1)..(795): transl_table=11
atgaccgtcgcggacgtcgccgtgatcggcggcaccggcttctactccttcctcggcgccgccggggaggaggtcgaggagcacgtcgtggacacgccgtacggtgcgccctcggccccggtctcggtcggcactgtcgccgaccgccgggtggcgttcctgccccggcacggccggcaccatgagtacccacctcaccggatcccctaccgcgccaacctctgggcgctgcgctcgctcggtgtgcgccaggtgctggcgccgtgcgcggtgggcggcctgagcccggaggtggcgcccggggacgtcgtggtgcccgaccagctcgtcgaccgcacccaggggcgggtgtcgagctatgtcgagaccggtgcggtgcacctgccgttcgccgacccgtactgcccgggggtctcggccgcgctgctggccgcggcgcccgacgcccgcgtcgggggagcgatggtggtgatcgaggggccgcgcttctccacccgagccgagtcgcgccactacgccgagcagggctgggcgctgatcaacatgaccggggcacccgaggcggcgctcgcccgcgagctgcggctgtgctacgccacgatcgcgctggtcacggacatggacgccggcgccgagagcggggcgggggtcagccaggaggaggtgttcgcgctgttccgcgcgaacctcggccggctcgagggggtcctgacccgggccgtcgccgggctgccggaccccgagggctgcacgtgctcgtcgtgggccgacggcatcgatctgacctacctctga

SEQ ID NO: 34163 - protein, 264 aa, Nocardioides sp. JS614
MTVADVAVIGGTGFYSFLGAAGEEVEEHVVDTPYGAPSAPVSVGTVADRRVAFLPRHGRHHEYPPHRIPYRANLWALRSLGVRQVLAPCAVGGLSPEVAPGDVVVPDQLVDRTQGRVSSYVETGAVHLPFADPYCPGVSAALLAAAPDARVGGAMVVIEGPRFSTRAESRHYAEQGWALINMTGAPEAALARELRLCYATIALVTDMDAGAESGAGVSQEEVFALFRANLGRLEGVLTRAVAGLPDPEGCTCSSWADGIDLTYL

SEQ ID NO: 34164 - DNA, 741 bp, Azoarcus sp. BH72
  CDS (1)..(741): transl_table=11
atgctcgcaatcatcggtggtagcggactgacccagctttctacgctggaagtcgtacgtcgcgaggtctgtcgcaccccctatggcgagccctccggcgcactcactttcggcacgcttgccggcaagccggtggtctttctcgcccgccatggctacggccatacgattccgccgcacctggtgaactaccgcgccaacatctgggcgctgcatcaggcacgggccaccgcggtggtgtccgtcgcgtcggtgggcggaatccgcgccgatttcgcgccgggcacgctcgcggtgccggaccagatcatcgactacacctggggccgcaagaacaccttcttcgatggcggcgaggcccctgtccgtcacatcgacttcacccacccctacgacgaaaaactgcgccgcagcctgctcgcggcggcaaccgacgcgggcgaaccgatcttcgacggcggcgtgtacgccagcatgcaggggccgcggctggaaaccgccgccgaaatcaaccgcctggaacgcgacggcgccgacctggtgggcatgaccggcatgccggaagccgccctcgcgcgtgagctggatctgccctacgcggcgctgaacgtggtggtgaactacgcggcgggacgttcgtccagcgagcacggcatccacttcgacagcatcgaactggtgttgcaggaagcgatgctgcgggtgcggcgcgtgctggaagccctgtgccgggcaggttga

SEQ ID NO: 34165 - protein, 246 aa, Azoarcus sp. BH72
MLAIIGGSGLTQLSTLEVVRREVCRTPYGEPSGALTFGTLAGKPVVFLARHGYGHTIPPHLVNYRANIWALHQARATAVVSVASVGGIRADFAPGTLAVPDQIIDYTWGRKNTFFDGGEAPVRHIDFTHPYDEKLRRSLLAAATDAGEPIFDGGVYASMQGPRLETAAEINRLERDGADLVGMTGMPEAALARELDLPYAALNVVVNYAAGRSSSEHGIHFDSIELVLQEAMLRVRRVLEALCRAG

SEQ ID NO: 34166 - DNA, 873 bp, Nostoc punctiforme PCC 73102
  CDS (1)..(873): transl_table=11
atggctcaagctagtattgggattattggtggcagtggtctgtataaaatggacgcgctcaaagatgtagaagaggtgcatatccaaaccccctttggttcaccatctgatgctttgattctgggaacattggatggtacacgggtagcttttttggcgcgtcatggccgcaatcacacgctgttaccctctgagttaccgtttcgcgctaatatctatgcgatgaagcaattgggtgtgaagtatttaatttcagctagtgctgtgggttccttgaaggaagaggcgaaaccattggatatggtggtgccagatcagtttattgacagaaccaaaaatcggatttccacgtttttcggtgagggaattgtggctcatattgcctttggcgatccgatttgtaagaacttggctgctgtgttggcagatgcgatcgcatctctcaatttaccagatgttactctgcatcgcagcggtacttatgtgtgcatggaagggccagctttttccactaaggcagaatcgaatctttaccgcagttggggcgcaactatcattgggatgacgaatttaccagaggcgaagttggcaagggaagcggaaattgcatactcaaccttagcgctggtgacagattatgattgttggcatccagaccatgacagtgtgacggtggaattggtgattggcaatttgctgcggaatgctgtgaatgctcaaaaggtgattcaagaaactgtgcggcgcttgagtgaaaatccgccaaccagtgaggcgcattcggcgttgcagtatgcgattttgactcaattggataaagcaccagccgcaacgaaggaaaagttagggttattgttgcagaagtatttgtaa

SEQ ID NO: 34167 - protein, 290 aa, Nostoc punctiforme PCC 73102
MAQASIGIIGGSGLYKMDALKDVEEVHIQTPFGSPSDALILGTLDGTRVAFLARHGRNHTLLPSELPFRANIYAMKQLGVKYLISASAVGSLKEEAKPLDMVVPDQFIDRTKNRISTFFGEGIVAHIAFGDPICKNLAAVLADAIASLNLPDVTLHRSGTYVCMEGPAFSTKAESNLYRSWGATIIGMTNLPEAKLAREAEIAYSTLALVTDYDCWHPDHDSVTVELVIGNLLRNAVNAQKVIQETVRRLSENPPTSEAHSALQYAILTQLDKAPAATKEKLGLLLQKYL

SEQ ID NO: 34168 - DNA, 747 bp, Xylella fastidiosa Ann-1
  CDS (1)..(747): transl_table=11
atgcaaacgattgctctggcggtgattggtggtactggtgtttatacgttgtctcagctcgacgatgtacaggtgtatgaggttgagacgttgtatggccgcccttctggtccaatccgtgttggtatgttgtttggccagcgtgtggctttctttgcccgtcatggtgaggagcatgcgttgccaccacacaaaattaattatcgcgccaatattgctgctttgcagcagcttggtgtcagtcgtgtgctggcgctcaatactgtcggtggaatcaatgaggcgtttggcccacgtactttggtttgtcctgatcagctgattgactatacatgggggcgtgtttccacgttctgcgaggaggtggggagtgaggtgctccatgtggattttggtcatccttattctccgttgctgcgtggttgtttgttgcgtgcagcacgtgatgtggatgtaagtttggtcgagtatggttgctatggtgtgactcagggaccacgtttggaaacgattgctgagattgctaggttacgccgcgatgggtgtgacttagttggtatgacgggtatgcctgaggctgcgttggcgcgtgagaaggggctggaatatgcttgtttggggattgtctccaactgggcgtcgggttgtggtgatggcgctgagatcacaatgggagaaattttgtccaatgttgcgacagccttcagctgtcttccggaactaattagtaaagttgcgcgagagtga

SEQ ID NO: 34169 - protein, 248 aa, Xylella fastidiosa Ann-1
MQTIALAVIGGTGVYTLSQLDDVQVYEVETLYGRPSGPIRVGMLFGQRVAFFARHGEEHALPPHKINYRANIAALQQLGVSRVLALNTVGGINEAFGPRTLVCPDQLIDYTWGRVSTFCEEVGSEVLHVDFGHPYSPLLRGCLLRAARDVDVSLVEYGCYGVTQGPRLETIAEIARLRRDGCDLVGMTGMPEAALAREKGLEYACLGIVSNWASGCGDGAEITMGEILSNVATAFSCLPELISKVARE

SEQ ID NO: 34170 - DNA, 873 bp, Oceanicola batsensis HTCC2597
  CDS (1)..(873): transl_table=11
atgggtgaacaggtgctggcggtgatcggcggatcgggtctctacgagatcgaggggctcgggggcgcgggttggcaggaggtgacgaccccctggggggcgccctcggatgccatcctgaccggcgagctcggggggctgcggctggcctttctgccgcggcacgggcgcggccatgtccacgccccgacggatatcccctatcgcgcgaatatcgacgcgctcaagcagttgggggcgacccatgtcctgtcggtctcggcctgcggctccttccgcgaggagatggggcccggtcatttcgtcatccccgaccagttcatcgaccggaccgtgaaccgcgagaagagctttttctcgggcggttgcgtcgcccatgtctcgatggcccacccgacctgccgcgcgctcggcgcggcggcggccgcggcggcgcgcgcggcgggggtcacggtgcacgagggcggcacctacctggccatggaggggccgcagttctcgtccctcgcggagagccggatgtatcgcgatcactggggctgcgacgtggtcggcatgaccaacatgcccgaggccaagctggcccgcgaggccgagctgcactatgccaccgtcgcgatggtgacggactacgacagctggcacccggaccacggcgaggtggacgtgaccgagatcatccgcacgctgaccgcgaattcggccaatgcgcgggagatgatcgcgcggatgcccggcgagctgacatcggactgcgcgcaatcctgcgaccgcgcgctcgacaatgccgtcctgaccgccccggagaggcgcgaccccgaccttgtggcgcggctggagacggtggcggggcgggtgctgacgccccgctga

SEQ ID NO: 34171 - protein, 290 aa, Oceanicola batsensis HTCC2597
MGEQVLAVIGGSGLYEIEGLGGAGWQEVTTPWGAPSDAILTGELGGLRLAFLPRHGRGHVHAPTDIPYRANIDALKQLGATHVLSVSACGSFREEMGPGHFVIPDQFIDRTVNREKSFFSGGCVAHVSMAHPTCRALGAAAAAAARAAGVTVHEGGTYLAMEGPQFSSLAESRMYRDHWGCDVVGMTNMPEAKLAREAELHYATVAMVTDYDSWHPDHGEVDVTEIIRTLTANSANAREMIARMPGELTSDCAQSCDRALDNAVLTAPERRDPDLVARLETVAGRVLTPR

SEQ ID NO: 34172 - DNA, 756 bp, delta proteobacterium MLMS-1
  CDS (1)..(756): transl_table=11
atggaccccattgccattatcggcggctccgggcttgataacccggagttttttgacgtcgagcaggagtttaccgtggagaccccgtacgggccgccatcggccccgttgctgcaaggccggctggatggccgcgaggtggtactgctggccaggcatggccggcaacacaccatccctcccagccgggtcaataaccgggccaacctttttgccctgcgggaggcgggctgtgagcggatcatcgccaccgccgccagcggctcgttgcgcaacgaaatcggccccggccacctggttatacccgatcagttcatcgattttacccgccagcgaccactgaccttttacgacgagttccccgccggcatcgaaaacgcctgccacaccccgctggccgaccccttcgatgaaaccctgcggcaaaaaataatcgccgccgggggtgagcggcaaataccgctccataccagcggtaccatcctgaccatcgagggcccccgcttttccacccgggccgaatcacgcatgtaccagagctggggggccgacctggtcaatatgaccgtcgccccggaggcgatcctggccgccgagcttaaactgccctacgcggtgatcgccatggtcaccgactatgattcctggaaggaggatgaaccgccgctgctggtgccccaattggtgacggttttccgcagcaatatcgaaaagataaccaccctcatccggcaaaccctggccacccgggagtag

SEQ ID NO: 34173 - protein, 251 aa, delta proteobacterium MLMS-1
MDPIAIIGGSGLDNPEFFDVEQEFTVETPYGPPSAPLLQGRLDGREVVLLARHGRQHTIPPSRVNNRANLFALREAGCERIIATAASGSLRNEIGPGHLVIPDQFIDFTRQRPLTFYDEFPAGIENACHTPLADPFDETLRQKIIAAGGERQIPLHTSGTILTIEGPRFSTRAESRMYQSWGADLVNMTVAPEAILAAELKLPYAVIAMVTDYDSWKEDEPPLLVPQLVTVFRSNIEKITTLIRQTLATRE

SEQ ID NO: 34174 - DNA, 741 bp, Oceanobacter sp. RED65
  CDS (1)..(741): transl_table=11
atgaccttgacagcaattattggtggaacgggcttaaatcatatacctgagcttgaggataaactcgagttgtccgtcgccacagaactaggcgaagtgaatgtagtaaaagccacatggcaagggtgccctgtggtatttttagcgcgtcatggtaacccacataaaattccaccgcataaaataaattatcgggcaaacttactcgctctggagcagctcaatgtgacgcaaattattgccgtgaatgctgttggtggtattcatgaagctatgggtcctgagactatttgtctgccagatcaaataattgattatacacacggtcgcgaagcgacgttctttgatggtgaatttagggcgctggatcatattgatttcagtcatccttattcttcggctatgcgtgagaagctgttaatggcctctcaaatcgcaaatatagatgtattttctcaaggtgtttatggcgccactcagggtccgcgtctagagacggctgctgaaattcgcagtatgcgtgaagatggttgtgatgtagtgggaatgacgggaatgccagaagccgccttagcgagggagttgaatattccctatgcgtctgtttgcttaattgtaaactggggtgcgggtatgacgcagactcccatcacgatgaatgagattaaggcggtgcttgaatcaggtatgcatagggtgcgtaacctggttcaaacgtttttatccatgtcgcttcattaa

SEQ ID NO: 34175 - protein, 246 aa, Oceanobacter sp. RED65
MTLTAIIGGTGLNHIPELEDKLELSVATELGEVNVVKATWQGCPVVFLARHGNPHKIPPHKINYRANLLALEQLNVTQIIAVNAVGGIHEAMGPETICLPDQIIDYTHGREATFFDGEFRALDHIDFSHPYSSAMREKLLMASQIANIDVFSQGVYGATQGPRLETAAEIRSMREDGCDVVGMTGMPEAALARELNIPYASVCLIVNWGAGMTQTPITMNEIKAVLESGMHRVRNLVQTFLSMSLH

SEQ ID NO: 34176 - DNA, 726 bp, marine gamma proteobacterium HTCC2143
  CDS (1)..(726): transl_table=11
atgatcggtattattggaggcaccggtctcagtagttttcatcaagggaggtcggttggagatcgactgacaccctatggtgagacgtcagcggctatcattggcagtgagatagaaggcataccggtgtgttttttagcgcggcatggtgaccctcatcgtattcctccccataaggttaattaccgcgctaatatttgggcgtttaaagaacttggtgttagcaagctggtggcggtaaatgcagttggcgggatcaccagtgaaatgcccgccgggtctttggtgattccggatcagattgtggattacacttatggccgcgatcatacattttacgatggtaacaataacgagttggaacacatcgattttagtttcccctttgcttccggactgcgacaacttattgttgccgctgcggctgcgagcaacatcaatattattgatggtgcaacactgggggtcacacagggccctcgattggaatctgcagcggaaataaaccgaatggagtctgacggttgtgaactggttgggatgacggcaatgcctgaggcggcgttagctcgcgagctcagtattgactatgcaagtatttgtctggtggtcaatccggcggcgggtcgggggcattcagttattacaatggaccagattaacgacgttattcagtttggtatgaccgatgtcaggcgcttgctaatggccgccattgtcaactga

SEQ ID NO: 34177 - protein, 241 aa, marine gamma proteobacterium HTCC2143
MIGIIGGTGLSSFHQGRSVGDRLTPYGETSAAIIGSEIEGIPVCFLARHGDPHRIPPHKVNYRANIWAFKELGVSKLVAVNAVGGITSEMPAGSLVIPDQIVDYTYGRDHTFYDGNNNELEHIDFSFPFASGLRQLIVAAAAASNINIIDGATLGVTQGPRLESAAEINRMESDGCELVGMTAMPEAALARELSIDYASICLVVNPAAGRGHSVITMDQINDVIQFGMTDVRRLLMAAIVN

SEQ ID NO: 34178 - DNA, 777 bp, Marinobacter sp. ELB17
  CDS (1)..(777): transl_table=11
atgcaaaacctcgttgagcaacccgttggcatcatcggtggcacgggcctgacggccctcgaaggtttacaaataaccggcgagcggagcatggctaacgcctggggtacaccttcttcagtacttaccagtgggctgttgggccagcagggtgtgctgtttctggcccgccacggtaacccacaccgcataccgcctcaccagattaactaccgcgccaatattcaggcgctttttgacgccggcgtgcgcacgttggtgggcgttaacgctgtgggcggcataagtcgtgatatgagcccggcccacatagccataccggatcagctgattgattacacttggggccgcagtggtacgttttttgagggcgaactggataacgtcacccacattgatttcacctggccctacaacgagccggcgcgagcgattttgattgagcaagcggagcgtctgggactgagcttttcccgccacggggtttatggtgccacccaggggccacgcctggaaactgctgcggaagtccgccgtatggagcgtgatggctgtgatctggcgggtatgacgggcatgccggaagcggccctggcagcagagttggggatgcgttatgtcagcttgtgcctggtggtcaattatgcggcaggcaaaaccgacacggcgatcaccatggcggacattcagcgcgcgattgatgacggtatggttgccgtgaaaactctgctacaggcttctgttgccgggcttggagccctgcaggcgaaagcctga

SEQ ID NO: 34179 - protein, 258 aa, Marinobacter sp. ELB17
MQNLVEQPVGIIGGTGLTALEGLQITGERSMANAWGTPSSVLTSGLLGQQGVLFLARHGNPHRIPPHQINYRANIQALFDAGVRTLVGVNAVGGISRDMSPAHIAIPDQLIDYTWGRSGTFFEGELDNVTHIDFTWPYNEPARAILIEQAERLGLSFSRHGVYGATQGPRLETAAEVRRMERDGCDLAGMTGMPEAALAAELGMRYVSLCLVVNYAAGKTDTAITMADIQRAIDDGMVAVKTLLQASVAGLGALQAKA

SEQ ID NO: 34180 - DNA, 900 bp, Streptomyces cattleya
  CDS (1)..(900): transl_table=11
atgcgggcacggaaatcggggaacgagcagcggaacgccgatctcggcatcatcggcggcagcggactgtacgaattcccgggcctgaccgaccccgaggaattcccggtcgagacgccgtacggcccgcccagcgcaccgccggtcgtcggcaccgtcggcggacgctgggtggccttcctggcccgccacggcaccggccaccgcataccgccctcccgcatcccggtgcgggcaaacctctacgcgctcaaggcgctcggggtcaccgaggtcgtcagcgtcagcgcggtcggcagcctgcgcgaggagtacgcccccggccacctcgtcgtccccgaccagatcatcgaccgcacccggggcggccggcccgcgaccttcttctcctccggcgtcgtcgtccacgtctcgctggccgacccctactgcccccggctgcgcgccgccctcaccgacgccgcccgggccgcccaccccaccgtccacccggccggcacctacctgtgcatggagggcccgcagttctccacccgggccgagtcccagctgtaccgcgcctggggcatggacgtcatcggcatgaccgcccagcccgaggcgaaactcgcccgcgaggccgaactgtgctacgccgggctgtcgttggtcaccgactacgactgctggcacaccggacacgactcggtggacgcccgcaccgtcgccgaggtgatggccgccaacgtcatcgccgcccgcgccgtgctctccggcctcgcccacgccaccgccccagccgactgcgcctgccaccacgcgctggacggcgccgtgctgaccgatccgctcgccgcggcccaggtccccgaggaggaggtgccggcgctgctgcgcaaggggttcgcccggcgcggctga

SEQ ID NO: 34181 - protein, 299 aa, Streptomyces cattleya
MRARKSGNEQRNADLGIIGGSGLYEFPGLTDPEEFPVETPYGPPSAPPVVGTVGGRWVAFLARHGTGHRIPPSRIPVRANLYALKALGVTEVVSVSAVGSLREEYAPGHLVVPDQIIDRTRGGRPATFFSSGVVVHVSLADPYCPRLRAALTDAARAAHPTVHPAGTYLCMEGPQFSTRAESQLYRAWGMDVIGMTAQPEAKLAREAELCYAGLSLVTDYDCWHTGHDSVDARTVAEVMAANVIAARAVLSGLAHATAPADCACHHALDGAVLTDPLAAAQVPEEEVPALLRKGFARRG

SEQ ID NO: 34182 - DNA, 936 bp, Aspergillus oryzae
  CDS (1)..(936)
atggcttctcttcctaacacatacgcggaccccgtccgtatcgccgtcatcggtggaactggtctccgcgaactccctggtttcactcaggttgcttccttgaacatctcgactccttggggcactccctcctccccgatcacgatcctgcatcaccagtgctctcacaacaaacagaccgttgctgttgctttccttagtcgccacggcttgcaccatcagattgcgccccatgaggtgcctgcccgcgccaacatcgcggccctgcgctccattggtgtccgcaccatcattgccttctcggccgtcggcagcttgcaagaggagatcaagccccgcgacttcgtgatcccagaccaggtcattgaccgtaccaagggcatccggcctttcacattcttcgagggaggtgtggttgctcacgttcctttcggagacccgttcgatgagggtgttgccaaggttgtgagggcttgcggccacagcctcgaaggcgagggtgttgtgctgcatgaccgcggcacattggtgtgcatggagggacctcaattctccactcgcgccgagagtaagctctaccgctcctggggtggcagcgtcatcaacatgtcttgtcttcctgaggcgaagctggctcgtgaggccgagattgcctaccagatgatttgcatgtccactgactatgactgctggcatgaggctaccgcagatgtcactgtggaaatggtcatgggaaatatgaaggccaatgctgagaacgctaagcacttcgtgactgccgtcctcgatgagctcgcctctgacaagaactcggaacttgtccaagctaagcatgtggaaggctctgtcaagttcggtctcagcaccgcccagcctaactggagccctgaagctagagagaggatgaactggcttttccctggatacttcaactaa

SEQ ID NO: 34183 - protein, 311 aa, Aspergillus oryzae
MASLPNTYADPVRIAVIGGTGLRELPGFTQVASLNISTPWGTPSSPITILHHQCSHNKQTVAVAFLSRHGLHHQIAPHEVPARANIAALRSIGVRTIIAFSAVGSLQEEIKPRDFVIPDQVIDRTKGIRPFTFFEGGVVAHVPFGDPFDEGVAKVVRACGHSLEGEGVVLHDRGTLVCMEGPQFSTRAESKLYRSWGGSVINMSCLPEAKLAREAEIAYQMICMSTDYDCWHEATADVTVEMVMGNMKANAENAKHFVTAVLDELASDKNSELVQAKHVEGSVKFGLSTAQPNWSPEARERMNWLFPGYFN

SEQ ID NO: 34184 - DNA, 1014 bp, Saccharomyces cerevisiae
  CDS (1)..(1014)
atgaacaggattaagaatacattttctgttgctaagagattaaaactaagcaaagttatgacgaactcagaattaccgagcatattcgaaggaactgttgatttagggattattggtggtacaggtttatataaccttgactgtctggagcccatcgctttgcttccacccatggtaacaccatggggtaccacatcgtctcctgtcacaatctctcagttcgtaggaactaacagccactttcacgttgcgttcatagccagacacggtattaaccacgaatacccacccactaaagtcccatttagagcaaacatggcggccttaaagaacttaaattgtaaagccgttctttcttttagtgccgtggggtctttacaaccccatataaagcctagagattttgtgttaccacagcaaataatcgacagaactaaaggcataagacattcttcatatttcaacgatggaggcttggtaggtcacgttggtttcggacagccgttctctcaaaaattcgcagagtatatctatcaattcaagaacgagataacaaatcctgaatccgaagaaccgtgccatttgcattacgacaaggatatgaccgttgtgtgtatggaaggcccacaattctccacgcgcgctgaatccaagatgtacagaatgtttggtggccatgttattaacatgagtgttattccagaagccaaattggcgcgtgagtgtgagctgccttaccagatgatttgtatgtctaccgattacgacgcatggagagatgaggcagaacctgttaccgtagaaaccgttattggtaatttgacgaataatgggcgcaatgcaaatattttagcttctaagatcatcgtctcaatggccaaggaaatcccagagttcatgcatactggcgatgggctgcgcggttccatcaagaaatctatctctaccaaaccagaggctatgtccaaggaaaccttagaaagactaagatacttatttccaaactattggtaa

SEQ ID NO: 34185 - protein, 337 aa, Saccharomyces cerevisiae
MNRIKNTFSVAKRLKLSKVMTNSELPSIFEGTVDLGIIGGTGLYNLDCLEPIALLPPMVTPWGTTSSPVTISQFVGTNSHFHVAFIARHGINHEYPPTKVPFRANMAALKNLNCKAVLSFSAVGSLQPHIKPRDFVLPQQIIDRTKGIRHSSYFNDGGLVGHVGFGQPFSQKFAEYIYQFKNEITNPESEEPCHLHYDKDMTVVCMEGPQFSTRAESKMYRMFGGHVINMSVIPEAKLARECELPYQMICMSTDYDAWRDEAEPVTVETVIGNLTNNGRNANILASKIIVSMAKEIPEFMHTGDGLRGSIKKSISTKPEAMSKETLERLRYLFPNYW

SEQ ID NO: 34186 - DNA, 1014 bp, Saccharomyces cerevisiae
  CDS (1)..(1014)
atgaacaggattaagaatacattttctgttgctaagagattaaaactaagcaaagttatgacgaactcagaattaccgagcatattcgaaggaactgttgatttagggattattggtggtacaggtttatataaccttgactgtctggagcccatcgctttgcttccacccatggtaacaccatggggtaccacatcgtctcctgtcacaatctctcagttcgtaggaactaacagccactttcacgttgcgttcatagccagacacggtattaaccacgaatacccacccactaaagtcccatttagagcaaacatggcggccttaaagaacttaaattgtaaagccgttctttcttttagtgccgtggggtctttacaaccccatataaagcctagagattttgtgttaccacagcaaataatcgacagaactaaaggcataagacattcttcatatttcaacgatgaaggcttggtaggtcacgttggtttcggacagccgttctctcaaaaattcgcagagtatatctatcaattcaagaacgagataacaaatcctgaatccgaagaaccgtgccatttgcattacgacaaggatatgaccgttgtgtgtatggaaggcccacaattctccacgcgcgctgaatccaagatgtacagaatgtttggtggccatgttattaacatgagtgttattccagaagccaaattggcgcgtgagtgtgagctgccttaccagatgatttgtatgtctaccgattacgacgcatggagagatgaggcagaacctgttaccgtagaaaccgttattggtaatttgacgaataatgggcgcaatgcaaatattttagcttctaagatcatcgtctcaatggccaaggaaatcccagagttcatgcatactggcgatgggctgcgcggttccatcaagaaatctatctctaccaaaccagaggctatgtccaaggaaaccttagaaagactaagatacttatttccaaactattggtaa

SEQ ID NO: 34187 - protein, 337 aa, Saccharomyces cerevisiae
MNRIKNTFSVAKRLKLSKVMTNSELPSIFEGTVDLGIIGGTGLYNLDCLEPIALLPPMVTPWGTTSSPVTISQFVGTNSHFHVAFIARHGINHEYPPTKVPFRANMAALKNLNCKAVLSFSAVGSLQPHIKPRDFVLPQQIIDRTKGIRHSSYFNDEGLVGHVGFGQPFSQKFAEYIYQFKNEITNPESEEPCHLHYDKDMTVVCMEGPQFSTRAESKMYRMFGGHVINMSVIPEAKLARECELPYQMICMSTDYDAWRDEAEPVTVETVIGNLTNNGRNANILASKIIVSMAKEIPEFMHTGDGLRGSIKKSISTKPEAMSKETLERLRYLFPNYW

SEQ ID NO: 34188 - DNA, 870 bp, Drosophila melanogaster
  CDS (1)..(870)
atgattacgattaaatgtaaagacaccaatctggacccgcttccggtcaagattggtattattggcggttcggggcttgacgacccagatatcctggaacagcggcaggaacgtgtggtggagacgccctacggagaaccgtctgatgcattgattgaaggcgagatcaatggagtacagtgcgtactcctggcgcgtcatggacgcaagcacgacatcatgccctccaatgttaactaccgggccaacatctgggctctacgcgatgtgggctgcacccacttaattgtctccacggcatgtggatcgttgcgcgaggaaatcaagccgggcaacctggttgttccacacgactttatcgacaggactactaaacgccttcagaccttctacgatggcaaggcacaaagtccacgtggtgtttgccacctgcccatgtttccggcattcagcgaacgcacccgcaacattctgcttcaggcggccaaggagctggagattcccgcccacgataaggccaccattgtgactattgagggtccgcgcttctcctctcgctcggagagccacatgttccgtcagtggggcggggacctcataaacatgaccacgtgtccagaagtggtgctagccaaggaggctggcctactttacgggtcggtggccattgccacggactacgactgctggcgcatgggttgcgagggtgtcaacgtgcaggatgtcctccgtacttttgccgagaacgtaattaaggtgaagaagattctggtcaacgctgttggtcgaattgccaaggaggactggtcggaggacatactaaatgccaagcaatgcgtttgcaacaacacaatgtctggagccatgtga

SEQ ID NO: 34189 - protein, 289 aa, Drosophila melanogaster
MITIKCKDTNLDPLPVKIGIIGGSGLDDPDILEQRQERVVETPYGEPSDALIEGEINGVQCVLLARHGRKHDIMPSNVNYRANIWALRDVGCTHLIVSTACGSLREEIKPGNLVVPHDFIDRTTKRLQTFYDGKAQSPRGVCHLPMFPAFSERTRNILLQAAKELEIPAHDKATIVTIEGPRFSSRSESHMFRQWGGDLINMTTCPEVVLAKEAGLLYGSVAIATDYDCWRMGCEGVNVQDVLRTFAENVIKVKKILVNAVGRIAKEDWSEDILNAKQCVCNNTMSGAM

SEQ ID NO: 34190 - DNA, 738 bp, Pseudomonas aeruginosa
  CDS (1)..(738): transl_table=11
atgagtgtctacgcgattatcggaggaaccggcctgacccagctggaagggctgacgctgagcgagtccctgccgatcgaaacgccgtatggcgcgccgtccgcgccgctccagcgtggccgctacgccgggcgcgaggtgctgttcctggcacgtcacggtcatccgcaccgcttcccgccgcaccaggtgaactaccgggccaatctctgggcgctgaagcaggcgggtgccgaggcggtgatcgcggtcaacgcggtgggtggcatccatgcggcgatgggaacggggcacctgtgcgtgccgcaccagttgatcgactacacctcgggacgcgagcacacctatttcgccggcgatatcgagcatgtcacccatatcgacttcagccacccctatgacgagccgttgcgccagcgcctgatcgaggcgttgcgtgcgttggggctggcgcacagcagccatggggtctacgcctgcacccaagggccgcgcctggaaacggtggcggaaatcgcccggttggagcgggacggcaacgatatcgtcggcatgaccggcatgcccgaggcggcactggcccgcgagctggacctgccctacgcctgcctggcgctggtggtcaatcccgcggcggggaagtcggcggggatcatcaccatggccgaaatcgaacaggcgttgcacgatggcattggcaaggtgcgcgaggtgttggcgcgggtcctggccggctag

SEQ ID NO: 34191 - protein, 245 aa, Pseudomonas aeruginosa
MSVYAIIGGTGLTQLEGLTLSESLPIETPYGAPSAPLQRGRYAGREVLFLARHGHPHRFPPHQVNYRANLWALKQAGAEAVIAVNAVGGIHAAMGTGHLCVPHQLIDYTSGREHTYFAGDIEHVTHIDFSHPYDEPLRQRLIEALRALGLAHSSHGVYACTQGPRLETVAEIARLERDGNDIVGMTGMPEAALARELDLPYACLALVVNPAAGKSAGIITMAEIEQALHDGIGKVREVLARVLAG

SEQ ID NO: 34192 - DNA, 741 bp, Pseudomonas syringae pv
  CDS (1)..(741): transl_table=11
atgactgtttacgcgattatcggcggtactggcctgacccaactggaaggcctgaacattcggcagtccttgccgatgaacacgccttatggcgcgccatccggtgaaatccagatcggcgactatgccggtcgcgaagtcatgtttctggcgcgtcatggccatccgcatcgcctgccgccgcatcaggtcaactaccgggccaacatatgggccttgaagcaggcaggtgcggaggcgattctggcggtcaacgcggtgggcggtatccatccggcgatgggcaccgggcacttttgcgtaccgcatgacctggtcgactacaccagcggccgccagcacacgttttttgccgacgatctggaagaagtcacccatatcgacttcagctatccctacagcgaagcactgcgggtgcgactggttgcggcgttggcggctgagggttgtgcgttcagcgatcgcggcgtctacgcttgcacccaggggccgcgtctggagacagttgcggaaatcatccgtcttgagcgcgatggctgcgacatcgtcggcatgaccggcatgcccgaggctgcgctggcgcgtgaactggagctggagtacgcctgtctggcgctggtggtcaacccggcagcgggcaagtcgaccgctgtgattaccatggccgagatcgagcaggcgttgcgcgacggcatgggcaaggtcaaggcgacccttgcccgggtgctgtcggcctcctga

SEQ ID NO: 34193 - protein, 246 aa, Pseudomonas syringae pv
MTVYAIIGGTGLTQLEGLNIRQSLPMNTPYGAPSGEIQIGDYAGREVMFLARHGHPHRLPPHQVNYRANIWALKQAGAEAILAVNAVGGIHPAMGTGHFCVPHDLVDYTSGRQHTFFADDLEEVTHIDFSYPYSEALRVRLVAALAAEGCAFSDRGVYACTQGPRLETVAEIIRLERDGCDIVGMTGMPEAALARELELEYACLALVVNPAAGKSTAVITMAEIEQALRDGMGKVKATLARVLSAS

SEQ ID NO: 34194 - DNA, 714 bp, Xylella fastidiosa
  CDS (1)..(714): transl_table=11
atgcaaacgattgctctggcggtgattggtggtactggtgtttacacgttgtctcagctcgacgatgtacaggtgtatgaggttgagacgttgtatggtcgtccttctggtccaatccgtgttggtatgttgtttggccagcgtgtggctttctttgcccgtcatggtgaggagcatgcgttgccaccacacaaaattaattatcgcgccaatattgccgctttgcagcagcttggtgtcagtcgtgtgctggcgctcaatactgtcggtggaatcaatgaggcgtttggcccacgtacgttggtttgtcctgatcagctgattgactatacatgggggcgtgtctccacgttctgtgaggaagtggggagtgaggtgctccatgtggattttggtcatccttattctccgttgctgcgtggttgtttgttgcgtgcagcacgtgatgtggatgtaagtttggtcgagtatggttgctatggtgtgactcagggaccacgtttggaaacgattgccgagattgctcggttacgccgcgatgggtgtgacttagttggtatgacgggtatgcctgaggctgcgttggcgcgtgagaaggggctggaatatgcgtgtttggggattgtctcgaactgggcggcgggttgtggtgatggcgctgagatcacaatgggagaaattttgtccaatgttgcgacagtcttccggaactaa

SEQ ID NO: 34195 - protein, 237 aa, Xylella fastidiosa
MQTIALAVIGGTGVYTLSQLDDVQVYEVETLYGRPSGPIRVGMLFGQRVAFFARHGEEHALPPHKINYRANIAALQQLGVSRVLALNTVGGINEAFGPRTLVCPDQLIDYTWGRVSTFCEEVGSEVLHVDFGHPYSPLLRGCLLRAARDVDVSLVEYGCYGVTQGPRLETIAEIARLRRDGCDLVGMTGMPEAALAREKGLEYACLGIVSNWAAGCGDGAEITMGEILSNVATVFRN

SEQ ID NO: 34196 - DNA, 924 bp, Schizosaccharomyces pombe
  CDS (1)..(924)
atgaacaaacaagctgagccaattcttcttggagtaattggaggtagcggtttttatgacctcccaggatttgatattgtcgaaagtgtcaatcctattacgccatggggttatccagcttctccaatttccattgcccgcacaacctctggttttttgattgcatttttggctagacatggtgtcggtcacatttatacacctacagaagttccatctcgagcaaatatcgcagctttaaaaagtttaggtgttttggcaattgtttcgttcagcgctgttggatctttgagggaggatattccaccggaggattttgttctgcctacacagattattgatcgcaccctttgtgctcgtccaaacactttttttgaatctggttgtgtagctcatgtttcgtttggtgatccatttgatcaagacttgtatgaaattttaagttcatgcggctccaacttaaaaaatggttctaaattacataccaaacgcaaaggagatgatcttactgtcgtgtgtatggagggtcctgcatttagtacgcgtgcagaaagcaatttatacagaagctggggagccagtattatcaacatgtcagtcattcccgaagccaaactagctcgcgaagctgagattgcctaccaaatggtttgcatggctacagattatgattgctggcgcatgaatgaggagcctgttactgttgaaaccgtgatggaacatatcagtaacaataaagataatgcaaaaatctttttactggaagccgtcaaaaagttagaagctccacttttgcaaggatttttgggaaggaacttgcgagaaagtgttcaaaatgggattcaaacaaatcacaagcatcgtaacccagatgcaattagacgacttcaatttctttttcccaatcttaccattccgcactaa

SEQ ID NO: 34197 - protein, 307 aa, Schizosaccharomyces pombe
MNKQAEPILLGVIGGSGFYDLPGFDIVESVNPITPWGYPASPISIARTTSGFLIAFLARHGVGHIYTPTEVPSRANIAALKSLGVLAIVSFSAVGSLREDIPPEDFVLPTQIIDRTLCARPNTFFESGCVAHVSFGDPFDQDLYEILSSCGSNLKNGSKLHTKRKGDDLTVVCMEGPAFSTRAESNLYRSWGASIINMSVIPEAKLAREAEIAYQMVCMATDYDCWRMNEEPVTVETVMEHISNNKDNAKIFLLEAVKKLEAPLLQGFLGRNLRESVQNGIQTNHKHRNPDAIRRLQFLFPNLTIPH

SEQ ID NO: 34198 - DNA, 21 bp, Artificial sequence
  primer
atgacggtccatgcgatcatc

SEQ ID NO: 34199 - DNA, 20 bp, Artificial sequence
  primer
tcaggccgtcaggacccgcc

SEQ ID NO: 34200 - protein, 240 aa, Artificial sequence
  consensus sequence
  Variant (4)..(4): Xaa in position 4 is any amino acid
  Variant (6)..(18): Xaa in position 6 to 18 is any amino acid
  Variant (19)..(29): Xaa in position 19 to 29 is any or no amino acid
  Variant (32)..(32): Xaa in position 32 is any amino acid
  Variant (34)..(44): Xaa in position 34 to 44 is any amino acid
  Variant (45)..(56): Xaa in position 45 to 56 is any or no amino acid
  Variant (59)..(59): Xaa in position 59 is any amino acid
  Variant (63)..(63): Xaa in position 63 is any amino acid
  Variant (64)..(66): Xaa in position 64 to 66 is any or no amino acid
  Variant (68)..(70): Xaa in position 68 to 70 is any amino acid
  Variant (72)..(76): Xaa in position 72 to 76 is any amino acid
  Variant (80)..(81): Xaa in position 80 to 81 is any amino acid
  Variant (84)..(86): Xaa in position 84 to 86 is any amino acid
  Variant (88)..(97): Xaa in position 88 to 97 is any amino acid
  Variant (99)..(104): Xaa in position 99 to 104 is any amino acid
  Variant (105)..(106): Xaa in position 105 to 106 is any or no amino acid
  Variant (108)..(117): Xaa in position 108 to 117 is any amino acid
  Variant (119)..(119): Xaa in position 119 is any amino acid
  Variant (121)..(133): Xaa in position 121 to 133 is any amino acid
  Variant (134)..(152): Xaa in position 134 to 152 is any or no amino acid
  Variant (154)..(158): Xaa in position 154 to 158 is any amino acid
  Variant (159)..(159): Xaa in position 159 is any or no amino acid
  Variant (161)..(177): Xaa in position 161 to 177 is any amino acid
  Variant (178)..(193): Xaa in position 178 to 193 is any or no amino acid
  Variant (195)..(200): Xaa in position 195 to 200 is any amino acid
  Variant (203)..(205): Xaa in position 203 to 205 is any amino acid
  Variant (207)..(207): Xaa in position 207 is any amino acid
  Variant (210)..(215): Xaa in position 210 to 215 is any amino acid
  Variant (216)..(217): Xaa in position 216 to 217 is any or no amino acid
  Variant (219)..(223): Xaa in position 219 to 223 is any amino acid
  Variant (226)..(227): Xaa in position 226 to 227 is any amino acid
  Variant (230)..(231): Xaa in position 230 to 231 is any amino acid
  Variant (236)..(239): Xaa in position 236 to 239 is any amino acid
IGGXGXXXXXXXXXXXXXXXXXXXXXXXXTPXGXXXXXXXXXXXXXXXXXXXXXXXFLXRHGXXXXHXXXPXXXXXRANXXALXXXGXXXXXXXXXXGXXXXXXXXPXXXXXXXXXXDXTXXXXXXXXXXXXXXXXXXXXXXXXXXXXXXXXHXXXXXXPXXXXXXXXXXXXXXXXXXXXXXXXXXXXXXXXXGXXXXXXGPXXXTXAEXXXXXXXXGXXXXXMTXXPEXXLAREXXXXY

SEQ ID NO: 34201 - protein, 17 aa, Artificial sequence
  protein pattern
  Variant (2)..(4): Xaa in position 2 to 4 is any or no amino acid
  Variant (7)..(7): Xaa in position 7 is Ala or Val
  Variant (8)..(8): Xaa in position 8 is any amino acid
  Variant (11)..(11): Xaa in position 11 is Lys or Arg
  Variant (13)..(13): Xaa in position 13 is any amino acid
  Variant (14)..(14): Xaa in position 14 is Asp, Glu, Gly, Asn, Ser or Thr
  Variant (15)..(16): Xaa in position 15 to 16 is any amino acid
MXXXPEXXLAXEXXXXY

SEQ ID NO: 34202 - protein, 22 aa, Artificial sequence
  protein pattern
  Variant (3)..(3): Xaa in position 3 is Ile, Leu or Met
  Variant (4)..(4): Xaa in position 4 is any amino acid
  Variant (6)..(6): Xaa in position 6 is Leu or Met
  Variant (7)..(10): Xaa in position 7 to 10 is any amino acid
  Variant (11)..(11): Xaa in position 11 is Ala, Cys or Val
  Variant (12)..(13): Xaa in position 12 to 13 is any amino acid
  Variant (14)..(14): Xaa in position 14 is Ile, Leu or Val
  Variant (15)..(15): Xaa in position 15 is Phe, Ile, Leu or Val
  Variant (16)..(16): Xaa in position 16 is Ala, Gly, Ser or Val
  Variant (17)..(17): Xaa in position 17 is any amino acid
  Variant (18)..(18): Xaa in position 18 is Ala, Cys, Gly, Asn, Ser or Thr
  Variant (19)..(19): Xaa in position 19 is Ala, Ser, Thr or Val
  Variant (20)..(20): Xaa in position 20 is Ala, Cys, Ser, Thr or Val
  Variant (22)..(22): Xaa in position 22 is Gly or Ser
ANXXAXXXXXXXXXXXXXXXGX

SEQ ID NO: 34203 - protein, 20 aa, Artificial sequence
  protein pattern
  Variant (2)..(4): Xaa in position 2 to 4 is any or no amino acid
  Variant (6)..(6): Xaa in position 6 is Phe, Ile, Leu or Met
  Variant (7)..(7): Xaa in position 7 is any amino acid
  Variant (10)..(10): Xaa in position 10 is Asp, Gly or Ser
  Variant (11)..(12): Xaa in position 11 to 12 is any amino acid
  Variant (14)..(16): Xaa in position 14 to 16 is any amino acid
  Variant (17)..(17): Xaa in position 17 is Ala or Pro
  Variant (18)..(19): Xaa in position 18 to 19 is any amino acid
  Variant (20)..(20): Xaa in position 20 is Ile, Leu or Val
VXXXFXXRHXXXHXXXXXXX

SEQ ID NO: 34204 - DNA, 606 bp, Azotobacter vinelandii
  CDS (1)..(606): transl_table=11
atggctcgcggacgtccccgcagcttcgatcgtgacgccgcgcttgcgcgcgcgatggacgtgttctgggccaaaggctacgaggcggcctcactcaccgaactgatggtcgccatgggcctcaatccgcccagcttctacgccgccttcggttccaaggacgccctgtaccgggagtcggtcgatttgtacctcgctacggtggggggcggcagcatgaaggtgctggccgagacgccaggcgtgcgcgaggccatcgagcggatgctgctggcgagcctggaggtcgccctggccagcccgtcctccggcggctgcatggtcagcctgggtctgttcaactgccaagcgcagaacgcgcccttgcgcgagcacatgtgcgaactgaggcgcagcaccacaaggttgattcgccagcgcctggagcgcggcgtcggcgacggcgaactggcggccggcaccgataccgaacgcctggcgacttacttcgccaccatcattcagggcatctccttccaggctcaggatggcgccgggcggcaggcattgctcggtatcgtcgaaacggcgatggcggcattcgaggcgacgagcaatccggtttga

SEQ ID NO: 34205 - protein, 201 aa, Azotobacter vinelandii
MARGRPRSFDRDAALARAMDVFWAKGYEAASLTELMVAMGLNPPSFYAAFGSKDALYRESVDLYLATVGGGSMKVLAETPGVREAIERMLLASLEVALASPSSGGCMVSLGLFNCQAQNAPLREHMCELRRSTTRLIRQRLERGVGDGELAAGTDTERLATYFATIIQGISFQAQDGAGRQALLGIVETAMAAFEATSNPV

SEQ ID NO: 34206 - DNA, 615 bp, Mesorhizobium loti MAFF303099
  CDS (1)..(615): transl_table=11
atgtcggacagaggacgtccccgtaccttcgaccgaaccgccgccctgcggcgcgcgatggagctgttttgggccaagggctatgggggtacgtcgatcgccgagttgacgacggcgatgggtatcaattcgcccagcctctatgccgccttcggcagcaaggaggcgctgttcctcgaagcgaccgaatattacacgcaagccgaaggaaccgagatatgggccgccttggacgaggcgccgacggcatgccaggcgatcgagaattttctgcggcgcacagccaaggcctattcgcagaccgatcggccgcagggctgcttgattgcgctgggcgccctgcatgaggactcaagcagcggtgccatctgcacggatttgcgccgccgccgcgccgaaaatcttaccaccctgcgcaagcgcctggagcgcggtgtggccgagggcgaattgcctgccgacttcgactgcgatgccgtggcgaccttctacgccacggtccagcacggcatgtccatccaggcgcgtgacggcgcgtcgtgcctcgcgctgatggcgaccgtcgctggcgcgatggctgcctggcaggtactcgcaggccccgacagagcgtga

SEQ ID NO: 34207 - protein, 204 aa, Mesorhizobium loti MAFF303099
MSDRGRPRTFDRTAALRRAMELFWAKGYGGTSIAELTTAMGINSPSLYAAFGSKEALFLEATEYYTQAEGTEIWAALDEAPTACQAIENFLRRTAKAYSQTDRPQGCLIALGALHEDSSSGAICTDLRRRRAENLTTLRKRLERGVAEGELPADFDCDAVATFYATVQHGMSIQARDGASCLALMATVAGAMAAWQVLAGPDRA

SEQ ID NO: 34208 - DNA, 615 bp, Pseudomonas aeruginosa PAO1
  CDS (1)..(615): transl_table=11
atggccaagcgtggacgcccctgcggcttcgatcgtgaacaggcattgcgccgggcgctcgacgtgttctgggaggccggctacgaaggcgtgaccatggccgcgctgaaggaggccatgggtggcatctgcgcgccgagcatgtatgccgcctatggttccaaggaggcgctgttccgttcggcggtggaactctacctgagccaggagtgccagctttccaagggcgccttcgccctgccgacggcgcgcgagtcgatcgccgcgctgctggaaagcgccgccgtcagctacaccaccgaaggcaagccgcgcggttgcctggtcgacctcagcacgaccaatttctcgccggccaacaaaggcgtcgaagactacctgcgcgatcaccggcggcgcgccgcgcgcctgctgcgcgagcgtttcgcacgaggcgtggccgacggcgacgtgccggccggagccgatctcgacgcgctcaccagtttctacagcagcgtgctccagggcctgtcgatccaggcccgcgacggcgccagccgccagcagttgctggccatcggccgctgcgcgatggcggcctgggattccctgctggcggtcgaggccgcctga

SEQ ID NO: 34209 - protein, 204 aa, Pseudomonas aeruginosa PAO1
MAKRGRPCGFDREQALRRALDVFWEAGYEGVTMAALKEAMGGICAPSMYAAYGSKEALFRSAVELYLSQECQLSKGAFALPTARESIAALLESAAVSYTTEGKPRGCLVDLSTTNFSPANKGVEDYLRDHRRRAARLLRERFARGVADGDVPAGADLDALTSFYSSVLQGLSIQARDGASRQQLLAIGRCAMAAWDSLLAVEAA

SEQ ID NO: 34210 - DNA, 591 bp, Pseudomonas aeruginosa PAO1
  CDS (1)..(591): transl_table=11
atggcaacgcgaggcaggccacgggcattcgacagggacacagccctgcagcgagccatggacgtgttctgggtgcgtggctacgaaggcgcttcgctggcggccctgaccgaggcgatggaaatcaggccgcccagcctgtacgccgccttcggcagcaaggaagggctgttccgcgaagccctggcccactatctcggccagcacggccgctatcgccgggatgtcctcgatggcgcgccgagcgcccgcgagggcgtggccgagctgctccgcgagaccgtcgcgcgcttctgttccgacgagttcccgcgcggttgcctggtggtgctcgcggcgctgaccggaaccccggaaagcgaggcggtgcgggacgcgttgagcgccgagcgcggcgagtcgatccgcctgttccgtgagcgcatgcggcgcggcatcgctgacggcgacctggcggcggacaccgacgtggaggagttggcgaccttctatgccaccgtgctgttcggcctcagcgtgcaggccaaggaccgggtgccttgcgagcgcctgctggcggtggtcgaacgggcgctgcgcgcctggccctga

SEQ ID NO: 34211 - protein, 196 aa, Pseudomonas aeruginosa PAO1
MATRGRPRAFDRDTALQRAMDVFWVRGYEGASLAALTEAMEIRPPSLYAAFGSKEGLFREALAHYLGQHGRYRRDVLDGAPSAREGVAELLRETVARFCSDEFPRGCLVVLAALTGTPESEAVRDALSAERGESIRLFRERMRRGIADGDLAADTDVEELATFYATVLFGLSVQAKDRVPCERLLAVVERALRAWP

SEQ ID NO: 34212 - DNA, 711 bp, Escherichia coli O157:H7 EDL933
  CDS (1)..(711): transl_table=11
atgggatctggactggtgaacggaggtgattatttttataataacctttcattcacagtcaccaggtacaacggcatcatggcaactgactcaacacaatgtgtaaaaaaaagccgtggccgcccaaaagtgttcgacagggatgccgcgcttgataaggccatgaaattgttctggcaacacggttatgaagcgacttctcttgcggacctcgtcgaagcgaccggagccaaagcgcccacgctatacgcggaatttaccaacaaagaggggttatttcgtgccgttctcgaccgctatatcgatcgttttgccgctaagcatgaagcacagctgttttgtgaagagaaaagcgtggagtctgcgctggctgactattttgctgccatcgccaactgctttaccggcaaagacaccccggcaggctgcttcatgatcaacaactgcaccaccctctccccagattcaggagatatcgccaatacgttgaaatcacgccatgcgatgcaagagcgcactttgcagcagtttttatgtcaacgacaagcgcgcggggaaatcccgacccactgtgacgtgacacatctggcagaattccttaattgtattattcaggggatgtcgatcagcgcacgcgaaggtgcatcgttggaaaaactgatgcagattgccggaacgactttgcgtttatggcccgaactggtgaaataa

SEQ ID NO: 34213 - protein, 236 aa, Escherichia coli O157:H7 EDL933
MGSGLVNGGDYFYNNLSFTVTRYNGIMATDSTQCVKKSRGRPKVFDRDAALDKAMKLFWQHGYEATSLADLVEATGAKAPTLYAEFTNKEGLFRAVLDRYIDRFAAKHEAQLFCEEKSVESALADYFAAIANCFTGKDTPAGCFMINNCTTLSPDSGDIANTLKSRHAMQERTLQQFLCQRQARGEIPTHCDVTHLAEFLNCIIQGMSISAREGASLEKLMQIAGTTLRLWPELVK

SEQ ID NO: 34214 - DNA, 660 bp, Agrobacterium tumefaciens str. C58
  CDS (1)..(660): transl_table=11
gtgatcgatataataatgactgaaacgacgcgaaaacgcggcaggccgcgcctgctcgatcggaataccgggctcgacatcgcggcccggctgttctgggagcggggatatgagggaacctcgatagcggatctcacccatgcgatggggatcacgccgccatctctttatgcgaccttcggttcgaaggaagaactgttccggctggcgctcgatcatcatatcgcgcaacaaagcgagcgccgtgccggactattgcaggcgaaaataccggcccacgaggcgcttgccgcgtacctttacgatattgcagaaggcgacacccagccggacaagccgcgcggatgcatcgtttcgaccgccgttctccagcattcggaagaaaacgcctccgtcgcccgtgccacggcagcattgcgcgagggggcgatacagattctcaaggcgcggttcgatcgcgccatccatgacggtgagctaccggaacaaaccgatacggacacccttgcgcgcttttatggcgcaattattcagggcatgtctgcccaggcttgcgacggtgcatgtacggagacattaaaggccgtcgtcgacgtggcgctgatggcgtggccgggaaagcaaggcgctagcggccgatggagcggcctcaacaagtga

SEQ ID NO: 34215 - protein, 219 aa, Agrobacterium tumefaciens str. C58
MIDIIMTETTRKRGRPRLLDRNTGLDIAARLFWERGYEGTSIADLTHAMGITPPSLYATFGSKEELFRLALDHHIAQQSERRAGLLQAKIPAHEALAAYLYDIAEGDTQPDKPRGCIVSTAVLQHSEENASVARATAALREGAIQILKARFDRAIHDGELPEQTDTDTLARFYGAIIQGMSAQACDGACTETLKAVVDVALMAWPGKQGASGRWSGLNK

SEQ ID NO: 34216 - DNA, 615 bp, Sinorhizobium meliloti 1021
  CDS (1)..(615): transl_table=11
atgtccgacaaaggccgcccccgcagcttcgatcgtgccgatgcactcatgcgcgccatgaaggtcttttgggagaagggatacgagggcgcgtcgctgacagcgctgaccgctgccatgggcatcaatgcgccgagcctttatgccgcatttggctgcaaggaagcgctctatcttgaggcaatggagctctacgcgcaaacggtcggcaccgaaatctgggcggcactggagacagcgccgacggcaagggaggcggtcagccaaatccttctcgcgacagccgaagcctattctcagccggatactccgcacggctgcctgatagccctcggaggacttcaccaggcagcaattcccgaagcggtctgcgaagcgttgacccgtcaccgcaaggaaaacatcgacaagctacgccagcggctggaagctgcaattgctggaggcgagttacccgatcgggtggatgccggggctgtcgcgaccttttatgcgacggtacaacatggaatgtcgatcctcgcgcgcgatggcggcagctatgaggcgctgaaaaacgtcaccgacggcgccatggccgcctggggcgtgttggcgcaagacccagcgccatag

SEQ ID NO: 34217 - protein, 204 aa, Sinorhizobium meliloti 1021
MSDKGRPRSFDRADALMRAMKVFWEKGYEGASLTALTAAMGINAPSLYAAFGCKEALYLEAMELYAQTVGTEIWAALETAPTAREAVSQILLATAEAYSQPDTPHGCLIALGGLHQAAIPEAVCEALTRHRKENIDKLRQRLEAAIAGGELPDRVDAGAVATFYATVQHGMSILARDGGSYEALKNVTDGAMAAWGVLAQDPAP

SEQ ID NO: 34218 - DNA, 636 bp, Salmonella typhimurium LT2
  CDS (1)..(636): transl_table=11
atgacaacggataccacgagttgcgcgaagaaaagccgtggccgaccaaaagtgttcgacagggaagccgcgcttgataaggccatgactctcttctggcagcacggctatgaagcaacttcgcttgccgatctcgtagaggctaccggggcgaaagcgcctactctctatgcggaattcactaacaaaaaaggattatttcgcgctgtcctggatcgctacatcactcgctttgcctcaaaacacgaagcccagctcttttgtgaagagaaaagcgtagaatcggcgctggaagattacttcacagaaattgccgcctgctttaccagtacagacacgccggctggctgctttatgattaatacgtccgccaccctggccgcctcctcgcgcgatatcgcccgcacggtaaaatcacgccacgccatgcaggaacagacgctcatccagtttctgcgccaacgtcaggagcgcggtgaaattccggcgcactgtaacccgcaggcgctcgcagaatatataaactgtattttacagggaatgtcgatcagcgcccgtgaaggtgccaccttcgaacaactgatgcaaattacgcgtacgactctgcgcatctggcctgaactgatcaagtcctga

SEQ ID NO: 34219 - protein, 211 aa, Salmonella typhimurium LT2
MTTDTTSCAKKSRGRPKVFDREAALDKAMTLFWQHGYEATSLADLVEATGAKAPTLYAEFTNKKGLFRAVLDRYITRFASKHEAQLFCEEKSVESALEDYFTEIAACFTSTDTPAGCFMINTSATLAASSRDIARTVKSRHAMQEQTLIQFLRQRQERGEIPAHCNPQALAEYINCILQGMSISAREGATFEQLMQITRTTLRIWPELIKS

SEQ ID NO: 34220 - DNA, 591 bp, Salmonella typhimurium LT2
  CDS (1)..(591): transl_table=11
atgactacaaaacatagccgaacgccgggtcgccctcgccagttcgatccggagcaagccattgaaaccgctcaacatttatttcattcgcgcggctacgacgcggtgagcgtagcggatctgacaaaagcgttcgggatcaatcctcccagtttctatgcggcgtttggtagcaagttggggctgtatactcgcgtattaaagcgttacaggatgaccgacgcgattccgctcggggcgcttctgcgtcacgatcgcccgaccgcgaagtgccttatcgatgtgctgatggaagcggcaagacgttacgctgccgatcctgatgccactgggtgtctggttctggagggcgctcattgtaacgataaaccggcacgagaggccgcctgcgagttttacatcgctgctgaaaacctgattcgcacttatgtcgccatgcggtatccgcaagaggctgaccggacgacggactttatggggacgctaatggcggggctttccgccaaggcgcgagcggggtatggcctggagcgtcttcaggagagcgtgcttctggctggggatgtgctggagcgattactgccggattaa

SEQ ID NO: 34221 - protein, 196 aa, Salmonella typhimurium LT2
MTTKHSRTPGRPRQFDPEQAIETAQHLFHSRGYDAVSVADLTKAFGINPPSFYAAFGSKLGLYTRVLKRYRMTDAIPLGALLRHDRPTAKCLIDVLMEAARRYAADPDATGCLVLEGAHCNDKPAREAACEFYIAAENLIRTYVAMRYPQEADRTTDFMGTLMAGLSAKARAGYGLERLQESVLLAGDVLERLLPD

SEQ ID NO: 34222 - DNA, 645 bp, Agrobacterium tumefaciens str. C58
  CDS (1)..(645): transl_table=11
atgactgaaacgacgcgaaaacgcggcaggccgcgcctgctcgatcggaataccgggctcgacatcgcggcccggctgttctgggagcggggatatgagggaacctcgatagcggatctcacccatgcgatggggatcacgccgccatctctttatgcgaccttcggttcgaaggaagaactgttccggctggcgctcgatcatcatatcgcgcaacaaagcgagcgccgtgccggactattgcaggcgaaaataccggcccacgaggcgcttgccgcgtacctttacgatattgcagaaggcgacacccagccggacaagccgcgcggatgcatcgtttcgaccgccgttctccagcattcggaagaaaacgcctccgtcgcccgtgccacggcagcattgcgcgagggggcgatacagattctcaaggcgcggttcgatcgcgccatccatgacggtgagctaccggaacaaaccgatacggacacccttgcgcgcttttatggcgcaattattcagggcatgtctgcccaggcttgcgacggtgcatgtacggagacattaaaggccgtcgtcgacgtggcgctgatggcgtggccgggaaagcaaggcgctagcggccgatggagcggcctcaacaagtga

SEQ ID NO: 34223 - protein, 214 aa, Agrobacterium tumefaciens str. C58
MTETTRKRGRPRLLDRNTGLDIAARLFWERGYEGTSIADLTHAMGITPPSLYATFGSKEELFRLALDHHIAQQSERRAGLLQAKIPAHEALAAYLYDIAEGDTQPDKPRGCIVSTAVLQHSEENASVARATAALREGAIQILKARFDRAIHDGELPEQTDTDTLARFYGAIIQGMSAQACDGACTETLKAVVDVALMAWPGKQGASGRWSGLNK

SEQ ID NO: 34224 - DNA, 579 bp, Streptomyces coelicolor A3(2)
  CDS (1)..(579): transl_table=11
atggcaaggacccgggagttcgacacggaggcggcggtgagccgcgcgatggagctgttctggacgcgcggctacgaggccacctcggtgcgcgacctgaccgggcacctggggatcgggcaggggtccttgtatgccgcgttcggcgacaaggacggcctgtaccgggcggccctggagcactaccgcaccaccctcgcggcggccgccctgcgcagcctggaggaggggacggacgcccgctcggcgatccgcaccatgctggtcgagcggatccggatcgccgtggacgacaacggccggggctgcctggcggtcaacgccgcctgcgagcgcctgccggaggacgcggcgacccggcgcaccgtgcgcgacatgcaggacgccggccgggacgcgctcaccgaagtgctgcgggtcgcggcggagcggggcgagatcgcgaagcggcacgacccgcacaccctcgcggctttcctcgtcaccttcctcaacggactactggtctcctcgaagatcacgccggacgtccgagccctcgaacccctcgtggaggtcgcgctggccgccctcgactga

SEQ ID NO: 34225 - protein, 192 aa, Streptomyces coelicolor A3(2)
MARTREFDTEAAVSRAMELFWTRGYEATSVRDLTGHLGIGQGSLYAAFGDKDGLYRAALEHYRTTLAAAALRSLEEGTDARSAIRTMLVERIRIAVDDNGRGCLAVNAACERLPEDAATRRTVRDMQDAGRDALTEVLRVAAERGEIAKRHDPHTLAAFLVTFLNGLLVSSKITPDVRALEPLVEVALAALD

SEQ ID NO: 34226 - DNA, 585 bp, Streptomyces coelicolor A3(2)
  CDS (1)..(585): transl_table=11
gtggccaggaccaaggagttcgatccggacgccgcgctgcgggcagcccttgagctgttctggcggcgcggctacgaggcgacgtcgatgtccgacctcgtggagcacctcggcgtcgggcgcgccagcatctacgcgaccttcggcaacaagcgcgagctgtacctgaaggcgctggcgcgctacgagcaggggctgctcccggacctgctggcggacctgtcccggccgggcccggccctgccgggcgtgcgggccctggtgcggcgctacgccgccgaggcgagcgccgacgactcgcgcctgcacggctgcttcgtcaccaacaccgccgccgagctggccgcgcacgacgcggtcgccgcccggcgggtcgagcgcaactgggaccagttggagaccgtgctgcactcggcgctggcccgggcccgcgccgagggcgacctgcccgcggggcgcgatccgctggcgctcgcccggatgctgctggtcctgctccagggcatgcgggtggtcgggaaggcctcgccggacccggccaggatgcgggacgcggcggaagcggccctcgcgctgctcgactga

SEQ ID NO: 34227 - protein, 194 aa, Streptomyces coelicolor A3(2)
MARTKEFDPDAALRAALELFWRRGYEATSMSDLVEHLGVGRASIYATFGNKRELYLKALARYEQGLLPDLLADLSRPGPALPGVRALVRRYAAEASADDSRLHGCFVTNTAAELAAHDAVAARRVERNWDQLETVLHSALARARAEGDLPAGRDPLALARMLLVLLQGMRVVGKASPDPARMRDAAEAALALLD

SEQ ID NO: 34228 - DNA, 609 bp, Streptomyces coelicolor A3(2)
  CDS (1)..(609): transl_table=11
atggagacgcgacagaaggggtcgatcggtcggccgaggggcttcgacgccgacgaggcgctggagaaggccatgcgggtcttctgggagcagggctacgagggcgccagcctcaccgacctgaccggcgccatgggcatcacccgcaccagcatgtacgcggccttcggcaacaaggaggacctgttccgcaaggcgctcgaacgctacgaggagggccccgcctcctatgtcgcccgcgccctgcgggaaccgaccgcccgcgaggtggcgaccgcgttcctgaagggtgccgtccaggtcagcacccgccccgactgcccgtccggctgcctgggcgtccagggctcactcgccgccggcgagaccggacgctccgcccgtgacctgctcgccgactggcgcgaagggggcgtcgcccaactccgcgaccggttccggcaggccgtcgacgacggcgacctgccgcccgacacggaccccctgcacatcgcccggtacctcatgacgttcgccaacggcatctccgtgcaggccaccggcggcgccacccgggaagacctccagcgggtggccgagacggccctgcgcacctggccacccgcctga

SEQ ID NO: 34229 - protein, 202 aa, Streptomyces coelicolor A3(2)
METRQKGSIGRPRGFDADEALEKAMRVFWEQGYEGASLTDLTGAMGITRTSMYAAFGNKEDLFRKALERYEEGPASYVARALREPTAREVATAFLKGAVQVSTRPDCPSGCLGVQGSLAAGETGRSARDLLADWREGGVAQLRDRFRQAVDDGDLPPDTDPLHIARYLMTFANGISVQATGGATREDLQRVAETALRTWPPA

SEQ ID NO: 34230 - DNA, 645 bp, Streptomyces coelicolor A3(2)
  CDS (1)..(645): transl_table=11
atggtgagcggtgagaagagtgaacggtccggggcgcctgctcggagcggcgcggccaggagccgcggccgcccgcgctccttcgaccgggcgacggcgctggaggcggcgctgctggccttctgggagcacgggtacgaggccacgtccgtctccgacctgacgcgggtcatggacatcggggccccgagcctctacgccgccttcggcgacaagcggtcgctcttcgaggaggtcgtccaggagtacggggtgcggtacggctcgttcggcgagcgcgccctcgccgaggagccgaccgcgcgtgcgggcatagagaggatgctgcgcgaggccgccgccgagtacacggcccccggccggccgcacggctgcctcgtcatccacgcggccgccaactgctcgaccaccgaggtggaggagtccctgcgggagcggcgcaacgcgaacatcgccgccatcgagagccggatcggcgccgacgtggacggaggcgtgctgccgccgggcacggacgccgccgcgctcgcccggtacaccggcgcgatgatccagggcatgtcccagcaggcgcgcgacggggcgagccgggcggagctggaggcgctcgcggaaattgccctggcggtctggccccgaggttga

SEQ ID NO: 34231 - protein, 214 aa, Streptomyces coelicolor A3(2)
MVSGEKSERSGAPARSGAARSRGRPRSFDRATALEAALLAFWEHGYEATSVSDLTRVMDIGAPSLYAAFGDKRSLFEEVVQEYGVRYGSFGERALAEEPTARAGIERMLREAAAEYTAPGRPHGCLVIHAAANCSTTEVEESLRERRNANIAAIESRIGADVDGGVLPPGTDAAALARYTGAMIQGMSQQARDGASRAELEALAEIALAVWPRG

SEQ ID NO: 34232 - DNA, 594 bp, Streptomyces coelicolor A3(2)
  CDS (1)..(594): transl_table=11
gtgatggccgggaagaagcagttcgacgtggacaccgcgctcgacgcggcgatggtccagtactggcgggccggatacgccgacacgtctctcgacgacctctccagggcgaccggattgaaccggagttccctctactcctcgttcggtgacaaggagtcgctctacctgcgctgcctggaccgctatgccgcgcggtacggaagcaggtacgaccatgcgctgtcccgggcgtccgaggaaccgctccgggcggtacgggcgttcttcgaggtcaccctggagcgcatcgccgaccccgacgtacccgacggatgcctgatcgcccagaccgcgatggcggcaccggtgctcggccccgccatcgccgcacgcgcggtcgaagccctgggcttgcagcgtgcgcggctgcggaccgccttggacgccgcgcggttggccgaggacgaggccgacgacttcgcggttcacatgacggcggtcaaccagtcgctggccgtgatgagcaggaccggggcgagccggcagcagctccgcacagtcgtcgacatcagcatgagcgccctctcacgcgccctgcccgcccggagctag

SEQ ID NO: 34233 - protein, 197 aa, Streptomyces coelicolor A3(2)
MMAGKKQFDVDTALDAAMVQYWRAGYADTSLDDLSRATGLNRSSLYSSFGDKESLYLRCLDRYAARYGSRYDHALSRASEEPLRAVRAFFEVTLERIADPDVPDGCLIAQTAMAAPVLGPAIAARAVEALGLQRARLRTALDAARLAEDEADDFAVHMTAVNQSLAVMSRTGASRQQLRTVVDISMSALSRALPARS

SEQ ID NO: 34234 - DNA, 591 bp, Xanthomonas campestris pv. campestris str. ATCC 33913
  CDS (1)..(591): transl_table=11
atgactacagaaacctcccgggcgcgcggccggccgcgcgcattcgacccggatcaagcggtcgccaccgcgcagcagctgttccatgcgcgcggctacgacgcactgagcgtggccgacctcacccaggcgctgggcatcaacccgcccagtttctacgccgccttcggcagcaaggccggcctgtatgcgcgcatcctcgaccgctacgcgcagaccggggccatcccgctgccacagatcctggacaccgaccgcccgctggccgacgcgctggcagacgtactggagcaggctgcgcgctgctacgccgcagaccccgctgccaccggctgcctggtgctggaaggcacgcgcagcaacgacgcgcaggcgcgcgaggcggcctgtggttttcatgtcgccgcccaggagttgatccgctcccacatcgccaagcagcgcccgcacgacgccgaccggctggcggatttcgtcagcaccaccatggccgggctgtccgccagcgcccggcatgggcagagcctggagcgtctgctggcgagtgcgcgcttggcgggggaggcgcttcgggtggcgctgcgcggataa

SEQ ID NO: 34235 - protein, 196 aa, Xanthomonas campestris pv. campestris str. ATCC 33913
MTTETSRARGRPRAFDPDQAVATAQQLFHARGYDALSVADLTQALGINPPSFYAAFGSKAGLYARILDRYAQTGAIPLPQILDTDRPLADALADVLEQAARCYAADPAATGCLVLEGTRSNDAQAREAACGFHVAAQELIRSHIAKQRPHDADRLADFVSTTMAGLSASARHGQSLERLLASARLAGEALRVALRG

SEQ ID NO: 34236 - DNA, 648 bp, Streptomyces coelicolor A3(2)
  CDS (1)..(648): transl_table=11
gtgggtcggccgtaccttttgtgtatggcgagaccacgaagcttcgaccgcgaccacgtcctccatgccgccgagcggcagttccgcaccacgggctacaacggcacgagcgtcgacgacataagcgccgccaccggcctgggtcgcggcagcctgtatgccgcgttcgacggcaagcacggtgtgctgctgcaggccatggccgggtactccatccgactggggcagtttgtgccggaggcgctcgccggaccggacgagggtgccctggaacgactgcgcgggttcttgctccgcgccgtcgagggggtgccactggccgccgatgtgccccccgcccctgaccgggcggcggcggcctgcttcgccgccaagatggccctggagatcggcgcctccgactccgaggtggaacgcctggccaacgactgcttctccttggtcgcgacggcggtggccgagtgtgtgcgagcggcgcagcgcaacggcgacatcgaccctgacgcggatcccgacgaccttgcgtaccttctgctgaccatcgtccgcggggtcgatgtcgtaggcgcgtccggccacagccccgcccgcctgacctcaattgcggagagcgcgttcgcattgttgcctcgcccgcgccaccgctga

SEQ ID NO: 34237 - protein, 215 aa, Streptomyces coelicolor A3(2)
MGRPYLLCMARPRSFDRDHVLHAAERQFRTTGYNGTSVDDISAATGLGRGSLYAAFDGKHGVLLQAMAGYSIRLGQFVPEALAGPDEGALERLRGFLLRAVEGVPLAADVPPAPDRAAAACFAAKMALEIGASDSEVERLANDCFSLVATAVAECVRAAQRNGDIDPDADPDDLAYLLLTIVRGVDVVGASGHSPARLTSIAESAFALLPRPRHR

SEQ ID NO: 34238 - DNA, 606 bp, Bradyrhizobium japonicum USDA 110
  CDS (1)..(606): transl_table=11
atgggcatgggacgcccccgggaattcgacgccgaaacggcgttggaccaagcgatggaagtgttctggcgccacggctatgagggcgccaccatcgcgcagctcaccgaagccatgggcatcaatccgcccagcctctacgcctgtttcggcaacaaggaaggcctgctgaaggccgcgctcgaccgctacaccaagctgcgtaacgtctggatggacggcgtggtctcggcgccaaccgcccgcgaggtcgccgagcggatgctgatgggcatcgccgacaagcagaccgatcccgccaatccgcccggatgcctgctcgtgcagggcggcatcgcctgcgacagcggctccgagaatgtccccttcgaactcgccgcccgccgcgctcagaacgaagatcagctccgcgaccgttttgttcgcgccaaggcggaaggtgatctcaagtcgagctctgatcccgccgcgctcgcgcgctacgtctctgcggtctccgtcggcatgggcgtgatggcgtcttcgggcgcagatcgcgaagcgctgcggcaggtggcgagcgtggccgtgcaggcggtcgaggcgcaatcggccgggagaacgtga

SEQ ID NO: 34239 - protein, 201 aa, Bradyrhizobium japonicum USDA 110
MGMGRPREFDAETALDQAMEVFWRHGYEGATIAQLTEAMGINPPSLYACFGNKEGLLKAALDRYTKLRNVWMDGVVSAPTAREVAERMLMGIADKQTDPANPPGCLLVQGGIACDSGSENVPFELAARRAQNEDQLRDRFVRAKAEGDLKSSSDPAALARYVSAVSVGMGVMASSGADREALRQVASVAVQAVEAQSAGRT

SEQ ID NO: 34240 - DNA, 621 bp, Bordetella pertussis Tohama I
  CDS (1)..(621): transl_table=11
atggcagaacgtggtcgcccgcgcagcttcgaacggaccgaagcgctgcgccaggcaatggaagttttctggtccaagggatatgaaggggcctcgctggccgacctgacgtcggccatggggatcaatgcgcccagcctgtacgcggcgttcggctcgaaagaggccttgttccgcgaagcggtgcaacgctacgccgacaccgagggcgcgcgcacgcggcgcgccctgctggaggcgcccgacgcgcgcgccgccatcgaaggcatgctgctggccggcgcgcagacctgcacgctgaacggcaagccgcccggctgcctgatggtgctgggcgccaccgcgggcccggcgcagcatgcgccggtgcgcggctggctgtgcgagcaccgccgcacgatgcaggacctgatcctgcagcggctggagcaggggcgccgtgacggcgagatcggcccgggtgccgacctggccgcgctggcggccttctacgccaccgtcctgcatggcatgtcgatccaggcccgcgacggcgccgaccgcgcggcgctgcaagcggtggcgcggcaggccatgcacgcctgggacgcgctggcgcacccgcccgccgccgcccgctga

SEQ ID NO: 34241 - protein, 206 aa, Bordetella pertussis Tohama I
MAERGRPRSFERTEALRQAMEVFWSKGYEGASLADLTSAMGINAPSLYAAFGSKEALFREAVQRYADTEGARTRRALLEAPDARAAIEGMLLAGAQTCTLNGKPPGCLMVLGATAGPAQHAPVRGWLCEHRRTMQDLILQRLEQGRRDGEIGPGADLAALAAFYATVLHGMSIQARDGADRAALQAVARQAMHAWDALAHPPAAAR

SEQ ID NO: 34242 - DNA, 621 bp, Bordetella bronchiseptica RB50
  CDS (1)..(621): transl_table=11
atgagcgccaaaccccgagccgcgcccacccggaaaatcggccgcccgcgcgccttcgaccgggacgcggccctgctcgcggccatgcgcaccttctggacccaaggctacgaaggcacctcgatccaggacctggtgcaggccatgggcgtgaacaagcccagcctgtatgccaccttcggctgcaaggaagaaatctttcgcgaggcgatcgaactctacgaccgcgtcgaggggcgcgccacctcgcaaagcctcgcccaggcccgcaccgcccgcgaggccgtcgaaaccatgctgcgcgccaacgcgcgcgcctatgccgtggccgaaggcccgcgcggctgcatgatcgtgctgtcatccctgctgggcgcgcccgagaacgcgcgcgtgcgcgcgtacctggccgacaaccgcctggccggagaaaccctgctgaaagaccgcctcgcgcaaggcatcgcgcaaggcgacctggcgcccaccgcggacatcggccagctggccgccttctacaccaccgtgctcgaaggcctctccatccaggcccgcgacggcgccggcgcggacaaactcaacacgatcatcgatgccgccatgctcgcctggccggcctga

SEQ ID NO: 34243 - protein, 206 aa, Bordetella bronchiseptica RB50
MSAKPRAAPTRKIGRPRAFDRDAALLAAMRTFWTQGYEGTSIQDLVQAMGVNKPSLYATFGCKEEIFREAIELYDRVEGRATSQSLAQARTAREAVETMLRANARAYAVAEGPRGCMIVLSSLLGAPENARVRAYLADNRLAGETLLKDRLAQGIAQGDLAPTADIGQLAAFYTTVLEGLSIQARDGAGADKLNTIIDAAMLAWPA

SEQ ID NO: 34244 - DNA, 621 bp, Bordetella bronchiseptica RB50
  CDS (1)..(621): transl_table=11
atggcagaacgtggtcgcccgcgcagcttcgaacggaccgaagcgctgcgccaggcaatggaagttttctggtccaagggatatgaaggggcctcgctggccgacctgacgtcggccatggggatcaatgcgcccagcctgtacgcggcgttcggctcgaaagaggccttgttccgcgaagcggtgcaacgctacgccgacaccgagggcgcgcggacgcggcgcgccctgctggaggcccccgacgcgcgcgccgccatcgaaggcatgctgctggccggcgcgcagacctgcacgctgaacggcaagccgcccggctgcctgatggtgctgggcgccaccgcgggcccggcgcagcatgcgccggtgcgcggctggctgggcgagcaccgccgcgatatgcaggccctgatcctgcggcggctggagcaggggcgccgcgacggcgagatcggcccggacgccgacctggccgcgctggcggccttctacgccaccgtcctgcatggcatgtcgatccaggcccgcgacggcgccgaccgcgcggcgctgcaagcggtggcgcggcaggccatgcacgcctgggaagcactggcgcgcccgcccgccgccgcccgctga

SEQ ID NO: 34245 - protein, 206 aa, Bordetella bronchiseptica RB50
MAERGRPRSFERTEALRQAMEVFWSKGYEGASLADLTSAMGINAPSLYAAFGSKEALFREAVQRYADTEGARTRRALLEAPDARAAIEGMLLAGAQTCTLNGKPPGCLMVLGATAGPAQHAPVRGWLGEHRRDMQALILRRLEQGRRDGEIGPDADLAALAAFYATVLHGMSIQARDGADRAALQAVARQAMHAWEALARPPAAAR

SEQ ID NO: 34246 - DNA, 609 bp, Gloeobacter violaceus PCC 7421
  CDS (1)..(609): transl_table=11
atggaaacgagaaagtctcagggtgtgcagggtcgtcctcgcgcttttaatatcgacacagctttagatcaggctttgctgctgttctggcgcaagggctatttggggacatcgctcaccgatctgactgaggcgatgggtattaaccgtcccagcctttacgccgcctttggcaacaaggagactttattccgcaaggcactcgaccgctatcgcgatcagcacaactatcgggatgcccttgaggaaccaacggctcggagagtgatcgagcggatgatgcagggcgttgtggatttagtgaccaatccaggcaatccgtctagatgtctggttacacagagtctgctcgcctgtgcagagccagaggatccgcttcatcaagaattggcagaacgccgagcggcaggcgagattgctatccgcgctcgcttcgagcgggcgttatctgagggggacttgccgcctgatgctgaccctgctgcccttgcccgctttgtactcacggtcaacgctggactgtccgtgcaagcagcaggtggagccagtcgcacggaactcctacaagttgttcagacggcattgcaagcctgcccaatattagattag

SEQ ID NO: 34247 - protein, 202 aa, Gloeobacter violaceus PCC 7421
METRKSQGVQGRPRAFNIDTALDQALLLFWRKGYLGTSLTDLTEAMGINRPSLYAAFGNKETLFRKALDRYRDQHNYRDALEEPTARRVIERMMQGVVDLVTNPGNPSRCLVTQSLLACAEPEDPLHQELAERRAAGEIAIRARFERALSEGDLPPDADPAALARFVLTVNAGLSVQAAGGASRTELLQVVQTALQACPILD

SEQ ID NO: 34248 - DNA, 594 bp, Photorhabdus luminescens subsp. laumondii TTO1
  CDS (1)..(594): transl_table=11
atgtctcgacgagggagaccccccaatttcgaccgggacatcgcactcaaacgtgcgatggaagtattttggtcaaaaggatatgaaggtacacagttagtcgatctcaccgcggctatggacatcaatccaccgagtttttatgcagccttcggaagtaaaaagaacgccttctgcaaagcagtcgacctctacattaagacgatcggtgtccagtcaatgcaagcactcaatgaagcaaaaacagcacgctcagggttgcgcgcgatgctggagagtaccatcaatatcgcctcttctcatcaagctggaggatgcctgcttgtcttgggtgttgtgaacaatctaacggaaaacaaagaagtatgggcttatctcagggatgcacgtaccaaaaccctagatatgatccgtgttcgcctggagcaaggaatcaccgacggtgatctcccacccaatacaaacgtggatgtgttggcgtcgtatttccttggtttgacccaaactatttcattccaagctcgtgacggcgtacctcgtgaacgacttaggcgcttgattgaacccgcaatggcagctattccaggcaactga

SEQ ID NO: 34249 - protein, 197 aa, Photorhabdus luminescens subsp. laumondii TTO1
MSRRGRPPNFDRDIALKRAMEVFWSKGYEGTQLVDLTAAMDINPPSFYAAFGSKKNAFCKAVDLYIKTIGVQSMQALNEAKTARSGLRAMLESTINIASSHQAGGCLLVLGVVNNLTENKEVWAYLRDARTKTLDMIRVRLEQGITDGDLPPNTNVDVLASYFLGLTQTISFQARDGVPRERLRRLIEPAMAAIPGN

SEQ ID NO: 34250 - DNA, 636 bp, Rhodopseudomonas palustris CGA009
  CDS (1)..(636): transl_table=11
atgatgcagaaatcagatcctaccttggaccatcgcgccgcgcggccgcgtggaaggccgcgggcattcgatcgggcgcgcgcgctggcgcaggcgacccggctgttttggatcaagggctatgaggcgacttcgatcgccgatctgaccgaggcgatgggaatcggcgccccgagtctctacgcggcgttcggctcgaaggaagcgctctacggcgaagcggtgcggcattacgaggccaattacgagcaactggtctggggccggttccgcacggctacctccgctcgcgcggcgctggaagcttttctgctggattccgcctccgccctgaccggggcgcctgatgatcatccgctcggctgcatggtgacgttgtcggccgtcggtagcgaaggacacgccgagctgggggaattggtgcgcagcgcccgtgcggtcacgctgcagcgcctggaggcgcgcctgagcgaggcgattgcggtgagcgaactccccacatcgaccgacattcatgccgttgcccggttttatcaggccgtccaggccggcatgtcgatcctggcccgagacggcgccagccgtgccgagctggaggcggtggctcgccttgccctggcgcgcggggacgtatga

SEQ ID NO: 34251 - protein, 211 aa, Rhodopseudomonas palustris CGA009
MMQKSDPTLDHRAARPRGRPRAFDRARALAQATRLFWIKGYEATSIADLTEAMGIGAPSLYAAFGSKEALYGEAVRHYEANYEQLVWGRFRTATSARAALEAFLLDSASALTGAPDDHPLGCMVTLSAVGSEGHAELGELVRSARAVTLQRLEARLSEAIAVSELPTSTDIHAVARFYQAVQAGMSILARDGASRAELEAVARLALARGDV

SEQ ID NO: 34252 - DNA, 588 bp, Rhodopseudomonas palustris CGA009
  CDS (1)..(588): transl_table=11
atggccatgggccgcccccgcgaattcgatgtcgatgcggcgctcgacctcgcgttgcatgtgttctggcgcaaggggtacgaaggcacctcgatggcggacctcaccgaggcaatgggcatcaccaagccgagcctgtatgcggcgttcggcaacaaggaagagctgttccgcaaggcgctggaccgctacgtcgacgggcccggcggctactaccaggccggcctgcagaagccgaccgcgcgcgaggtggtcgagcacatccttcacggcgcggtcgatgcgatgaccgacccaagcaaccccgggtgtctggcggtacaaggcgcgctgtgttgcggcgaggcagccgagaccatcaagcaggaactggccgcgcgccgcgccaagaccgaggacgatctgcgccttcgcctggaccgggcgatcaccgaaggcgacctaccggcgcaagccgacgccggcgacttggcccgctacgtgtcggagatcctgcagggcatggcggtgcaggcggcgagcggcgccccaagcgagcagctgcacaagctcgccgacatcgccctccgaaactggccacccgtgtag

SEQ ID NO: 34253 - protein, 195 aa, Rhodopseudomonas palustris CGA009
MAMGRPREFDVDAALDLALHVFWRKGYEGTSMADLTEAMGITKPSLYAAFGNKEELFRKALDRYVDGPGGYYQAGLQKPTAREVVEHILHGAVDAMTDPSNPGCLAVQGALCCGEAAETIKQELAARRAKTEDDLRLRLDRAITEGDLPAQADAGDLARYVSEILQGMAVQAASGAPSEQLHKLADIALRNWPPV

SEQ ID NO: 34254 - DNA, 603 bp, Bradyrhizobium sp. ORS278
  CDS (1)..(603): transl_table=11
atgggtatcggacggccccggactttcgaccgcgacaccgcgctggagcaagccatggaggtgttctggcgccatggctatgagggcgcgaccatcgcccagctcaccgacgccatgggcattaacccgccgagcctctacgccgcgttcggcagcaaggaggcgctgctgaaggctgcgctggatcgctacacggcgcgtcgcgaggcgtggatggaggaggtgctgagcgcgccgacggcccgtgaggtcaccgcgcggatgctgatgggtgtcgccgagaagcagaccgacccgtccaatccaccgggctgccttctggtgcagggcgggctcgcctgcggctcgggctcatccaatgtcccgttcgagctcgccgcccgccgcgcccagaccgaggagcagctccgccatcgcttcgagcgcgcgaaggaggagcgcgatctggccgcgaccgccgaccccgccgcgctcgcgcgctatgtctccgccgtgatcaccggcatgagcgtgatggcgtcgtctggcgccgaccgcgaggcgctggcgcaggtcgcggccgtggcggtcaaggccatcgaggatcagtcggtgcgcgcgtaa

SEQ ID NO: 34255 - protein, 200 aa, Bradyrhizobium sp. ORS278
MGIGRPRTFDRDTALEQAMEVFWRHGYEGATIAQLTDAMGINPPSLYAAFGSKEALLKAALDRYTARREAWMEEVLSAPTAREVTARMLMGVAEKQTDPSNPPGCLLVQGGLACGSGSSNVPFELAARRAQTEEQLRHRFERAKEERDLAATADPAALARYVSAVITGMSVMASSGADREALAQVAAVAVKAIEDQSVRA

SEQ ID NO: 34256 - DNA, 705 bp, Acinetobacter sp. ADP1
  CDS (1)..(705): transl_table=11
gtgattgttataaaaatatatgtggtctttatgacagatgtagcaaattgtgctgaacaaaacagtccagagcaggcagtgaagaagaaacgtggccgtccaaaatgttttgatgaacaagctgcacttgaacaggcaatgttattgttttgggaacatggttatgaggcaacgtctattaatgacctgacccagctactcggtatcacagcgcccagcttatacagtacgtttggtgataaagcgacgttattttataaaagcattgattattatctggcgcatgaagcttgccctatagatcggatgtttgagcaggcgaaaaccgccagaatcgcgttcgaactttatatgtatgacaatctgaatcgcctgcttcagcccaataaaccctcaggatgtatgctggtcgttgctaccatgaactgttcagaatcaacgcaggatgtgcagcagaatttattggccaaacgcctcaagaccaaagaaaaattgatgcagcgtctacaaaagggaatatcggaaggtgacctgccagaacatataccacttgaagccatgaccgatttttattgtacggtgatacaggggttgaccatgcaagcacgtgatggtgcctcacttgcgcaattgaccaaggtggttgagcatgcaatgcgtgcttggtctttatttgtagatacacatggcgagactacgatataa

SEQ ID NO: 34257 - protein, 234 aa, Acinetobacter sp. ADP1
MIVIKIYVVFMTDVANCAEQNSPEQAVKKKRGRPKCFDEQAALEQAMLLFWEHGYEATSINDLTQLLGITAPSLYSTFGDKATLFYKSIDYYLAHEACPIDRMFEQAKTARIAFELYMYDNLNRLLQPNKPSGCMLVVATMNCSESTQDVQQNLLAKRLKTKEKLMQRLQKGISEGDLPEHIPLEAMTDFYCTVIQGLTMQARDGASLAQLTKVVEHAMRAWSLFVDTHGETTI

SEQ ID NO: 34258 - DNA, 609 bp, Erwinia carotovora subsp. atroseptica SCRI1043
  CDS (1)..(609): transl_table=11
atgaaaacaggcagaccaaggcagtttgacagagatgaagctgtcgtacaggcaatgcatcttttctgggaacagggttatgaggcaacatcacttgcccacctgaaggcctcgataggcaaagggatcagtgcgcccagtttttatgcggcgtttggttcgaaagcctctctttttaacgaggcagttgattgttatctgaaaacacatgcacaggtaacatcatcgctctgggatcccaacctgcctccacgacaggcgctggagatggcattaacgaattcggcaaaaatgcagtacgaacccgggcatcctcggggatgtatggttgcgctcagcgtaatgcccctatgctctgatgaaaacggggatctcctgaagccccttgctgagtcaaggcgtcacaccagggagggaataaagcattgcttacagagaggcataaacagcggtgagcttgttaatggtgaggataccctttcccaggcggtctgttttgacagttttctggtgggaatatcgacgctcgcccgggataatgtgccgctgaaagagacactacggggcatcgcgcaaataatgaaattatgggacaccgcacgtttgtag

SEQ ID NO: 34259 - protein, 202 aa, Erwinia carotovora subsp. atroseptica SCRI1043
MKTGRPRQFDRDEAVVQAMHLFWEQGYEATSLAHLKASIGKGISAPSFYAAFGSKASLFNEAVDCYLKTHAQVTSSLWDPNLPPRQALEMALTNSAKMQYEPGHPRGCMVALSVMPLCSDENGDLLKPLAESRRHTREGIKHCLQRGINSGELVNGEDTLSQAVCFDSFLVGISTLARDNVPLKETLRGIAQIMKLWDTARL

SEQ ID NO: 34260 - DNA, 618 bp, Mannheimia succiniciproducens MBEL55E
  CDS (1)..(618): transl_table=11
atggaacagaaattatcaccgaagcaaaaaggtagacctagaacttttgatagagaaaaagcgttagaatcggcgctttttgttttttggaatcaaggttatacaaatacctcgattgcggatttatgtaatgcaattaacataaatccgccaagtttatatgctgcctttggtaataaatcacaattttttattgaaatattagattactatcgtcgggtttattgggatgttatctatgccaaaatggatgttgaaaaagatattcatcgggcgattcatatattcttccgggactctgttaacgtagtgacagtagcaaatacgcccggcggctgtttaagtgctgttgctacattaaatttatcggcggaagaaactaaaattcaacaaaacatgagacagttaaaatccgatattttaaaacgttttgagaaccgcttaaaacgagcgattgtggataaacaattaccgtcgcaaaccgatattccagcattagcgctagctttacaaacttatttatatggtattgccatacaagctcaagccggtacaagtaaagatgatttattaaaagtggcatcgaaagccggcttattactccctaaattaatttaa

SEQ ID NO: 34261 - protein, 205 aa, Mannheimia succiniciproducens MBEL55E
MEQKLSPKQKGRPRTFDREKALESALFVFWNQGYTNTSIADLCNAININPPSLYAAFGNKSQFFIEILDYYRRVYWDVIYAKMDVEKDIHRAIHIFFRDSVNVVTVANTPGGCLSAVATLNLSAEETKIQQNMRQLKSDILKRFENRLKRAIVDKQLPSQTDIPALALALQTYLYGIAIQAQAGTSKDDLLKVASKAGLLLPKLI

SEQ ID NO: 34262 - DNA, 600 bp, Pseudomonas fluorescens Pf-5
  CDS (1)..(600): transl_table=11
atggctggaagaccccgcgaattcgaccgtcaccaggcactgcgccaggcgctcgaactgttctggcgccgtggtttcgaaaccacctccatggccgacctggtggcggccctgggcatcgcctcggcgcgcatctatgccgccttcggctccaaggaggcgttgtttcgcgaggccatcgagctgtacgaaagccaggaaggcggtttcgccgacctggccctgcaagagccctgcgcctacgtcgccatcgagcgcatgctgcaagaagcggtggcactctacacccgggccgacggcccccgtggctgcatggtggtggcctcggcggtgaactgctcaagcgacaacgacagcgtgcgcgaatggctggccgaacatcgccgggcgcgtaccgcaagcattatccagcgcctggaagccgcgcagcaggcgggtgaattgcccggccacagcgatgcaacttccctgggcgattattactctacggtgctccacgggctgtcggtgcaagcccgcgacggcgtcagtgcggcgcgcctgctgcagggcgtggcgctggccatgcaggtctttgcgcgaaccgcccaagggaattga

SEQ ID NO: 34263 - protein, 199 aa, Pseudomonas fluorescens Pf-5
MAGRPREFDRHQALRQALELFWRRGFETTSMADLVAALGIASARIYAAFGSKEALFREAIELYESQEGGFADLALQEPCAYVAIERMLQEAVALYTRADGPRGCMVVASAVNCSSDNDSVREWLAEHRRARTASIIQRLEAAQQAGELPGHSDATSLGDYYSTVLHGLSVQARDGVSAARLLQGVALAMQVFARTAQGN

SEQ ID NO: 34264 - DNA, 609 bp, Psychrobacter arcticus 273-4
  CDS (1)..(609): transl_table=11
atgtcacgtactacattatataatcgtcatgaagcattagagcgagccatgcagctattttggcaaaaaggctttcatgcgacgtctttaaaggatatcgagcaagcgcttgatatgcgaccaggcagtatttatgccgctttcggtaataaggatggactgtttcaagaagcgctcgattactatgctcaggcagaactaaaggagtttgagcgtatattgagcagctatgagtcccctttgttaggattggcggcttacgtgcgtcaacttggcggtatccgcgaaaaaaacttgcccagtcaggtgtgtatgctggtcaaaagcttacttgagcttggtgctcgtgagcagccagcacttgaaaaggtcgagaagctattagctggcatggaaatgcgctttgtagagtgctttgctcaagcccagcggttgggtgagttggatgatcagctggatgctgtcaggcttggacggcgcttgcaggcagaagttatgggcatacgcgcttttgctcagcgtgatgccgatagcgtggcggtgcaggcaattgcagatgatatagcgtcttctatagaggcgatgcgtaagggtgtgtctgctggttag

SEQ ID NO: 34265 - protein, 202 aa, Psychrobacter arcticus 273-4
MSRTTLYNRHEALERAMQLFWQKGFHATSLKDIEQALDMRPGSIYAAFGNKDGLFQEALDYYAQAELKEFERILSSYESPLLGLAAYVRQLGGIREKNLPSQVCMLVKSLLELGAREQPALEKVEKLLAGMEMRFVECFAQAQRLGELDDQLDAVRLGRRLQAEVMGIRAFAQRDADSVAVQAIADDIASSIEAMRKGVSAG

SEQ ID NO: 34266 - DNA, 597 bp, Colwellia psychrerythraea 34H
  CDS (1)..(597): transl_table=11
atgatgacagcaggccgacatcgcagctttgataaagacaaaacacttgaaaaagccatgttggttttttggaaaaatggctatccaggcacctcgttaacagatctaacaaatgcaatgggtattaacaagtcgagcctgtatgctgcttttggcaataaagaaaatttattcaatcaagctattgagtattatttaaataaacatggtgtagtgcacttagctgagctttttaaaacagaactaagcttaaaggaacgagtcaaaaactacttattctcgatagcgaacatgttaacaaacccagacttacctaaaggttgcctgattagtcaatctacttcagaaatagcgggctgttgtttacctgaaaattcggcaatgaatattaatggcattaatcagcaaaccctattgacgttgactgagttttttgaagaacaacaggcagggagggggatagatgaaaactcgccaaaagcaatagcaaattatcttttaacactgcaattcggtttagctatttctgcgagaaatgggagtaacttagaagatctgaaagagactataaatgtgtctctcagtctttttaattaa

SEQ ID NO: 34267 - protein, 198 aa, Colwellia psychrerythraea 34H
MMTAGRHRSFDKDKTLEKAMLVFWKNGYPGTSLTDLTNAMGINKSSLYAAFGNKENLFNQAIEYYLNKHGVVHLAELFKTELSLKERVKNYLFSIANMLTNPDLPKGCLISQSTSEIAGCCLPENSAMNINGINQQTLLTLTEFFEEQQAGRGIDENSPKAIANYLLTLQFGLAISARNGSNLEDLKETINVSLSLFN

SEQ ID NO: 34268 - DNA, 624 bp, Ralstonia eutropha JMP134
  CDS (1)..(624): transl_table=11
atggccagaccccgtaaattcgacgaacagactgcgctgaccgctgcccaggacgccttctgggcacgcggttacgaggccacgtccacgcgcgacctcaccagcgccatgggcatgacccagcccagcctctacaacgcgttcggcgacaagcgctcactgttcctgcaggcgctggatttctacctggaccacaacctccgcgaaaggattgcgcgcctgagcaagctgccttcgccggcagcggccatcagtgcattctttgcggaaagcatcgcacgctcgctcgcggaccctgagcaccgcggctgcctgctggtgaacacggcgctggaagtcacgccgcaggagccggcgttgcggcagaaggtgtcggaggagttcgagcgcatgcgcaacttcttccacgacagactcgttgccgcacaagcttccggcgaaatccctgctgcggggcctgttgaagacaactcgtctcaactgctggccctggttctcggtgtgcgcgtactggcgcgcacggcaccggacccgcaactgctcgaaagcgtcgtacggcctgcgctcgcatcactgggcctgccgccgttaccgcttgcccctgccacagctggcaccggctga

SEQ ID NO: 34269 - protein, 207 aa, Ralstonia eutropha JMP134
MARPRKFDEQTALTAAQDAFWARGYEATSTRDLTSAMGMTQPSLYNAFGDKRSLFLQALDFYLDHNLRERIARLSKLPSPAAAISAFFAESIARSLADPEHRGCLLVNTALEVTPQEPALRQKVSEEFERMRNFFHDRLVAAQASGEIPAAGPVEDNSSQLLALVLGVRVLARTAPDPQLLESVVRPALASLGLPPLPLAPATAGTG

SEQ ID NO: 34270 - DNA, 615 bp, Burkholderia sp. 383
  CDS (1)..(615): transl_table=11
atggctgaacggggccgaccgagaagcttcgacaaggaagcggcgctggagcgtgcgatggaggtgttctggcgcctcggctacgaaggcgcatcgatgaccgacctgacggccgcgatgggcatcgcgtcgccgagcctgtatgcggcgttcggcagcaaggaagcgttgttccggcaagcgctcgagcactacggcgcaacggaaggacgggaaatctggggaggtgtcgagcaggccggcagcgcgcacgacgccgtgcggaactacctgatggataccgcacgcgtgttcacgcggcggtcgaagccggcaggctgcctgatcgtgctgtcggcgctgcacccggccgagcgctccgatacggtccggcaaacgctgatcgcgatgcgcgagcgcacggtcgagaacctgcgcgagcgcctcaggcaaggtgtcgcgaccggcgagatcgcggcacaagcgaacctcgacgcaatcgcgcggtactacgtgacggtccagcagggaatgtcgatccaggcgcgcgacggtgcgagccgtcgcgatctggaggccgtcgcacaagccgcgctggctgcgtggccagcgctcgtcggcacgggcggcgcgtag

SEQ ID NO: 34271 - protein, 204 aa, Burkholderia sp. 383
MAERGRPRSFDKEAALERAMEVFWRLGYEGASMTDLTAAMGIASPSLYAAFGSKEALFRQALEHYGATEGREIWGGVEQAGSAHDAVRNYLMDTARVFTRRSKPAGCLIVLSALHPAERSDTVRQTLIAMRERTVENLRERLRQGVATGEIAAQANLDAIARYYVTVQQGMSIQARDGASRRDLEAVAQAALAAWPALVGTGGA

SEQ ID NO: 34272 - DNA, 606 bp, Burkholderia sp. 383
  CDS (1)..(606): transl_table=11
atggcgggacgaccgagagaatttgatcgcgacatggcgctgaaacgcgcgatgctggcgttctggcgacacggctacgaaggcacgtcgatgtccgacctggtcgaagcgatgggcatcgcgtcagcgcgcatctacgccgccttcggcagcaaggaagcgctgttccaggaggccgtggcgctctacgagcaaggcgaaggcggcttcgccgatcgcgcgttcgccgaggaaaccgatgtccgcgcggctgtcgaacggatgctgcgcgacgcggtcgccgcctatacccgacgcggccagccgcacggctgcatggtggtgtccgccgccaccaactactcggccgaaaacgaaggggtgatggaatggctggccgcccatcggcgcgcacgcacgcagtcgatcgtcgagcgcctgcaactcgcagccgaacaggggcaactcgcgcggggcaccgacatcaaggcgctggccgatttctatgcgacgcagttgcacggcatctccgttcaatcccgcgacggggtatcgaaggagcggctgctcgcctccatcgggccggcgatgatgccgcttgcgatggcggtgcgtgatggggtgtga

SEQ ID NO: 34273 - protein, 201 aa, Burkholderia sp. 383
MAGRPREFDRDMALKRAMLAFWRHGYEGTSMSDLVEAMGIASARIYAAFGSKEALFQEAVALYEQGEGGFADRAFAEETDVRAAVERMLRDAVAAYTRRGQPHGCMVVSAATNYSAENEGVMEWLAAHRRARTQSIVERLQLAAEQGQLARGTDIKALADFYATQLHGISVQSRDGVSKERLLASIGPAMMPLAMAVRDGV

SEQ ID NO: 34274 - DNA, 612 bp, Saccharophagus degradans 2-40
  CDS (1)..(612): transl_table=11
atggcgggcggtaggcagcgagagttcgacaaacaacaagcattaagtgcagccatgcatgtattctggcaaaaagggtatgtgggcgcgtcgcttgccgatttaaccagcgcaatgggtattaacaaacccagcatgtacgctgcatttggcaacaaagagcagctttttgtgcaggctaccgagcactacatggcggtgcacgccgagccgcttttccctttgttgcacacgcctaatcaaagccttaagcagcgtgttggggcctatatgcgcgcggtggtggccgctcagtgcgcaggcgaaacaccgctggggtgttttgtatccctatgtattaacgaggcggcaagccaaagcatgccgcaaagcgcggttacgcttatagagcaggccaaaggttatgccgaaaattacctaactcagctgtttaaagatgaaataacagcaggcaacctaagcccacaaacccaacccgccactttggcaagcttgctggtaacccttatgcacggcaccgccgccatggctcgcggtggtaaacgcttcgaagaactcgagccacttctagaaataaccttgcagcaagttatatcaggctcgaatagttag

SEQ ID NO: 34275 - protein, 203 aa, Saccharophagus degradans 2-40
MAGGRQREFDKQQALSAAMHVFWQKGYVGASLADLTSAMGINKPSMYAAFGNKEQLFVQATEHYMAVHAEPLFPLLHTPNQSLKQRVGAYMRAVVAAQCAGETPLGCFVSLCINEAASQSMPQSAVTLIEQAKGYAENYLTQLFKDEITAGNLSPQTQPATLASLLVTLMHGTAAMARGGKRFEELEPLLEITLQQVISGSNS

SEQ ID NO: 34276 - DNA, 612 bp, Silicibacter sp. TM1040
  CDS (1)..(612): transl_table=11
atgagcaaggcggggcaggtacggggtcgggggcgtccgcgcaagttcgacgaacaggtggtgcgccagaccatcctgagcgtgttctgggagaagggctatgccgctacatcgctggatgacctctccaaggccaccggcctcgtccgccccagcctctatgcggcctttggtaacaaggaagagatgttcctgcgcgcgatggatgattttgtcatccgcgtgcagagtgatctgaaccgacaagtgccccgcgacgcgacgcccgaggacgcgttgcggatcatctacaccgccatgctggagatctatagcggggcgcatgcgaagggctgcctggttttctcgaccgctgtcgcagaggcccccgcgcacccggagattcgcgcccggctggcccagcgcctggtgcagaccgacgcgcagtttcgccgcctttttgaccacaccgccccgggtgcatcagagaccgcaagacaggccgccgcagagatggcagcggcggttctgcattcgctgggcctgcgggtacgggcaggcgccgagccggatgaggtgcggcgctttattgaaaccgcggcccgttccattgccgccgggctggccccctaa

SEQ ID NO: 34277 - protein, 203 aa, Silicibacter sp. TM1040
MSKAGQVRGRGRPRKFDEQVVRQTILSVFWEKGYAATSLDDLSKATGLVRPSLYAAFGNKEEMFLRAMDDFVIRVQSDLNRQVPRDATPEDALRIIYTAMLEIYSGAHAKGCLVFSTAVAEAPAHPEIRARLAQRLVQTDAQFRRLFDHTAPGASETARQAAAEMAAAVLHSLGLRVRAGAEPDEVRRFIETAARSIAAGLAP

SEQ ID NO: 34278 - DNA, 585 bp, Myxococcus xanthus DK 1622
  CDS (1)..(585): transl_table=11
atgggccgcccccgcgggttcgaccgcgacgaggcactcgtggaggcgatgcgggtgttttgggcgcgcggctacgagggcacgtccatccaggatctggtcgatgcgatgggcgtcaacaagcccagcctctattccatcttcggctgcaaggaagagctcttccgcgaagccgttgaactctacgaccggctcgaaggcattcacaccacccgcagcctggaggatgctccgtccgcacgcgcggcggtggaggagatgctgcgcgccaatgcgcgggcctacaccgccagcgacaaacctcgggggtgcatgatcgtcctgtcttcgctcctgggctcgccggagaacgagcgggtcaggaccttcctcgcggagaatcgcctcaggggtgagcgtgcgctgaagcagcgactcgagcgaggcattctcgatggagacctccctgcatccgccgaggtggggatgctcgccgcgttctacaccacggtgctggagggcttgtcgatacagtctcgcgatggcgcctccgcgaagaagctcgccgccatcattgatgccgcgatgctcgcttggccgacatga

SEQ ID NO: 34279 - protein, 194 aa, Myxococcus xanthus DK 1622
MGRPRGFDRDEALVEAMRVFWARGYEGTSIQDLVDAMGVNKPSLYSIFGCKEELFREAVELYDRLEGIHTTRSLEDAPSARAAVEEMLRANARAYTASDKPRGCMIVLSSLLGSPENERVRTFLAENRLRGERALKQRLERGILDGDLPASAEVGMLAAFYTTVLEGLSIQSRDGASAKKLAAIIDAAMLAWPT

SEQ ID NO: 34280 - DNA, 621 bp, Shewanella sp. MR-4
  CDS (1)..(621): transl_table=11
atgatgtcaaccgtcacccagacgccctgtgtaggtcgcccgcgagccttcgacgccgacgatgcattagctaaagccttggaagtcttctggcgaaaaggttttgaaggtacatcgttaaccgacctaactcaggccatgggcattaacaaacccagcctgtatgccgccttcggtaacaaagagcagctgtttctgaaagcgatcgagttatacgagcagctcccttgtgcgtttttctatccttcccttgaaaaagaaaccgcctatcaagtggctgaatccatgctctatggcgcagcaacgaatttggtggataagaatcaccctcaaggctgtctgatagtacaaggtgccctcgcctgtagcgaagcagggcaagccattaaagagactttaatcacccgccgccgtgacggtgaacaggcactatgccaacgtctgcaacgggcaaaggatgaaggcgatttacccgcagatgccgatccactgctgctgtctcgatatataggcacagtgctgcaaggcatggcagtgcaagccaccaatggcatatgccccggagaattacgtaaagtcgccgagctagtgttagccaactttccgaaaaataatgcgtga

SEQ ID NO: 34281 - protein, 206 aa, Shewanella sp. MR-4
MMSTVTQTPCVGRPRAFDADDALAKALEVFWRKGFEGTSLTDLTQAMGINKPSLYAAFGNKEQLFLKAIELYEQLPCAFFYPSLEKETAYQVAESMLYGAATNLVDKNHPQGCLIVQGALACSEAGQAIKETLITRRRDGEQALCQRLQRAKDEGDLPADADPLLLSRYIGTVLQGMAVQATNGICPGELRKVAELVLANFPKNNA

SEQ ID NO: 34282 - DNA, 642 bp, Rhizobium leguminosarum bv. viciae 3841
  CDS (1)..(642): transl_table=11
gtgatcattgtgaaaaatagacgagacgtggaaaattctaccgcccgccgccgcggccgtccgccggccttcgaccgcgagaccgttctctcggctgcccgcgaaaccttctgggcgcatggatatgagggcgcctcgatcgccgatctcaccgccgccatgggcatcacgccgcaaagcctctatgccgccttcaactcgaaggccgatctctatcgcgccgcgctggagcaataccgagggctgggctccgacacgttttccgcactcggcgaaccgatcgacaccgtctccgccttcgagcgcatattgcggggctcggcggcgattttctcggcgccggagcatccgaaaggctgcatgatctcgacggctgtgctgaactgcgccagtgagaacgccgtgatcgccgaccatgttgcagcgatgcgccgtcggtcgctggacgctttcaccgcgaggatcgagcgtggcatccgcgagggcgatatgaagccagagacgaacccgcgcgcgctggcacggttcctcggtgccatcatccagggcatgtcggtgcaggcgagggacggcgcatcgatggaggaattgcttgatatcgcagtcctcgccatcgtcgaggtcgcccgtcatcgcgcctga

SEQ ID NO: 34283 - protein, 213 aa, Rhizobium leguminosarum bv. viciae 3841
MIIVKNRRDVENSTARRRGRPPAFDRETVLSAARETFWAHGYEGASIADLTAAMGITPQSLYAAFNSKADLYRAALEQYRGLGSDTFSALGEPIDTVSAFERILRGSAAIFSAPEHPKGCMISTAVLNCASENAVIADHVAAMRRRSLDAFTARIERGIREGDMKPETNPRALARFLGAIIQGMSVQARDGASMEELLDIAVLAIVEVARHRA

SEQ ID NO: 34284 - DNA, 615 bp, Pseudomonas aeruginosa UCBPP-PA14
  CDS (1)..(615): transl_table=11
atggccaagcgtggacgcccctgcggcttcgatcgtgaacaggcattgcgccgggcgctcgacgtgttctgggaggccggttacgaaggcgcgaccatggccgcgctgaaggaggccatgggtggcatctgcgcgccgagcatgtatgccgcctatggttccaaggaggcgctgttccgttcggcggtggaactctacctgagccaggagtgccagctttccaagggcgccttcgccctgccgacggcgcgcgagtcgatcgccgcgctgctggaaagcgccgccgtcagctacaccacggaaggcaagccgcgcggttgcctggtcgacctcagcacgaccaatttctcgccggccaacaaaggcgtcgaagactacctgcgcgatcaccggcggcgcgccgcgcgcctgctgcgcgagcgtttcgcacgaggcgtggctgacggcgacgtgccggccggagccgatctcgacgcgctcaccagtttctacagcagcgtgctccagggcctgtcgatccaggcccgcgacggcgccagccgccagcagttgctggccatcggccgctgcgcgatggcggcctgggattccctgctggcggtcgaggccgcctga

SEQ ID NO: 34285 - protein, 204 aa, Pseudomonas aeruginosa UCBPP-PA14
MAKRGRPCGFDREQALRRALDVFWEAGYEGATMAALKEAMGGICAPSMYAAYGSKEALFRSAVELYLSQECQLSKGAFALPTARESIAALLESAAVSYTTEGKPRGCLVDLSTTNFSPANKGVEDYLRDHRRRAARLLRERFARGVADGDVPAGADLDALTSFYSSVLQGLSIQARDGASRQQLLAIGRCAMAAWDSLLAVEAA

SEQ ID NO: 34286 - DNA, 594 bp, Mycobacterium smegmatis str. MC2 155
  CDS (1)..(594): transl_table=11
atggcaacagtccgagggcgaccccgctcgttcgatcgcgatgccgcgctcgacaaggcgatccggctgttctgggagcgtgggttcgaggcgacctccacgcgcgacctcagcagcgcgctcggcatcggcatgcccagcatctacgcggcgttcggtgacaagcgtcagctcttcgccgaggccgtcgaggtctacgacgcccgctacggcgggttcatcgacgccgcgctcgaccaagagcccaccgcgcgtgcggccgtggcacgcatcctggcgcaggcgcccggccggtacacgcgccgtggcctgcccagcggatgcctgatcatcagcggtgacgacggcagcgccgacgagaccgtgggcgccgcgctgcgccgcatccgcgagaagaagacccagacggtggccgacaagatccgcgccgacatcgccgcaggcgagctgcccgccgacaccgacgcacttgctctcgcgcagttcgtgatgtcgaccctcagcggcatcgcccaggccgcgcgtgacggcataccccgcgcgaggctcgaccaggtcgccgccatcgccctgcgtgcctggccccagcgctaa

SEQ ID NO: 34287 - protein, 197 aa, Mycobacterium smegmatis str. MC2 155
MATVRGRPRSFDRDAALDKAIRLFWERGFEATSTRDLSSALGIGMPSIYAAFGDKRQLFAEAVEVYDARYGGFIDAALDQEPTARAAVARILAQAPGRYTRRGLPSGCLIISGDDGSADETVGAALRRIREKKTQTVADKIRADIAAGELPADTDALALAQFVMSTLSGIAQAARDGIPRARLDQVAAIALRAWPQR

SEQ ID NO: 34288 - DNA, 606 bp, Moritella sp. PE36
  CDS (1)..(606): transl_table=11
atgtctaaaacaagttgcgttggtcgccctaagggcttcgatgttgatgacgtcttagagaaggcattagcagtattttgggctaaaggttatgaaggcgcgtcactgagtgatctcaccaaagcaatggggatcaacaagcccagcctgtattcaacatttggtaataaagaaggattattccttaaagcagtggatttatatgaacaaagaccctgtggttattttcgtccagcattagaagaagcgactgccaaagcggttattgcagccatgctcaatggggcggcaaaaagtttagccgatcacaataacccccaaggttgcatgcttattcaaagtgcgttaaccggcagtgatgactgtgaatcagtcaagcaggcattgataagtcgccgccgggatcatcaaaacgaacttaaaatacgcttggaacttgcccaacaacaaggggatttgaccacggagtacagtgctgaatcgcttgctcaatacttagcgaccattattcagggcatgacaatccaggcaacgaactgcagcagcgcagcagagttacagaacattgccgatctcgcgctaagccatttccccggattagagtaa

SEQ ID NO: 34289 - protein, 201 aa, Moritella sp. PE36
MSKTSCVGRPKGFDVDDVLEKALAVFWAKGYEGASLSDLTKAMGINKPSLYSTFGNKEGLFLKAVDLYEQRPCGYFRPALEEATAKAVIAAMLNGAAKSLADHNNPQGCMLIQSALTGSDDCESVKQALISRRRDHQNELKIRLELAQQQGDLTTEYSAESLAQYLATIIQGMTIQATNCSSAAELQNIADLALSHFPGLE

SEQ ID NO: 34290 - DNA, 633 bp, Escherichia coli
  CDS (1)..(633): transl_table=11
atggcaactgactcaacacaatgtgtaaaaaaaagccgtggccgcccaaaagtgttcgacagggatgccgcgcttgataaggccatgaaattgttctggcaacacggttatgaagcgacttctcttgcggacctcgtcgaagcgaccggagccaaagcgcccacgctatacgcggaatttaccaacaaagaggggttatttcgtgccgttctcgaccgctatatcgatcgttttgccgctaagcatgaagcacagctgttttgtgaagagaaaagcgtggagtctgcgctggctgactattttgctgccatcgccaactgctttaccagcaaagacaccccggcaggctgcttcatgatcaacaactgcaccaccctctccccagattcaggagatatcgccaatacgttgaaatcacgccatgcgatgcaagagcgcactttgcagcagtttttatgtcaacgacaagcgcgcggggaaatcccgccccactgtgacgtgacacatctggcagaattccttaattgtattattcaggggatgtcgatcagcgcacgcgaaggtgcatcgctggaaaaactgatgcagattgccggaacgactttgcgtttatggcccgaactggtgaaataa

SEQ ID NO: 34291 - protein, 210 aa, Escherichia coli
MATDSTQCVKKSRGRPKVFDRDAALDKAMKLFWQHGYEATSLADLVEATGAKAPTLYAEFTNKEGLFRAVLDRYIDRFAAKHEAQLFCEEKSVESALADYFAAIANCFTSKDTPAGCFMINNCTTLSPDSGDIANTLKSRHAMQERTLQQFLCQRQARGEIPPHCDVTHLAEFLNCIIQGMSISAREGASLEKLMQIAGTTLRLWPELVK

SEQ ID NO: 34292 - DNA, 585 bp, Bacillus subtilis
  CDS (1)..(585): transl_table=11
ttggggaggaataaagaatttgatacggcgcttgttcttcacagggcgatagaggtttttggagagtatggctacgaaggaacgtctcttcaggatctgctctctcatttaggcattgcgcgccaaagtttgtatgatacgtatggaacgaagcgtgatttgtttttgtccgctgtgaaatcgtatcttgaagggaaaaacgctgccgttatggaaaggcttgaagcgccaggatctgtaaaggaagccattcgtgatatttttcaggagggtgtcaatgccctgagggatccggaacgggcgaaggcgtgctacattattaacagcgcgattgaacagatcccgcatgaccctgagcttgcccggtattttgaaagacaatccaagcagcttgaggacgctttttatcacgggcttttaagagcgaaggatcaaggagaattgaatggcgaagatactgatatatctgcgcttgctcggtacctgaatcagagcaggctgtcactgacatttattgcaaaagtgacggcagatatggatcggcttcaggaccatgttgacgtgagtttatcagtgcttgattaa

SEQ ID NO: 34293 - protein, 194 aa, Bacillus subtilis
MGRNKEFDTALVLHRAIEVFGEYGYEGTSLQDLLSHLGIARQSLYDTYGTKRDLFLSAVKSYLEGKNAAVMERLEAPGSVKEAIRDIFQEGVNALRDPERAKACYIINSAIEQIPHDPELARYFERQSKQLEDAFYHGLLRAKDQGELNGEDTDISALARYLNQSRLSLTFIAKVTADMDRLQDHVDVSLSVLD

SEQ ID NO: 34294 - DNA, 594 bp, Escherichia coli
  CDS (1)..(594): transl_table=11
atggtcactaaaaaacaatctcgcgttccaggtcgtcccagacgtttcgctcctgagcaggcaatctctgcggcaaaagtgctttttcaccaaaaaggtttcgatgctgtcagtgttgctgaagttactgattatcttggtattaaccccccgagcctctacgcggcttttggcagtaaagctgggttatttagccgtgtactcaatgaatacgtcggtacggaagctattccgcttgccgatattcttcgtgatgatcgtccggtaggcgagtgcctggttgaggtattaaaagaagcggcgcgcagatatagccaaaacggcggctgcgctggctgtatggttcttgaaggtattcatagtcatgatccacaagcgcgtgatattgccgttcaatattatcacgccgcagaaacgaccatttatgactacatcgccaggcggcatccacaacgcgcacaatgtgtgactgattttatgagtaccgtgatgtctgggctttctgcgaaggcacgagaggggcactctatagaacaactctgtgcaacagctgcaatggcgggggaagcgataaaaactattcttgaggagtga

SEQ ID NO: 34295 - protein, 197 aa, Escherichia coli
MVTKKQSRVPGRPRRFAPEQAISAAKVLFHQKGFDAVSVAEVTDYLGINPPSLYAAFGSKAGLFSRVLNEYVGTEAIPLADILRDDRPVGECLVEVLKEAARRYSQNGGCAGCMVLEGIHSHDPQARDIAVQYYHAAETTIYDYIARRHPQRAQCVTDFMSTVMSGLSAKAREGHSIEQLCATAAMAGEAIKTILEE

SEQ ID NO: 34296 - DNA, 20 bp, Artificial sequence
  primer
atggctcgcggacgtccccg

SEQ ID NO: 34297 - DNA, 20 bp, Artificial sequence
  primer
tcaaaccggattgctcgtcg

SEQ ID NO: 34298 - protein, 194 aa, Artificial sequence
  consensus sequence
  Variant (4)..(5): Xaa in position 4 to 5 is any amino acid
  Variant (8)..(10): Xaa in position 8 to 10 is any amino acid
  Variant (13)..(14): Xaa in position 13 to 14 is any amino acid
  Variant (16)..(18): Xaa in position 16 to 18 is any amino acid
  Variant (21)..(22): Xaa in position 21 to 22 is any amino acid
  Variant (25)..(27): Xaa in position 25 to 27 is any amino acid
  Variant (29)..(31): Xaa in position 29 to 31 is any amino acid
  Variant (33)..(34): Xaa in position 33 to 34 is any amino acid
  Variant (36)..(41): Xaa in position 36 to 41 is any amino acid
  Variant (42)..(43): Xaa in position 42 to 43 is any or no amino acid
  Variant (45)..(45): Xaa in position 45 is any amino acid
  Variant (48)..(48): Xaa in position 48 is any amino acid
  Variant (51)..(51): Xaa in position 51 is any amino acid
  Variant (53)..(54): Xaa in position 53 to 54 is any amino acid
  Variant (56)..(62): Xaa in position 56 to 62 is any amino acid
  Variant (64)..(100): Xaa in position 64 to 100 is any amino acid
  Variant (101)..(112): Xaa in position 101 to 112 is any or no amino acid
  Variant (115)..(151): Xaa in position 115 to 151 is any amino acid
  Variant (152)..(157): Xaa in position 152 to 157 is any or no amino acid
  Variant (159)..(164): Xaa in position 159 to 164 is any amino acid
  Variant (165)..(170): Xaa in position 165 to 170 is any or no amino acid
  Variant (172)..(179): Xaa in position 172 to 179 is any amino acid
  Variant (181)..(184): Xaa in position 181 to 184 is any amino acid
  Variant (186)..(187): Xaa in position 186 to 187 is any amino acid
  Variant (189)..(193): Xaa in position 189 to 193 is any amino acid
GRPXXFDXXXALXXAXXXFWXXGYXXXSXXXLXXAXXXXXXXXSXYAXFGXKXXLXXXXXXXYXXXXXXXXXXXXXXXXXXXXXXXXXXXXXXXXXXXXXXXXXXXXXXXXXGCXXXXXXXXXXXXXXXXXXXXXXXXXXXXXXXXXXXXXXXXXXXGXXXXXXXXXXXXAXXXXXXXXGXXXXAXXGXXXXXL

SEQ ID NO: 34299 - protein, 36 aa, Artificial sequence
  protein pattern
  Variant (2)..(5): Xaa in position 2 to 5 is any amino acid
  Variant (6)..(6): Xaa in position 6 is Asp, Glu or Asn
  Variant (7)..(9): Xaa in position 7 to 9 is any amino acid
  Variant (10)..(10): Xaa in position 10 is Ala, Gly, Thr or Val
  Variant (12)..(13): Xaa in position 12 to 13 is any or no amino acid
  Variant (15)..(17): Xaa in position 15 to 17 is any amino acid
  Variant (20)..(21): Xaa in position 20 to 21 is any amino acid
  Variant (23)..(23): Xaa in position 23 is Phe or Tyr
  Variant (24)..(24): Xaa in position 24 is any amino acid
  Variant (25)..(25): Xaa in position 25 is Ala, Gly, Asn or Thr
  Variant (26)..(26): Xaa in position 26 is Ala, Thr or Val
  Variant (27)..(27): Xaa in position 27 is Gln, Ser or Thr
  Variant (28)..(29): Xaa in position 28 to 29 is any amino acid
  Variant (30)..(30): Xaa in position 30 is Ala, Asp, Glu or Gln
  Variant (31)..(31): Xaa in position 31 is Ile or Leu
  Variant (32)..(35): Xaa in position 32 to 35 is any amino acid
  Variant (36)..(36): Xaa in position 36 is Asp, Glu, Gly or Asn
RXXXXXXXXXLXXAXXXFWXXGXXXXXXXXXXXXXX

SEQ ID NO: 34300 - protein, 22 aa, Artificial sequence
  protein pattern
  Variant (2)..(2): Xaa in position 2 is any amino acid
  Variant (3)..(4): Xaa in position 3 to 4 is any or no amino acid
  Variant (7)..(7): Xaa in position 7 is Ala, Cys or Thr
  Variant (8)..(8): Xaa in position 8 is Phe or Tyr
  Variant (9)..(9): Xaa in position 9 is Asp, Gly or Asn
  Variant (10)..(10): Xaa in position 10 is Cys, Asp, Gly, Asn or Ser
  Variant (12)..(12): Xaa in position 12 is any amino acid
  Variant (13)..(13): Xaa in position 13 is Ala, Asp, Glu, Gly, Asn, Gln, Ser or Thr
  Variant (14)..(21): Xaa in position 14 to 21 is any amino acid
  Variant (22)..(22): Xaa in position 22 is Phe, His or Tyr
SXXXYAXXXXKXXXXXXXXXXX

SEQ ID NO: 34301 - DNA, 636 bp, Oryza sativa; identical to SEQ ID NO: 271
  CDS (1)..(636)

SEQ ID NO: 34302 - protein, 211 aa, Oryza sativa; identical to SEQ ID NO: 272

SEQ ID NO: 34303 - DNA, 1043 bp, Glycine max; identical to SEQ ID NO: 15193
  CDS (150)..(797)

SEQ ID NO: 34304 - protein, 215 aa, Glycine max; identical to SEQ ID NO: 15194

SEQ ID NO: 34305 - DNA, 1109 bp, Glycine max; identical to SEQ ID NO: 73
  CDS (194)..(853)

SEQ ID NO: 34306 - protein, 219 aa, Glycine max; identical to SEQ ID NO: 74

SEQ ID NO: 34307 - DNA, 1234 bp, Glycine max; identical to SEQ ID NO: 15197
  CDS (283)..(942)

SEQ ID NO: 34308 - protein, 219 aa, Glycine max; identical to SEQ ID NO: 15198

SEQ ID NO: 34309 - DNA, 1128 bp, Sorghum bicolor
  CDS (215)..(910)
gcacgaggccgccatcacttgggagctctgctgagacgcgctgctggagataacgcacgcgcacgcagccaacacacgcggcaccaccgagaggagcgagcggccaccatcaggctacctcatccgagctcccggccgctcctctcgccgccggctagctaggcagcgctaggctatagctaggaagctgcgcgcgtggccgccgacgatcggcatgggcgacggggcggcggcggcggtgccgagcaggttccgcacgatctgcgtcttctgtggcagcaacgccggccgccgcaaggtgtacgccgacgccgccctcgagctcggccacgagctggtgcggaggggcatcagcctcgtctacggaggcggcagcatcggcctgatgggcgtgattgctcggacggttggcgacggcggctgccatgtccttggggtgattcctaaagcgctcatgcctattgagatatcaggtgggagcgtgggagaagtgaaggtcgtggacgacatgcatcagaggaaagccgagatggctcgccagtccgaagcattcatcgctcttccaggggggtacgggacgatggaggagttgctggagatgatcacctggtgccagctcggaattcatgacaaaccagttgggttgctgaacgtcgacggctactacgacccgctgcttgccctgttcgagaaaggcgccaccgagggcttcatcaaccctgactgcagccagatattcgtttctgcgccgaccgcgagcgaactgctgacgaagatggagcaatacacccggttgcaccaggaggtagccccagcaacgagctgggagatctcggagctcggctacgggagagccgccgccgacggcggcggtggcggcgcgccgtcgtcagaagaagaaggcttgtagcagtcatccatctcctaaagcgaatcggagctctccttcctctgctgaattggtgatgacgcatgcatttgtttgggtatttatttcgtcaaagtcgatctctccaaagtccaaaccggttgaactaggtgcctgccgggtcgggagaggcgatgatatattcctctactgtttgagtgctcggttgtgtaagctagctgtggtaactcctccctcct

SEQ ID NO: 34310 - protein, 231 aa, Sorghum bicolor
MGDGAAAAVPSRFRTICVFCGSNAGRRKVYADAALELGHELVRRGISLVYGGGSIGLMGVIARTVGDGGCHVLGVIPKALMPIEISGGSVGEVKVVDDMHQRKAEMARQSEAFIALPGGYGTMEELLEMITWCQLGIHDKPVGLLNVDGYYDPLLALFEKGATEGFINPDCSQIFVSAPTASELLTKMEQYTRLHQEVAPATSWEISELGYGRAAADGGGGGAPSSEEEGL

SEQ ID NO: 34311 - DNA, 1172 bp, Zea mays; identical to SEQ ID NO: 77
  CDS (221)..(847)

SEQ ID NO: 34312 - protein, 208 aa, Zea mays; identical to SEQ ID NO: 78

SEQ ID NO: 34313 - DNA, 1333 bp, Zea mays; identical to SEQ ID NO: 79
  CDS (131)..(829)

SEQ ID NO: 34314 - protein, 232 aa, Zea mays; identical to SEQ ID NO: 80

SEQ ID NO: 34315 - DNA, 957 bp, Brassica napus; identical to SEQ ID NO: 81
  CDS (68)..(742)

SEQ ID NO: 34316 - protein, 224 aa, Brassica napus; identical to SEQ ID NO: 82

SEQ ID NO: 34317 - DNA, 969 bp, Brassica napus; identical to SEQ ID NO: 83
  CDS (49)..(696)

SEQ ID NO: 34318 - protein, 215 aa, Brassica napus; identical to SEQ ID NO: 84

SEQ ID NO: 34319 - DNA, 891 bp, Brassica napus; identical to SEQ ID NO: 85
  CDS (78)..(728)

SEQ ID NO: 34320 - protein, 216 aa, Brassica napus; identical to SEQ ID NO: 86

SEQ ID NO: 34321 - DNA, 941 bp, Glycine max; identical to SEQ ID NO: 15209
  CDS (29)..(730)

SEQ ID NO: 34322 - protein, 233 aa, Glycine max; identical to SEQ ID NO: 70

SEQ ID NO: 34323 - DNA, 849 bp, Brassica napus; identical to SEQ ID NO: 89
  CDS (64)..(705)

SEQ ID NO: 34324 - protein, 213 aa, Brassica napus; identical to SEQ ID NO: 90

SEQ ID NO: 34325 - DNA, 1176 bp, Glycine max; identical to SEQ ID NO: 91
  CDS (106)..(747)

SEQ ID NO: 34326 - protein, 213 aa, Glycine max; identical to SEQ ID NO: 92

SEQ ID NO: 34327 - DNA, 799 bp, Triticum aestivum; identical to SEQ ID NO: 93
  CDS (31)..(735)

SEQ ID NO: 34328 - protein, 234 aa, Triticum aestivum; identical to SEQ ID NO: 94

SEQ ID NO: 34329 - DNA, 873 bp, Triticum aestivum; identical to SEQ ID NO: 95
  CDS (25)..(645)

SEQ ID NO: 34330 - protein, 206 aa, Triticum aestivum; identical to SEQ ID NO: 96

SEQ ID NO: 34331 - DNA, 930 bp, Hordeum vulgare; identical to SEQ ID NO: 97
  CDS (34)..(708)

SEQ ID NO: 34332 - protein, 224 aa, Hordeum vulgare; identical to SEQ ID NO: 98

SEQ ID NO: 34333 - DNA, 579 bp, Klebsiella pneumoniae subsp. pneumoniae MGH 78578; identical to SEQ ID NO: 105
  CDS (1)..(579): transl_table=11

SEQ ID NO: 34334 - protein, 192 aa, Klebsiella pneumoniae subsp. pneumoniae MGH 78578; identical to SEQ ID NO: 106

SEQ ID NO: 34335 - DNA, 693 bp, Oryza sativa (japonica cultivar-group); identical to SEQ ID NO: 107
  CDS (1)..(693)

SEQ ID NO: 34336 - protein, 230 aa, Oryza sativa (japonica cultivar-group); identical to SEQ ID NO: 108

SEQ ID NO: 34337 - DNA, 1062 bp, Oryza sativa (japonica cultivar-group); identical to SEQ ID NO: 109
  CDS (1)..(1062)

SEQ ID NO: 34338 - protein, 353 aa, Oryza sativa (japonica cultivar-group); identical to SEQ ID NO: 110

SEQ ID NO: 34339 - DNA, 642 bp, Arabidopsis thaliana; identical to SEQ ID NO: 111
  CDS (1)..(642)

SEQ ID NO: 34340 - protein, 213 aa, Arabidopsis thaliana; identical to SEQ ID NO: 112

SEQ ID NO: 34341 - DNA, 648 bp, Arabidopsis thaliana; identical to SEQ ID NO: 113
  CDS (1)..(648)

SEQ ID NO: 34342 - protein, 215 aa, Arabidopsis thaliana; identical to SEQ ID NO: 114

SEQ ID NO: 34343 - DNA, 648 bp, Arabidopsis thaliana; identical to SEQ ID NO: 115
  CDS (1)..(648)

SEQ ID NO: 34344 - protein, 215 aa, Arabidopsis thaliana; identical to SEQ ID NO: 116

SEQ ID NO: 34345 - DNA, 654 bp, Arabidopsis thaliana; identical to SEQ ID NO: 117
  CDS (1)..(654)

SEQ ID NO: 34346 - protein, 217 aa, Arabidopsis thaliana; identical to SEQ ID NO: 118

SEQ ID NO: 34347 - DNA, 651 bp, Agrobacterium tumefaciens str. C58; identical to SEQ ID NO: 121
  CDS (1)..(651): transl_table=11

SEQ ID NO: 34348 - protein, 216 aa, Agrobacterium tumefaciens str. C58; identical to SEQ ID NO: 122

SEQ ID NO: 34349 - DNA, 585 bp, Ralstonia solanacearum GMI1000; identical to SEQ ID NO: 123
  CDS (1)..(585): transl_table=11

SEQ ID NO: 34350 - protein, 194 aa, Ralstonia solanacearum GMI1000; identical to SEQ ID NO: 124

SEQ ID NO: 34351 - DNA, 600 bp, Agrobacterium tumefaciens str. C58; identical to SEQ ID NO: 125
  CDS (1)..(600): transl_table=11

SEQ ID NO: 34352 - protein, 199 aa, Agrobacterium tumefaciens str. C58; identical to SEQ ID NO: 126

SEQ ID NO: 34353 - DNA, 666 bp, Brucella melitensis 16M; identical to SEQ ID NO: 15247
  CDS (1)..(666): transl_table=11

SEQ ID NO: 34354 - protein, 221 aa, Brucella melitensis 16M; identical to SEQ ID NO: 15248

SEQ ID NO: 34355 - DNA, 642 bp, Arabidopsis thaliana; identical to SEQ ID NO: 127
  CDS (1)..(642)

SEQ ID NO: 34356 - protein, 213 aa, Arabidopsis thaliana; identical to SEQ ID NO: 128

SEQ ID NO: 34357 - DNA, 687 bp, Arabidopsis thaliana; identical to SEQ ID NO: 129
  CDS (1)..(687)

SEQ ID NO: 34358 - protein, 228 aa, Arabidopsis thaliana; identical to SEQ ID NO: 130

SEQ ID NO: 34359 - DNA, 588 bp, Corynebacterium glutamicum ATCC 13032; identical to SEQ ID NO: 131
  CDS (1)..(588): transl_table=11

SEQ ID NO: 34360 - protein, 195 aa, Corynebacterium glutamicum ATCC 13032; identical to SEQ ID NO: 132

SEQ ID NO: 34361 - DNA, 579 bp, Fusobacterium nucleatum subsp. nucleatum ATCC 25586
  CDS (1)..(579): transl_table=11
atgagaaaaaaaaatgttacagtttattgtggagcttcatttggagttgatgaaaaataccaagaagtaactagaaaacttggagaatggataggaaaaaataattacaatcttgtatatggtggaggaagatcgggtttaatgggactgattgctgattctgttcttgaaaatggaggaaaagttacaggaattataactcatttcctttcagaaagagaaatagcccatgaaggaataacaaaacttataaaagttgatactatgtctgaaagaaaaaagaagatggcagacttagctgatatttttatagccttaccaggaggacctggaactttggaagaaataacagaagttgtttcttgggcagttcttgctttacacccttgtccttgtatattttttaactttgataattattataaccatattagagatttctatgatttaatggtagcgaaaggctatatgaaaaaagaggcaagagataaaattttatttacaagttcatttaaagaaataggaaattttattattaaatatgaacctccaaaagcaagagaataccatggagaataa

SEQ ID NO: 34362 - protein, 192 aa, Fusobacterium nucleatum subsp. nucleatum ATCC 25586
MRKKNVTVYCGASFGVDEKYQEVTRKLGEWIGKNNYNLVYGGGRSGLMGLIADSVLENGGKVTGIITHFLSEREIAHEGITKLIKVDTMSERKKKMADLADIFIALPGGPGTLEEITEVVSWAVLALHPCPCIFFNFDNYYNHIRDFYDLMVAKGYMKKEARDKILFTSSFKEIGNFIIKYEPPKAREYHGE

SEQ ID NO: 34363 - DNA, 687 bp, Xanthomonas campestris pv. campestris str. ATCC 33913; identical to SEQ ID NO: 133
  CDS (1)..(687): transl_table=11

SEQ ID NO: 34364 - protein, 228 aa, Xanthomonas campestris pv. campestris str. ATCC 33913; identical to SEQ ID NO: 134

SEQ ID NO: 34365 - DNA, 588 bp, Pseudomonas putida KT2440; identical to SEQ ID NO: 139
  CDS (1)..(588): transl_table=11

SEQ ID NO: 34366 - protein, 195 aa, Pseudomonas putida KT2440; identical to SEQ ID NO: 140

SEQ ID NO: 34367 - DNA, 615 bp, Bradyrhizobium japonicum USDA 110; identical to SEQ ID NO: 141
  CDS (1)..(615): transl_table=11

SEQ ID NO: 34368 - protein, 204 aa, Bradyrhizobium japonicum USDA 110; identical to SEQ ID NO: 142

SEQ ID NO: 34369 - DNA, 576 bp, Enterococcus faecalis V583; identical to SEQ ID NO: 15265
  CDS (1)..(576): transl_table=11

SEQ ID NO: 34370 - protein, 191 aa, Enterococcus faecalis V583; identical to SEQ ID NO: 15266

SEQ ID NO: 34371 - DNA, 627 bp, Bordetella parapertussis 12822; identical to SEQ ID NO: 15271
  CDS (1)..(627): transl_table=11

SEQ ID NO: 34372 - protein, 208 aa, Bordetella parapertussis 12822; identical to SEQ ID NO: 15272

SEQ ID NO: 34373 - DNA, 570 bp, Synechococcus sp. WH 8102; identical to SEQ ID NO: 15275
  CDS (1)..(570): transl_table=11

SEQ ID NO: 34374 - protein, 189 aa, Synechococcus sp. WH 8102; identical to SEQ ID NO: 15276

SEQ ID NO: 34375 - DNA, 639 bp, Chromobacterium violaceum ATCC 12472; identical to SEQ ID NO: 145
  CDS (1)..(639): transl_table=11

SEQ ID NO: 34376 - protein, 212 aa, Chromobacterium violaceum ATCC 12472; identical to SEQ ID NO: 146

SEQ ID NO: 34377 - DNA, 636 bp, Rhodopseudomonas palustris CGA009; identical to SEQ ID NO: 149
  CDS (1)..(636): transl_table=11

SEQ ID NO: 34378 - protein, 211 aa, Rhodopseudomonas palustris CGA009; identical to SEQ ID NO: 150

SEQ ID NO: 34379 - DNA, 591 bp, Geobacter sulfurreducens PCA; identical to SEQ ID NO: 151
  CDS (1)..(591): transl_table=11

SEQ ID NO: 34380 - protein, 196 aa, Geobacter sulfurreducens PCA; identical to SEQ ID NO: 152

SEQ ID NO: 34381 - DNA, 579 bp, Bacillus cereus ATCC 10987; identical to SEQ ID NO: 153
  CDS (1)..(579): transl_table=11

SEQ ID NO: 34382 - protein, 192 aa, Bacillus cereus ATCC 10987; identical to SEQ ID NO: 154

SEQ ID NO: 34383 - DNA, 798 bp, Magnaporthe grisea 70-15; identical to SEQ ID NO: 155
  CDS (1)..(798)

SEQ ID NO: 34384 - protein, 265 aa, Magnaporthe grisea 70-15; identical to SEQ ID NO: 156

SEQ ID NO: 34385 - DNA, 723 bp, Gibberella zeae PH-1; identical to SEQ ID NO: 157
  CDS (1)..(723)

SEQ ID NO: 34386 - protein, 240 aa, Gibberella zeae PH-1; identical to SEQ ID NO: 158

SEQ ID NO: 34387 - DNA, 669 bp, Candida glabrata CBS 138; identical to SEQ ID NO: 159
  CDS (1)..(669)

SEQ ID NO: 34388 - protein, 222 aa, Candida glabrata CBS 138; identical to SEQ ID NO: 160

SEQ ID NO: 34389 - DNA, 696 bp, Debaryomyces hansenii CBS767; identical to SEQ ID NO: 161
  CDS (1)..(696)

SEQ ID NO: 34390 - protein, 231 aa, Debaryomyces hansenii CBS767; identical to SEQ ID NO: 162

SEQ ID NO: 34391 - DNA, 636 bp, Yarrowia lipolytica CLIB122; identical to SEQ ID NO: 163
  CDS (1)..(636)

SEQ ID NO: 34392 - protein, 211 aa, Yarrowia lipolytica CLIB122; identical to SEQ ID NO: 164

SEQ ID NO: 34393 - DNA, 744 bp, Aspergillus nidulans FGSC A4; identical to SEQ ID NO: 165
  CDS (1)..(744)

SEQ ID NO: 34394 - protein, 247 aa, Aspergillus nidulans FGSC A4; identical to SEQ ID NO: 166

SEQ ID NO: 34395 - DNA, 711 bp, Aspergillus nidulans FGSC A4; identical to SEQ ID NO: 167
  CDS (1)..(711)

SEQ ID NO: 34396 - protein, 236 aa, Aspergillus nidulans FGSC A4; identical to SEQ ID NO: 168

SEQ ID NO: 34397 - DNA, 669 bp, Candida albicans SC5314; identical to SEQ ID NO: 169
  CDS (1)..(669): transl_table=12

SEQ ID NO: 34398 - protein, 222 aa, Candida albicans SC5314; identical to SEQ ID NO: 170

SEQ ID NO: 34399 - DNA, 597 bp, Herminiimonas arsenicoxydans; identical to SEQ ID NO: 171
  CDS (1)..(597): transl_table=11

SEQ ID NO: 34400 - protein, 198 aa, Herminiimonas arsenicoxydans; identical to SEQ ID NO: 172

SEQ ID NO: 34401 - DNA, 558 bp, Leptospira interrogans serovar Copenhageni str. Fiocruz L1-130; identical to SEQ ID NO: 15311
  CDS (1)..(558): transl_table=11

SEQ ID NO: 34402 - protein, 185 aa, Leptospira interrogans serovar Copenhageni str. Fiocruz L1-130; identical to SEQ ID NO: 15312

SEQ ID NO: 34403 - DNA, 579 bp, Bacillus anthracis str. Sterne; identical to SEQ ID NO: 175
  CDS (1)..(579): transl_table=11

SEQ ID NO: 34404 - protein, 192 aa, Bacillus anthracis str. Sterne; identical to SEQ ID NO: 176

SEQ ID NO: 34405 - DNA, 579 bp, Bacillus thuringiensis serovar konkukian str. 97-27; identical to SEQ ID NO: 177
  CDS (1)..(579): transl_table=11

SEQ ID NO: 34406 - protein, 192 aa, Bacillus thuringiensis serovar konkukian str. 97-27; identical to SEQ ID NO: 178

SEQ ID NO: 34407 - DNA, 600 bp, Acinetobacter sp. ADP1; identical to SEQ ID NO: 181
  CDS (1)..(600): transl_table=11

SEQ ID NO: 34408 - protein, 199 aa, Acinetobacter sp. ADP1; identical to SEQ ID NO: 182

SEQ ID NO: 34409 - DNA, 576 bp, Bacillus licheniformis ATCC 14580; identical to SEQ ID NO: 183
  CDS (1)..(576): transl_table=11

SEQ ID NO: 34410 - protein, 191 aa, Bacillus licheniformis ATCC 14580; identical to SEQ ID NO: 184

SEQ ID NO: 34411 - DNA, 579 bp, Bacillus cereus E33L; identical to SEQ ID NO: 15323
  CDS (1)..(579): transl_table=11

SEQ ID NO: 34412 - protein, 192 aa, Bacillus cereus E33L; identical to SEQ ID NO: 15324

SEQ ID NO: 34413 - DNA, 588 bp, Methylococcus capsulatus str. Bath; identical to SEQ ID NO: 185
  CDS (1)..(588): transl_table=11

SEQ ID NO: 34414 - protein, 195 aa, Methylococcus capsulatus str. Bath; identical to SEQ ID NO: 186

SEQ ID NO: 34415 - DNA, 582 bp, Bacillus clausii KSM-K16; identical to SEQ ID NO: 187
  CDS (1)..(582): transl_table=11

SEQ ID NO: 34416 - protein, 193 aa, Bacillus clausii KSM-K16; identical to SEQ ID NO: 188

SEQ ID NO: 34417 - DNA, 567 bp, Staphylococcus epidermidis RP62A; identical to SEQ ID NO: 15333
  CDS (1)..(567): transl_table=11

SEQ ID NO: 34418 - protein, 188 aa, Staphylococcus epidermidis RP62A; identical to SEQ ID NO: 15334

SEQ ID NO: 34419 - DNA, 597 bp, Bacteroides fragilis NCTC 9343; identical to SEQ ID NO: 15335
  CDS (1)..(597): transl_table=11

SEQ ID NO: 34420 - protein, 198 aa, Bacteroides fragilis NCTC 9343; identical to SEQ ID NO: 15336

SEQ ID NO: 34421 - DNA, 588 bp, Pseudomonas fluorescens Pf-5; identical to SEQ ID NO: 15337
  CDS (1)..(588): transl_table=11

SEQ ID NO: 34422 - protein, 195 aa, Pseudomonas fluorescens Pf-5; identical to SEQ ID NO: 15338

SEQ ID NO: 34423 - DNA, 600 bp, Dechloromonas aromatica RCB; identical to SEQ ID NO: 189
  CDS (1)..(600): transl_table=11

SEQ ID NO: 34424 - protein, 199 aa, Dechloromonas aromatica RCB; identical to SEQ ID NO: 190

SEQ ID NO: 34425 - DNA, 585 bp, Ralstonia eutropha JMP134; identical to SEQ ID NO: 191
  CDS (1)..(585): transl_table=11

SEQ ID NO: 34426 - protein, 194 aa, Ralstonia eutropha JMP134; identical to SEQ ID NO: 192

SEQ ID NO: 34427 - DNA, 582 bp, Burkholderia sp. 383; identical to SEQ ID NO: 195
  CDS (1)..(582): transl_table=11

SEQ ID NO: 34428 - protein, 193 aa, Burkholderia sp. 383; identical to SEQ ID NO: 196

SEQ ID NO: 34429 - DNA, 582 bp, Geobacter metallireducens GS-15; identical to SEQ ID NO: 199
  CDS (1)..(582): transl_table=11

SEQ ID NO: 34430 - protein, 193 aa, Geobacter metallireducens GS-15; identical to SEQ ID NO: 200

SEQ ID NO: 34431 - DNA, 594 bp, Desulfovibrio desulfuricans G20; identical to SEQ ID NO: 201
  CDS (1)..(594): transl_table=11

SEQ ID NO: 34432 - protein, 197 aa, Desulfovibrio desulfuricans G20; identical to SEQ ID NO: 202

SEQ ID NO: 34433 - DNA, 606 bp, Frankia sp. CcI3; identical to SEQ ID NO: 15357
  CDS (1)..(606): transl_table=11

SEQ ID NO: 34434 - protein, 201 aa, Frankia sp. CcI3; identical to SEQ ID NO: 15358

SEQ ID NO: 34435 - DNA, 582 bp, Novosphingobium aromaticivorans DSM 12444; identical to SEQ ID NO: 203
  CDS (1)..(582): transl_table=11

SEQ ID NO: 34436 - protein, 193 aa, Novosphingobium aromaticivorans DSM 12444; identical to SEQ ID NO: 204

SEQ ID NO: 34437 - DNA, 585 bp, Burkholderia xenovorans LB400; identical to SEQ ID NO: 205
  CDS (1)..(585): transl_table=11

SEQ ID NO: 34438 - protein, 194 aa, Burkholderia xenovorans LB400; identical to SEQ ID NO: 206

SEQ ID NO: 34439 - DNA, 615 bp, Acidobacteria bacterium Ellin345; identical to SEQ ID NO: 15365
  CDS (1)..(615): transl_table=11

SEQ ID NO: 34440 - protein, 204 aa, Acidobacteria bacterium Ellin345; identical to SEQ ID NO: 15366

SEQ ID NO: 34441 - DNA, 594 bp, Myxococcus xanthus DK 1622; identical to SEQ ID NO: 209
  CDS (1)..(594): transl_table=11

SEQ ID NO: 34442 - protein, 197 aa, Myxococcus xanthus DK 1622; identical to SEQ ID NO: 210

SEQ ID NO: 34443 - DNA, 600 bp, Mesorhizobium sp. BNC1
  CDS (1)..(600): transl_table=11
atgaaagcgatcacatccgtttgcgtctactgcggctcttccacgggccgcggcgacggctatctcaccgccggccgaaggctcggcaatgcgcttgcgcaagcaggcatccgtctcgtttatggcggaggaaccaaaggcatcatgggggcggtcgccgccgggtgcctggaaaagggaggcaaggtcacgggcatcattccgcgcttcctgataaaatgggaagcgaccgaaaacgcgcataccagcctcgacgacctcatcgtcaccgaggacatgcaccagcgcaagcatctgatgttcgaccattccgacgccttcatcgcacttccgggcggcatcgggacggtggaggagatcgtcgagatcatgacctgggcccaactcggccggcacgagaaacccatcgttttcgccaatatcgacggcttctgggcgcctcttatgtcgcttctggaacatatgagagcggaaggcttcatccataccggacaccgcgtgaaaccgctcgtcatcgatcacgtggacgaaatcgtgccggcacttatgggcaccggctccccttccgagggtgaccccgcgattattgaacggctttga

SEQ ID NO: 34444 - protein, 199 aa, Mesorhizobium sp. BNC1
MKAITSVCVYCGSSTGRGDGYLTAGRRLGNALAQAGIRLVYGGGTKGIMGAVAAGCLEKGGKVTGIIPRFLIKWEATENAHTSLDDLIVTEDMHQRKHLMFDHSDAFIALPGGIGTVEEIVEIMTWAQLGRHEKPIVFANIDGFWAPLMSLLEHMRAEGFIHTGHRVKPLVIDHVDEIVPALMGTGSPSEGDPAIIERL

SEQ ID NO: 34445 - DNA, 561 bp, Rhodococcus sp. RHA1
  CDS (1)..(561): transl_table=11
gtgataccggaaactgttccaccgcggtcgttctcggtgtgcgtctactgtgcgtccggtcccgtggacgaccacttcctggaactcgcgtcccgggtgggtaccgaaatcggaaagcgcggttggcaactcgtgtccggcggcggcaacgtctcgatgatgggcgcggtggccgaggctgcccgcgcggcaggggcgacaaccgtcggtgtcattccgaaagctctggtgcacagagaagtcgccgacgtcgacgccgacgagctggtggtcaccgacaccatgcgccagcgcaagcagatcatggaggaccgggcggacgcgttcgtcacgctgcccggcggtatcggcacgctggaggagctgttcgaaacgtggaccgcgggctatctcggtatgcacgagaaaccggtggtcctgctcgatccgcacggtcactatacggggctgctcgactggctcgacggactgcggggcggcggtttcgtggcgcagcgcgccctcgacaggctgctcgtccgggtcgatgtcggggaggcgctggacgcctgcgtctcctga

SEQ ID NO: 34446 - protein, 186 aa, Rhodococcus sp. RHA1
MIPETVPPRSFSVCVYCASGPVDDHFLELASRVGTEIGKRGWQLVSGGGNVSMMGAVAEAARAAGATTVGVIPKALVHREVADVDADELVVTDTMRQRKQIMEDRADAFVTLPGGIGTLEELFETWTAGYLGMHEKPVVLLDPHGHYTGLLDWLDGLRGGGFVAQRALDRLLVRVDVGEALDACVS

SEQ ID NO: 34447 - DNA, 564 bp, Hyphomonas neptunium ATCC 15444; identical to SEQ ID NO: 15367
  CDS (1)..(564): transl_table=11

SEQ ID NO: 34448 - protein, 187 aa, Hyphomonas neptunium ATCC 15444; identical to SEQ ID NO: 15368

SEQ ID NO: 34449 - DNA, 588 bp, Pseudomonas aeruginosa UCBPP-PA14; identical to SEQ ID NO: 211
  CDS (1)..(588): transl_table=11

SEQ ID NO: 34450 - protein, 195 aa, Pseudomonas aeruginosa UCBPP-PA14; identical to SEQ ID NO: 212

SEQ ID NO: 34451 - DNA, 597 bp, Oenococcus oeni PSU-1
  CDS (1)..(597): transl_table=11
atgacaagcagtggacaaattaaatcggtcggcgtttttatgggagcagaattcggaaacgaaaaaatgttctccaacaaagctaccgagttgggaaaatatttagccggaaataattatcgtttggtgtacggaggcggcaaagatggcttgatgggaattgtcgcaatgtcggttatggaaaacggcggccgcgtattgggaattaccccctcgaatctggctgagacttcgatcgatgccgaccaaataaccgaattagttcaaactcccgatatgaatacccgcaaacagttaatgattgatcagtccgatgctttcattgcactgccgggcggatttggtaccttggaagaaattgcccagacaattagttgggcgaaaatcgatctccatgaaaagcctctggctttgtttaacattaacggtttctacgatacgttgtggcaatggatagaggaggccgtcagtaaggattttgttccgccttttgatatgaaatatgtttaccgcgggcgaagtattgacgatatttttgaatattttgataatttcgagtttccttccgagtttcaaaatcctgccaattttgtctaa

SEQ ID NO: 34452 - protein, 198 aa, Oenococcus oeni PSU-1
MTSSGQIKSVGVFMGAEFGNEKMFSNKATELGKYLAGNNYRLVYGGGKDGLMGIVAMSVMENGGRVLGITPSNLAETSIDADQITELVQTPDMNTRKQLMIDQSDAFIALPGGFGTLEEIAQTISWAKIDLHEKPLALFNINGFYDTLWQWIEEAVSKDFVPPFDMKYVYRGRSIDDIFEYFDNFEFPSEFQNPANFV

SEQ ID NO: 34453 - DNA, 585 bp, Solibacter usitatus Ellin6076
  CDS (1)..(585): transl_table=11
atgattcggagcgtttgcgtttactgcgcctctagcgggcgatcgtcggagatttacctggaggcggcggcgcggctggggaggattttggcggggcaggggatcgcgattgtgtacggcgggagttcgctggggtcgatggggcaactggcgtcggcagcgctcgcggcgggtggcaaggtgaccggggtgctgccgcggttcatggatgagctggagtgggggaatcgcgcgctgacggagctgcggatcgtggatgacatgcatgagcggaagcgcgtcatgctggaactctcggatgcggcgatcgcgctgccgggcgggtgcgggacgctcgaggaactgttcgaggcgatcacgtggaagcggctcgggctctacttcgggccggtggtgctggtcaacgtgaacgggttcttcgatccgtgcatcgagttgctcaaccggtgcgtggacgaatgtttcatggatgagaagcaccgcgcgatgtggagcgtggccacggatccggaggcggtgatggaaacgctgcgagaggcgcctgcgtggtcgcgcgacgcgcgcaagttcgcggcgctgcgctga

SEQ ID NO: 34454 - protein, 194 aa, Solibacter usitatus Ellin6076
MIRSVCVYCASSGRSSEIYLEAAARLGRILAGQGIAIVYGGSSLGSMGQLASAALAAGGKVTGVLPRFMDELEWGNRALTELRIVDDMHERKRVMLELSDAAIALPGGCGTLEELFEAITWKRLGLYFGPVVLVNVNGFFDPCIELLNRCVDECFMDEKHRAMWSVATDPEAVMETLREAPAWSRDARKFAALR

SEQ ID NO: 34455 - DNA, 585 bp, Mycobacterium smegmatis str. MC2 155; identical to SEQ ID NO: 15373
  CDS (1)..(585): transl_table=11

SEQ ID NO: 34456 - protein, 194 aa, Mycobacterium smegmatis str. MC2 155; identical to SEQ ID NO: 15374

SEQ ID NO: 34457 - DNA, 594 bp, Acidovorax sp. JS42; identical to SEQ ID NO: 15375
  CDS (1)..(594): transl_table=11

SEQ ID NO: 34458 - protein, 197 aa, Acidovorax sp. JS42; identical to SEQ ID NO: 15376

SEQ ID NO: 34459 - DNA, 612 bp, Prosthecochloris aestuarii DSM 271; identical to SEQ ID NO: 15379
  CDS (1)..(612): transl_table=11

SEQ ID NO: 34460 - protein, 203 aa, Prosthecochloris aestuarii DSM 271; identical to SEQ ID NO: 15380

SEQ ID NO: 34461 - DNA, 705 bp, Kineococcus radiotolerans SRS30216; identical to SEQ ID NO: 15381
  CDS (1)..(705): transl_table=11

SEQ ID NO: 34462 - protein, 234 aa, Kineococcus radiotolerans SRS30216; identical to SEQ ID NO: 15382

SEQ ID NO: 34463 - DNA, 591 bp, Croceibacter atlanticus HTCC2559
  CDS (1)..(591): transl_table=11
atgagtaaactaaccgctattgcagtattttgtgggagcagcccaagtaatgatgatgcaatttttagagcagcttatggtgttggaaaacacttagccactcataaattagatattgtttttggtggaagtaaattgggcttaatgggtcaggtcgcacaaggagctttagatgcaggcggaaatgtaattggtgttattccagagtttctaagaacaaaagaagtagtacacaatcatttaaccgagttaattattacagactctatgcaagagcgaaagcttaagatgcacgaattaagtgatggtataataacgttacctggtggttttggcacttttgaagagctttttgaaatgctaacttgggcacaattaggacttcataaaaaaccaataggaattttaaatactaatgggtactatgatgatttgctagtgatgttaaaaacaatggttaacaaagaattgcttactaaagaaaattatgaactcttgttggtagattcagatttagaccaattaattaaaaagatggaaagctttacaccactaccagttcctgagtggatgaataaagaccaagcttaa

SEQ ID NO: 34464 - protein, 196 aa, Croceibacter atlanticus HTCC2559
MSKLTAIAVFCGSSPSNDDAIFRAAYGVGKHLATHKLDIVFGGSKLGLMGQVAQGALDAGGNVIGVIPEFLRTKEVVHNHLTELIITDSMQERKLKMHELSDGIITLPGGFGTFEELFEMLTWAQLGLHKKPIGILNTNGYYDDLLVMLKTMVNKELLTKENYELLLVDSDLDQLIKKMESFTPLPVPEWMNKDQA

SEQ ID NO: 34465 - DNA, 585 bp, Oceanicola batsensis HTCC2597; identical to SEQ ID NO: 15383
  CDS (1)..(585): transl_table=11

SEQ ID NO: 34466 - protein, 194 aa, Oceanicola batsensis HTCC2597; identical to SEQ ID NO: 15384

SEQ ID NO: 34467 - DNA, 561 bp, Oceanospirillum sp. MED92
  CDS (1)..(561): transl_table=11
atgcaatctatctgcgtcttttgtggatcaaaaccgggcaatagcccggtttttgctgagcaagccagaaaagtgggtgaagccttagccgagcaggagctaaccctaatatatggtggtgcgacctctgggctgatgggtgaagtagccgatgcggctttattagcaggtggccgggttatcggtgtgatgccttctcaactggaagcgaaagagcggatacatgaaggtctttctgaactcattcaggtagatgatatggccagccgcaagcagaagatgttagaaatcagtgagggttttatcgcgctaccgggtggaacgggcactcttgatgagatctttgagatgattactttgtcgcaaatcggccagcatcataagccttgtggcttcctgaatagtaccggcttttaccagcccttaattacatttcttaagcagatgcgggatcaggggtttctccatcctgactattttgcaatgctccaggttaatgatgatcccattcagcttctggatcagatgcgcagttttcagcatccccatactttctcataa

SEQ ID NO: 34468 - protein, 186 aa, Oceanospirillum sp. MED92
MQSICVFCGSKPGNSPVFAEQARKVGEALAEQELTLIYGGATSGLMGEVADAALLAGGRVIGVMPSQLEAKERIHEGLSELIQVDDMASRKQKMLEISEGFIALPGGTGTLDEIFEMITLSQIGQHHKPCGFLNSTGFYQPLITFLKQMRDQGFLHPDYFAMLQVNDDPIQLLDQMRSFQHPHTFS

SEQ ID NO: 34469 - DNA, 588 bp, Pseudomonas putida GB-1; identical to SEQ ID NO: 213
  CDS (1)..(588): transl_table=11

SEQ ID NO: 34470 - protein, 195 aa, Pseudomonas putida GB-1; identical to SEQ ID NO: 214

SEQ ID NO: 34471 - DNA, 582 bp, Erythrobacter sp. SD-21
  CDS (1)..(582): transl_table=11
gtgaaacgtcttgcagtctattgcggttcggcctcgcccgaggacccgcgctatctcgaacttgcccgcgaggtgggcgcaggcctcgctcagcgcgggatcggcgtggtctatggcggcggccggctcggccttatgggcgcagtggcctccggcgcactcgatgtgggcggagaggtgatcggcatcattcccgatgcgctcgccaagagcgaagtcgccaatcacgattgcaccgaactctacaccgtttcgggcatgcacgagcgcaagcagcgcttcaccgacctttccgaaggtttcgtcaccatcccgggcggcgtcggcacgatggacgagttgtgggaagcggtcagctgggcgcaactcggctaccaccagaagcccgtgggcctgctcaacgccttcggcttttacgatcacctcatcgccttcaaccgccacatggccgaggtcggcttcgtgcgcccggcgcatcaggggatcatcatcgccgaagacacgttaagtgcgttgctcgacgaaatggcaagctatcagccgcatacaccgatcttccagatgaaggcttccgacctctga

SEQ ID NO: 34472 - protein, 193 aa, Erythrobacter sp. SD-21
MKRLAVYCGSASPEDPRYLELAREVGAGLAQRGIGVVYGGGRLGLMGAVASGALDVGGEVIGIIPDALAKSEVANHDCTELYTVSGMHERKQRFTDLSEGFVTIPGGVGTMDELWEAVSWAQLGYHQKPVGLLNAFGFYDHLIAFNRHMAEVGFVRPAHQGIIIAEDTLSALLDEMASYQPHTPIFQMKASDL

SEQ ID NO: 34473 - DNA, 591 bp, unidentified eubacterium SCB49; identical to SEQ ID NO: 215
  CDS (1)..(591): transl_table=11

SEQ ID NO: 34474 - protein, 196 aa, unidentified eubacterium SCB49; identical to SEQ ID NO: 216

SEQ ID NO: 34475 - DNA, 606 bp, Vitis vinifera; identical to SEQ ID NO: 219
  CDS (1)..(606)
  misc_feature (21)..(21): r is g or a

SEQ ID NO: 34476 - protein, 201 aa, Vitis vinifera; identical to SEQ ID NO: 220

SEQ ID NO: 34477 - DNA, 651 bp, Vitis vinifera; identical to SEQ ID NO: 221
  CDS (1)..(651)

SEQ ID NO: 34478 - protein, 216 aa, Vitis vinifera; identical to SEQ ID NO: 222

SEQ ID NO: 34479 - DNA, 645 bp, Vitis vinifera; identical to SEQ ID NO: 223
  CDS (1)..(645)

SEQ ID NO: 34480 - protein, 214 aa, Vitis vinifera; identical to SEQ ID NO: 224

SEQ ID NO: 34481 - DNA, 801 bp, Vitis vinifera; identical to SEQ ID NO: 225
  CDS (1)..(801)

SEQ ID NO: 34482 - protein, 266 aa, Vitis vinifera; identical to SEQ ID NO: 226

SEQ ID NO: 34483 - DNA, 654 bp, Vitis vinifera; identical to SEQ ID NO: 227
  CDS (1)..(654)

SEQ ID NO: 34484 - protein, 217 aa, Vitis vinifera; identical to SEQ ID NO: 228

SEQ ID NO: 34485 - DNA, 591 bp, Ostreococcus tauri; identical to SEQ ID NO: 231
  CDS (1)..(591)

SEQ ID NO: 34486 - protein, 196 aa, Ostreococcus tauri; identical to SEQ ID NO: 232

SEQ ID NO: 34487 - DNA, 645 bp, Medicago truncatula; identical to SEQ ID NO: 235
  CDS (1)..(645)

SEQ ID NO: 34488 - protein, 214 aa, Medicago truncatula; identical to SEQ ID NO: 236

SEQ ID NO: 34489 - DNA, 660 bp, Medicago truncatula; identical to SEQ ID NO: 237
  CDS (1)..(660)

SEQ ID NO: 34490 - protein, 219 aa, Medicago truncatula; identical to SEQ ID NO: 238

SEQ ID NO: 34491 - DNA, 783 bp, Medicago truncatula; identical to SEQ ID NO: 239
  CDS (1)..(783)

SEQ ID NO: 34492 - protein, 260 aa, Medicago truncatula; identical to SEQ ID NO: 240

SEQ ID NO: 34493 - DNA, 732 bp, Aspergillus oryzae; identical to SEQ ID NO: 241
  CDS (1)..(732)

SEQ ID NO: 34494 - protein, 243 aa, Aspergillus oryzae; identical to SEQ ID NO: 242

SEQ ID NO: 34495 - DNA, 711 bp, Aspergillus oryzae; identical to SEQ ID NO: 243
  CDS (1)..(711)

SEQ ID NO: 34496 - protein, 236 aa, Aspergillus oryzae; identical to SEQ ID NO: 244

SEQ ID NO: 34497 - DNA, 576 bp, Streptomyces turgidiscabies; identical to SEQ ID NO: 245
  CDS (1)..(576): transl_table=11

SEQ ID NO: 34498 - protein, 191 aa, Streptomyces turgidiscabies; identical to SEQ ID NO: 246

SEQ ID NO: 34499 - DNA, 603 bp, Oryza sativa subsp; identical to SEQ ID NO: 247
  CDS (1)..(603)

SEQ ID NO: 34500 - protein, 200 aa, Oryza sativa subsp; identical to SEQ ID NO: 248

SEQ ID NO: 34501 - DNA, 642 bp, Arabidopsis thaliana; identical to SEQ ID NO: 249
  CDS (1)..(642)
  misc_feature (467)..(467): y is t or c

SEQ ID NO: 34502 - protein, 213 aa, Arabidopsis thaliana; identical to SEQ ID NO: 250
  misc_feature (156)..(156): The Xaa at location 156 stands for Ala, or Val.

SEQ ID NO: 34503 - DNA, 696 bp, Oryza sativa subsp; identical to SEQ ID NO: 251
  CDS (1)..(696)

SEQ ID NO: 34504 - protein, 231 aa, Oryza sativa subsp; identical to SEQ ID NO: 252

SEQ ID NO: 34505 - DNA, 642 bp, Arabidopsis thaliana; identical to SEQ ID NO: 253
  CDS (1)..(642)

SEQ ID NO: 34506 - protein, 213 aa, Arabidopsis thaliana; identical to SEQ ID NO: 254

SEQ ID NO: 34507 - DNA, 546 bp, Arabidopsis thaliana; identical to SEQ ID NO: 15431
  CDS (1)..(546)

SEQ ID NO: 34508 - protein, 181 aa, Arabidopsis thaliana; identical to SEQ ID NO: 15432

SEQ ID NO: 34509 - DNA, 609 bp, Arabidopsis thaliana; identical to SEQ ID NO: 257
  CDS (1)..(609)

SEQ ID NO: 34510 - protein, 202 aa, Arabidopsis thaliana; identical to SEQ ID NO: 258

SEQ ID NO: 34511 - DNA, 588 bp, Pseudomonas aeruginosa; identical to SEQ ID NO: 259
  CDS (1)..(588): transl_table=11

SEQ ID NO: 34512 - protein, 195 aa, Pseudomonas aeruginosa; identical to SEQ ID NO: 260

SEQ ID NO: 34513 - DNA, 651 bp, Arabidopsis thaliana; identical to SEQ ID NO: 261
  CDS (1)..(651)

SEQ ID NO: 34514 - protein, 216 aa, Arabidopsis thaliana; identical to SEQ ID NO: 262

SEQ ID NO: 34515 - DNA, 738 bp, Saccharomyces cerevisiae; identical to SEQ ID NO: 263
  CDS (1)..(738)

SEQ ID NO: 34516 - protein, 245 aa, Saccharomyces cerevisiae; identical to SEQ ID NO: 264

SEQ ID NO: 34517 - DNA, 729 bp, Oryza sativa; identical to SEQ ID NO: 265
  CDS (1)..(729)

SEQ ID NO: 34518 - protein, 242 aa, Oryza sativa; identical to SEQ ID NO: 266

SEQ ID NO: 34519 - DNA, 672 bp, Oryza sativa; identical to SEQ ID NO: 267
  CDS (1)..(672)

SEQ ID NO: 34520 - protein, 223 aa, Oryza sativa; identical to SEQ ID NO: 268

SEQ ID NO: 34521 - DNA, 870 bp, Oryza sativa; identical to SEQ ID NO: 269
  CDS (1)..(870)

SEQ ID NO: 34522 - protein, 289 aa, Oryza sativa; identical to SEQ ID NO: 270

SEQ ID NO: 34523 - DNA, 1032 bp, Oryza sativa; identical to SEQ ID NO: 273
  CDS (1)..(1032)

SEQ ID NO: 34524 - protein, 343 aa, Oryza sativa; identical to SEQ ID NO: 274

SEQ ID NO: 34525 - DNA, 741 bp, Oryza sativa; identical to SEQ ID NO: 275
  CDS (1)..(741)

SEQ ID NO: 34526 - protein, 246 aa, Oryza sativa; identical to SEQ ID NO: 276

SEQ ID NO: 34527 - DNA, 753 bp, Oryza sativa; identical to SEQ ID NO: 277
  CDS (1)..(753)

SEQ ID NO: 34528 - protein, 250 aa, Oryza sativa; identical to SEQ ID NO: 278

SEQ ID NO: 34529 - DNA, 672 bp, Oryza sativa; identical to SEQ ID NO: 279
  CDS (1)..(672)

SEQ ID NO: 34530 - protein, 223 aa, Oryza sativa; identical to SEQ ID NO: 280

SEQ ID NO: 34531 - DNA, 651 bp, Oryza sativa; identical to SEQ ID NO: 281
  CDS (1)..(651)

SEQ ID NO: 34532 - protein, 216 aa, Oryza sativa; identical to SEQ ID NO: 282

SEQ ID NO: 34533 - DNA, 567 bp, Oryza sativa; identical to SEQ ID NO: 283
  CDS (1)..(567)

SEQ ID NO: 34534 - protein, 188 aa, Oryza sativa; identical to SEQ ID NO: 284

SEQ ID NO: 34535 - DNA, 684 bp, Oryza sativa; identical to SEQ ID NO: 285
  CDS (1)..(684)

SEQ ID NO: 34536 - protein, 227 aa, Oryza sativa; identical to SEQ ID NO: 286

SEQ ID NO: 34537 - DNA, 615 bp, Oryza sativa; identical to SEQ ID NO: 287
  CDS (1)..(615)

SEQ ID NO: 34538 - protein, 204 aa, Oryza sativa; identical to SEQ ID NO: 288

SEQ ID NO: 34539 - DNA, 735 bp, Oryza sativa; identical to SEQ ID NO: 289
  CDS (1)..(735)

SEQ ID NO: 34540 - protein, 244 aa, Oryza sativa; identical to SEQ ID NO: 290

SEQ ID NO: 34541 - DNA, 666 bp, Glycine max; identical to SEQ ID NO: 15187
  CDS (1)..(666)

SEQ ID NO: 34542 - protein, 221 aa, Glycine max; identical to SEQ ID NO: 88

SEQ ID NO: 34543 - DNA, 678 bp, Glycine max; identical to SEQ ID NO: 291
  CDS (1)..(678)

SEQ ID NO: 34544 - protein, 225 aa, Glycine max; identical to SEQ ID NO: 292

SEQ ID NO: 34545 - DNA, 630 bp, Glycine max; identical to SEQ ID NO: 293
  CDS (1)..(630)

SEQ ID NO: 34546 - protein, 209 aa, Glycine max; identical to SEQ ID NO: 294

SEQ ID NO: 34547 - DNA, 627 bp, Triticum aestivum; identical to SEQ ID NO: 295
  CDS (1)..(627)

SEQ ID NO: 34548 - protein, 208 aa, Triticum aestivum; identical to SEQ ID NO: 296

SEQ ID NO: 34549 - DNA, 627 bp, Triticum aestivum; identical to SEQ ID NO: 297
  CDS (1)..(627)

SEQ ID NO: 34550 - protein, 208 aa, Triticum aestivum; identical to SEQ ID NO: 298

SEQ ID NO: 34551 - DNA, 720 bp, Triticum aestivum; identical to SEQ ID NO: 299
  CDS (1)..(720)

SEQ ID NO: 34552 - protein, 239 aa, Triticum aestivum; identical to SEQ ID NO: 300

SEQ ID NO: 34553 - DNA, 651 bp, Linum usitatissimum; identical to SEQ ID NO: 301
  CDS (1)..(651)

SEQ ID NO: 34554 - protein, 216 aa, Linum usitatissimum; identical to SEQ ID NO: 302

SEQ ID NO: 34555 - DNA, 786 bp, Zea mays; identical to SEQ ID NO: 303
  CDS (1)..(786)

SEQ ID NO: 34556 - protein, 261 aa, Zea mays; identical to SEQ ID NO: 304

SEQ ID NO: 34557 - DNA, 627 bp, Zea mays; identical to SEQ ID NO: 305
  CDS (1)..(627)

SEQ ID NO: 34558 - protein, 208 aa, Zea mays; identical to SEQ ID NO: 306

SEQ ID NO: 34559 - DNA, 660 bp, Brassica napus; identical to SEQ ID NO: 307
  CDS (1)..(660)

SEQ ID NO: 34560 - protein, 219 aa, Brassica napus; identical to SEQ ID NO: 308

SEQ ID NO: 34561 - DNA, 711 bp, Brassica napus; identical to SEQ ID NO: 309
  CDS (1)..(711)

SEQ ID NO: 34562 - protein, 236 aa, Brassica napus; identical to SEQ ID NO: 310

SEQ ID NO: 34563 - DNA, 642 bp, Brassica napus; identical to SEQ ID NO: 311
  CDS (1)..(642)

SEQ ID NO: 34564 - protein, 213 aa, Brassica napus; identical to SEQ ID NO: 312

SEQ ID NO: 34565 - DNA, 642 bp, Brassica napus; identical to SEQ ID NO: 313
  CDS (1)..(642)

SEQ ID NO: 34566 - protein, 213 aa, Brassica napus; identical to SEQ ID NO: 314

SEQ ID NO: 34567 - DNA, 651 bp, Brassica napus; identical to SEQ ID NO: 315
  CDS (1)..(651)

SEQ ID NO: 34568 - protein, 216 aa, Brassica napus; identical to SEQ ID NO: 316

SEQ ID NO: 34569 - DNA, 630 bp, Glycine max; identical to SEQ ID NO: 317
  CDS (1)..(630)

SEQ ID NO: 34570 - protein, 209 aa, Glycine max; identical to SEQ ID NO: 318

SEQ ID NO: 34571 - DNA, 660 bp, Glycine max; identical to SEQ ID NO: 319
  CDS (1)..(660)

SEQ ID NO: 34572 - protein, 219 aa, Glycine max; identical to SEQ ID NO: 320

SEQ ID NO: 34573 - DNA, 648 bp, Glycine max; identical to SEQ ID NO: 321
  CDS (1)..(648)

SEQ ID NO: 34574 - protein, 215 aa, Glycine max; identical to SEQ ID NO: 322

SEQ ID NO: 34575 - DNA, 645 bp, Glycine max; identical to SEQ ID NO: 323
  CDS (1)..(645)

SEQ ID NO: 34576 - protein, 214 aa, Glycine max; identical to SEQ ID NO: 324

SEQ ID NO: 34577 - DNA, 678 bp, Glycine max; identical to SEQ ID NO: 325
  CDS (1)..(678)

SEQ ID NO: 34578 - protein, 225 aa, Glycine max; identical to SEQ ID NO: 326

SEQ ID NO: 34579 - DNA, 648 bp, Brassica napus; identical to SEQ ID NO: 327
  CDS (1)..(648)

SEQ ID NO: 34580 - protein, 215 aa, Brassica napus; identical to SEQ ID NO: 328

SEQ ID NO: 34581 - DNA, 657 bp, Zea mays; identical to SEQ ID NO: 329
  CDS (1)..(657)

SEQ ID NO: 34582 - protein, 218 aa, Zea mays; identical to SEQ ID NO: 330

SEQ ID NO: 34583 - DNA, 711 bp, Zea mays; identical to SEQ ID NO: 331
  CDS (1)..(711)

SEQ ID NO: 34584 - protein, 236 aa, Zea mays; identical to SEQ ID NO: 332

SEQ ID NO: 34585 - DNA, 798 bp, Zea mays; identical to SEQ ID NO: 333
  CDS (1)..(798)

SEQ ID NO: 34586 - protein, 265 aa, Zea mays; identical to SEQ ID NO: 334

SEQ ID NO: 34587 - DNA, 672 bp, Zea mays; identical to SEQ ID NO: 335
  CDS (1)..(672)

SEQ ID NO: 34588 - protein, 223 aa, Zea mays; identical to SEQ ID NO: 336

SEQ ID NO: 34589 - DNA, 768 bp, Zea mays; identical to SEQ ID NO: 337
  CDS (1)..(768)

SEQ ID NO: 34590 - protein, 255 aa, Zea mays; identical to SEQ ID NO: 338

SEQ ID NO: 34591 - DNA, 627 bp, Zea mays; identical to SEQ ID NO: 339
  CDS (1)..(627)

SEQ ID NO: 34592 - protein, 208 aa, Zea mays; identical to SEQ ID NO: 340

SEQ ID NO: 34593 - DNA, 774 bp, Zea mays; identical to SEQ ID NO: 341
  CDS (1)..(774)

SEQ ID NO: 34594 - protein, 257 aa, Zea mays; identical to SEQ ID NO: 342

SEQ ID NO: 34595 - DNA, 21 bp, Artificial sequence
  primer
atgaggcagcagcagcagcag

SEQ ID NO: 34596 - DNA, 20 bp, Artificial sequence
  primer
ttagaaccctagatgaccag

SEQ ID NO: 34597 - protein, 197 aa, Artificial sequence
  consensus sequence
  Variant (3)..(3): Xaa in position 3 is any amino acid
  Variant (7)..(7): Xaa in position 7 is any amino acid
  Variant (8)..(8): Xaa in position 8 is any or no amino acid
  Variant (10)..(12): Xaa in position 10 to 12 is any amino acid
  Variant (13)..(17): Xaa in position 13 to 17 is any or no amino acid
  Variant (19)..(20): Xaa in position 19 to 20 is any amino acid
  Variant (23)..(28): Xaa in position 23 to 28 is any amino acid
  Variant (29)..(31): Xaa in position 29 to 31 is any or no amino acid
  Variant (38)..(39): Xaa in position 38 to 39 is any amino acid
  Variant (44)..(52): Xaa in position 44 to 52 is any amino acid
  Variant (53)..(54): Xaa in position 53 to 54 is any or no amino acid
  Variant (56)..(56): Xaa in position 56 is any amino acid
  Variant (57)..(57): Xaa in position 57 is any or no amino acid
  Variant (59)..(59): Xaa in position 59 is any amino acid
  Variant (61)..(61): Xaa in position 61 is any amino acid
  Variant (64)..(64): Xaa in position 64 is any amino acid
  Variant (65)..(65): Xaa in position 65 is any or no amino acid
  Variant (67)..(73): Xaa in position 67 to 73 is any amino acid
  Variant (74)..(116): Xaa in position 74 to 116 is any or no amino acid
  Variant (118)..(120): Xaa in position 118 to 120 is any amino acid
  Variant (122)..(123): Xaa in position 122 to 123 is any amino acid
  Variant (126)..(126): Xaa in position 126 is any amino acid
  Variant (129)..(130): Xaa in position 129 to 130 is any amino acid
  Variant (132)..(135): Xaa in position 132 to 135 is any amino acid
  Variant (136)..(141): Xaa in position 136 to 141 is any or no amino acid
  Variant (143)..(143): Xaa in position 143 is any amino acid
  Variant (145)..(145): Xaa in position 145 is any amino acid
  Variant (151)..(151): Xaa in position 151 is any amino acid
  Variant (154)..(154): Xaa in position 154 is any amino acid
  Variant (157)..(158): Xaa in position 157 to 158 is any amino acid
  Variant (160)..(161): Xaa in position 160 to 161 is any amino acid
  Variant (164)..(164): Xaa in position 164 is any amino acid
  Variant (168)..(168): Xaa in position 168 is any amino acid
  Variant (170)..(170): Xaa in position 170 is any amino acid
  Variant (173)..(174): Xaa in position 173 to 174 is any amino acid
  Variant (178)..(179): Xaa in position 178 to 179 is any amino acid
  Variant (181)..(184): Xaa in position 181 to 184 is any amino acid
  Variant (186)..(195): Xaa in position 186 to 195 is any amino acid
CVXCGSXXGXXXXXXXXAXXLGXXXXXXXXXLVYGGGXXGLMGXXXXXXXXXXXGXXVXGXIPXXLXXXXXXXXXXXXXXXXXXXXXXXXXXXXXXXXXXXXXXXXXXXXXXXXXXEXXXVXXMHXRKXXMXXXXXXXXXXDXFXALPGGXGTXEEXXEXXTWXQLGXHXKPXXLLNXXGXXXXLXXXXXXXXXXGF

SEQ ID NO: 34598 - protein, 17 aa, Artificial sequence
  protein pattern
  Variant (2)..(2): Xaa in position 2 is Ile or Val
  Variant (3)..(3): Xaa in position 3 is Ala or Thr
  Variant (8)..(8): Xaa in position 8 is any amino acid
  Variant (11)..(11): Xaa in position 11 is any amino acid
  Variant (12)..(12): Xaa in position 12 is any or no amino acid
  Variant (14)..(15): Xaa in position 14 to 15 is any or no amino acid
  Variant (17)..(17): Xaa in position 17 is Ile, Leu, Met or Val
FXXLPGGXGTXXEXXEX

SEQ ID NO: 34599 - protein, 22 aa, Artificial sequence
  protein pattern
  Variant (2)..(2): Xaa in position 2 is any amino acid
  Variant (6)..(6): Xaa in position 6 is Ala, Gly or Ser
  Variant (7)..(8): Xaa in position 7 to 8 is any amino acid
  Variant (13)..(13): Xaa in position 13 is any amino acid
  Variant (14)..(14): Xaa in position 14 is Ile, Leu or Val
  Variant (15)..(15): Xaa in position 15 is Ala or Ser
  Variant (16)..(21): Xaa in position 16 to 21 is any amino acid
  Variant (22)..(22): Xaa in position 22 is Asp, Gly, Asn or Ser
LXYGGXXXGLMGXXXXXXXXXX

SEQ ID NO: 34600 - protein, 20 aa, Artificial sequence
  protein pattern
  Variant (2)..(2): Xaa in position 2 is any amino acid
  Variant (3)..(4): Xaa in position 3 to 4 is any or no amino acid
  Variant (6)..(7): Xaa in position 6 to 7 is any amino acid
  Variant (8)..(8): Xaa in position 8 is any or no amino acid
  Variant (10)..(10): Xaa in position 10 is His or Arg
  Variant (11)..(11): Xaa in position 11 is any amino acid
  Variant (14)..(15): Xaa in position 14 to 15 is any amino acid
  Variant (16)..(16): Xaa in position 16 is Phe or Met
  Variant (17)..(19): Xaa in position 17 to 19 is any amino acid
  Variant (20)..(20): Xaa in position 20 is Ala, Gly or Ser
EXXXVXXXMXXRKXXXXXXX

SEQ ID NO: 34601 - protein, 23 aa, Artificial sequence
  protein pattern
  Variant (3)..(3): Xaa in position 3 is Phe or Tyr
  Variant (4)..(4): Xaa in position 4 is Ala, Cys, Gly or Ser
  Variant (6)..(6): Xaa in position 6 is any or no amino acid
  Variant (8)..(8): Xaa in position 8 is any amino acid
  Variant (9)..(9): Xaa in position 9 is any or no amino acid
  Variant (11)..(17): Xaa in position 11 to 17 is any amino acid
  Variant (18)..(18): Xaa in position 18 is any or no amino acid
  Variant (20)..(22): Xaa in position 20 to 22 is any amino acid
  Variant (23)..(23): Xaa in position 23 is Ala, Gly or Leu
CVXXGXSXXGXXXXXXXXAXXXX

SEQ ID NO: 34602 - DNA, 687 bp, Arabidopsis thaliana
  CDS (1)..(687)
atggaaatagtgaagtcgaggttcaagagggtttgtgtgttctgtggtagcagcagcggaaagagagagtgctacagtgatgccgccactgatctagctcaagagctggtgacgaggagattgaatcttgtgtatggaggaggaagcattggtctcatgggtttggtctcacaagctgttcatgaagctggaggacatgtactagggatcataccaaggactcttatggacaaagagataaccggagaaacatatggtgaggtaatagctgtggcggatatgcatgaaagaaaagccgaaatggcacgccactcggattgtttcattgctttaccaggtgggtatggaacactggaggagttattggaagtaatagcatgggcacaacttggaatccacgacaagcctgtgggtttgttaaatgtggatggttattacaattacctcctcactttcattgataaagccgttgatgatggctttatcaagccatctcagcgtcacatctttgtctcagcccctaatgccaaagagcttgtccaaaaacttgaggcatacaagccagtgaatgatggagtcatagctaaatctaggtgggaggttgagaagaaagtgcaacagccgcaacaacagcaacaagtagtgttctgttctaacacaagcatgcagactgagattgccctttag

SEQ ID NO: 34603 - protein, 228 aa, Arabidopsis thaliana; identical to SEQ ID NO: 130

SEQ ID NO: 34604 - DNA, 1109 bp, Glycine max; identical to SEQ ID NO: 73
  CDS (194)..(853)

SEQ ID NO: 34605 - protein, 219 aa, Glycine max; identical to SEQ ID NO: 74

SEQ ID NO: 34606 - DNA, 1234 bp, Glycine max; identical to SEQ ID NO: 15197
  CDS (283)..(942)

SEQ ID NO: 34607 - protein, 219 aa, Glycine max; identical to SEQ ID NO: 15198

SEQ ID NO: 34608 - DNA, 869 bp, Oryza sativa
  CDS (204)..(869)
  misc_feature (10)..(10): n is a, g, c or t
aagaaacacnacaatggtactggttgtattcgacagtgaaattcagacgtttatagtatttcgcgtgcctccctttgttttttttccttcatcgaaagaaaaaggaaacagagggacaggtctacgttctgttctgcaaaggagtactagtacgtatcaagacaagtacagcagcatgtacagagattttgtcatgtcagaaaatggcaacgcccatgcgttcctctgcatctatgaggcagcagcagcagcagcagcaggagagcaggttcaagaggacctgcgtgttctgcggcagtagccagggcaacaagaccacctaccgcgatgccgccgtcgacctcgccaaagagctggtcgcgaggggcattgaccttgtgtacggcggcggcagcattggcctcatgggcctcgtctcccaggccgtctacgacggtggcagacatgtcattggggtcatccccaagactctcatgacccccgagataatcggagagacagtaggggaggtgaggccagtgtccgacatgcaccagaggaaggctgagatggcgaggcagtctgatgcattcatagccctgcccggaggatacggaacactggaagagctgcttgaagtcatcacatgggcgcaattaggcatccatcataaaccggttgggctgctgaacgttgatgggtactacaactccctgctcacattcatcgaccaagccgtggaagaaggcttcatcagccccagtgctcgccgcatcatcgtgtcggctccaacggcacaagaactcatggacaagcttgaggaatacgtcccttaccatgatagggttgcgtctgggctgaactgggagactggtcatctagggttctaa

SEQ ID NO: 34609 - protein, 221 aa, Oryza sativa
MATPMRSSASMRQQQQQQQESRFKRTCVFCGSSQGNKTTYRDAAVDLAKELVARGIDLVYGGGSIGLMGLVSQAVYDGGRHVIGVIPKTLMTPEIIGETVGEVRPVSDMHQRKAEMARQSDAFIALPGGYGTLEELLEVITWAQLGIHHKPVGLLNVDGYYNSLLTFIDQAVEEGFISPSARRIIVSAPTAQELMDKLEEYVPYHDRVASGLNWETGHLGF

SEQ ID NO: 34610 - DNA, 1385 bp, Sorghum bicolor; identical to SEQ ID NO: 75
  CDS (250)..(957)

SEQ ID NO: 34611 - protein, 235 aa, Sorghum bicolor; identical to SEQ ID NO: 76

SEQ ID NO: 34612 - DNA, 1172 bp, Zea mays; identical to SEQ ID NO: 77
  CDS (221)..(847)

SEQ ID NO: 34613 - protein, 208 aa, Zea mays; identical to SEQ ID NO: 78

SEQ ID NO: 34614 - DNA, 1333 bp, Zea mays; identical to SEQ ID NO: 79
  CDS (131)..(829)

SEQ ID NO: 34615 - protein, 232 aa, Zea mays; identical to SEQ ID NO: 80

SEQ ID NO: 34616 - DNA, 957 bp, Brassica napus; identical to SEQ ID NO: 81
  CDS (68)..(742)

SEQ ID NO: 34617 - protein, 224 aa, Brassica napus; identical to SEQ ID NO: 82

SEQ ID NO: 34618 - DNA, 969 bp, Brassica napus; identical to SEQ ID NO: 83
  CDS (49)..(696)

SEQ ID NO: 34619 - protein, 215 aa, Brassica napus; identical to SEQ ID NO: 84

SEQ ID NO: 34620 - DNA, 1042 bp, Glycine max; identical to SEQ ID NO: 87
  CDS (60)..(725)

SEQ ID NO: 34621 - protein, 221 aa, Glycine max; identical to SEQ ID NO: 88

SEQ ID NO: 34622 - DNA, 941 bp, Glycine max; identical to SEQ ID NO: 15209
  CDS (29)..(730)

SEQ ID NO: 34623 - protein, 233 aa, Glycine max; identical to SEQ ID NO: 70

SEQ ID NO: 34624 - DNA, 849 bp, Brassica napus; identical to SEQ ID NO: 89
  CDS (64)..(705)

SEQ ID NO: 34625 - protein, 213 aa, Brassica napus; identical to SEQ ID NO: 90

SEQ ID NO: 34626 - DNA, 579 bp, Klebsiella pneumoniae subsp. pneumoniae MGH 78578; identical to SEQ ID NO: 105
  CDS (1)..(579): transl_table=11

SEQ ID NO: 34627 - protein, 192 aa, Klebsiella pneumoniae subsp. pneumoniae MGH 78578; identical to SEQ ID NO: 106

SEQ ID NO: 34628 - DNA, 609 bp, Xanthobacter autotrophicus Py2; identical to SEQ ID NO: 15225
  CDS (1)..(609): transl_table=11

SEQ ID NO: 34629 - protein, 202 aa, Xanthobacter autotrophicus Py2; identical to SEQ ID NO: 15226

SEQ ID NO: 34630 - DNA, 693 bp, Oryza sativa (japonica cultivar-group); identical to SEQ ID NO: 107
  CDS (1)..(693)

SEQ ID NO: 34631 - protein, 230 aa, Oryza sativa (japonica cultivar-group); identical to SEQ ID NO: 108

SEQ ID NO: 34632 - DNA, 1062 bp, Oryza sativa (japonica cultivar-group); identical to SEQ ID NO: 109
  CDS (1)..(1062)

SEQ ID NO: 34633 - protein, 353 aa, Oryza sativa (japonica cultivar-group); identical to SEQ ID NO: 110

SEQ ID NO: 34634 - DNA, 612 bp, Mesorhizobium loti MAFF303099; identical to SEQ ID NO: 15231
  CDS (1)..(612): transl_table=11

SEQ ID NO: 34635 - protein, 203 aa, Mesorhizobium loti MAFF303099; identical to SEQ ID NO: 15232

SEQ ID NO: 34636 - DNA, 642 bp, Arabidopsis thaliana; identical to SEQ ID NO: 111
  CDS (1)..(642)

SEQ ID NO: 34637 - protein, 213 aa, Arabidopsis thaliana; identical to SEQ ID NO: 112

SEQ ID NO: 34638 - DNA, 648 bp, Arabidopsis thaliana; identical to SEQ ID NO: 113
  CDS (1)..(648)

SEQ ID NO: 34639 - protein, 215 aa, Arabidopsis thaliana; identical to SEQ ID NO: 114

SEQ ID NO: 34640 - DNA, 648 bp, Arabidopsis thaliana; identical to SEQ ID NO: 115
  CDS (1)..(648)

SEQ ID NO: 34641 - protein, 215 aa, Arabidopsis thaliana; identical to SEQ ID NO: 116

SEQ ID NO: 34642 - DNA, 654 bp, Arabidopsis thaliana; identical to SEQ ID NO: 117
  CDS (1)..(654)

SEQ ID NO: 34643 - protein, 217 aa, Arabidopsis thaliana; identical to SEQ ID NO: 118

SEQ ID NO: 34644 - DNA, 651 bp, Agrobacterium tumefaciens str. C58; identical to SEQ ID NO: 121
  CDS (1)..(651): transl_table=11

SEQ ID NO: 34645 - protein, 216 aa, Agrobacterium tumefaciens str. C58; identical to SEQ ID NO: 122

SEQ ID NO: 34646 - DNA, 585 bp, Ralstonia solanacearum GMI1000; identical to SEQ ID NO: 123
  CDS (1)..(585): transl_table=11

SEQ ID NO: 34647 - protein, 194 aa, Ralstonia solanacearum GMI1000; identical to SEQ ID NO: 124

SEQ ID NO: 34648 - DNA, 600 bp, Agrobacterium tumefaciens str. C58; identical to SEQ ID NO: 125
  CDS (1)..(600): transl_table=11

SEQ ID NO: 34649 - protein, 199 aa, Agrobacterium tumefaciens str. C58; identical to SEQ ID NO: 126

SEQ ID NO: 34650 - DNA, 642 bp, Arabidopsis thaliana; identical to SEQ ID NO: 127
  CDS (1)..(642)

SEQ ID NO: 34651 - protein, 213 aa, Arabidopsis thaliana; identical to SEQ ID NO: 128

SEQ ID NO: 34652 - DNA, 588 bp, Corynebacterium glutamicum ATCC 13032; identical to SEQ ID NO: 131
  CDS (1)..(588): transl_table=11

SEQ ID NO: 34653 - protein, 195 aa, Corynebacterium glutamicum ATCC 13032; identical to SEQ ID NO: 132

SEQ ID NO: 34654 - DNA, 579 bp, Fusobacterium nucleatum subsp. nucleatum ATCC 25586; identical to SEQ ID NO: 34361
  CDS (1)..(579): transl_table=11

SEQ ID NO: 34655 - protein, 192 aa, Fusobacterium nucleatum subsp. nucleatum ATCC 25586; identical to SEQ ID NO: 34362

SEQ ID NO: 34656 - DNA, 687 bp, Xanthomonas campestris pv. campestris str. ATCC 33913; identical to SEQ ID NO: 133
  CDS (1)..(687): transl_table=11

SEQ ID NO: 34657 - protein, 228 aa, Xanthomonas campestris pv. campestris str. ATCC 33913; identical to SEQ ID NO: 134

SEQ ID NO: 34658 - DNA, 555 bp, Chlorobium tepidum TLS
  CDS (1)..(555): transl_table=11
atgatccgctcagtcaccgtctattgcagctccagcaaccttgctccggaaccctatttcagcgaagccgaatcgcttggccgcggccttgccgaacgcggaattgatctggtcttcggtggtgggcacgtcgggctgatgggacgcaccgccgacgcagctctgaaggctggcggcacggtgaagggcatcatcccgcgcttcctcgaagagcgcgaggtagctcaccccggactgaccgagctgcacgtggttgaaaccatgcaccagcgcaaaatgctgctcaccgactgggcggacgccttcgtgattttgccgggcggactcggcacactcgatgagttgatggaaatcctcacctggaagcacctcggccagcaccgaaaaccgatcatcctgctcaacacggagggcttttggaatcagctcctacagttcttcgaacgcatcgccgccgaaaagatggtcaagcctggttacgaaagctactacgacatctgcaactccgccagcgacgtgcttgcgatgatcgaccgccaaaacaccagcgtctga

SEQ ID NO: 34659 - protein, 184 aa, Chlorobium tepidum TLS
MIRSVTVYCSSSNLAPEPYFSEAESLGRGLAERGIDLVFGGGHVGLMGRTADAALKAGGTVKGIIPRFLEEREVAHPGLTELHVVETMHQRKMLLTDWADAFVILPGGLGTLDELMEILTWKHLGQHRKPIILLNTEGFWNQLLQFFERIAAEKMVKPGYESYYDICNSASDVLAMIDRQNTSV

SEQ ID NO: 34660 - DNA, 570 bp, Oceanobacillus iheyensis HTE831; identical to SEQ ID NO: 137
  CDS (1)..(570): transl_table=11

SEQ ID NO: 34661 - protein, 189 aa, Oceanobacillus iheyensis HTE831; identical to SEQ ID NO: 138

SEQ ID NO: 34662 - DNA, 588 bp, Pseudomonas putida KT2440; identical to SEQ ID NO: 139
  CDS (1)..(588): transl_table=11

SEQ ID NO: 34663 - protein, 195 aa, Pseudomonas putida KT2440; identical to SEQ ID NO: 140

SEQ ID NO: 34664 - DNA, 576 bp, Lactobacillus plantarum WCFS1
  CDS (1)..(576): transl_table=11
atggcaattcataatatctgtgttttttgtgggtctaattctggtttagatcccgcatttagtgagaaaacggtggcactcggtcaatacttggccgctaatgattaccaactcgtctatggcggtggcgaccatggtttaatggggaaagtcgccaaagcaactatggatgctggtggccgcgttatcgggatcatcccgcattttctggtcgcaagagaacttgcatttaaggacgtcacgacttttatcgaaacgcgcacgatgaccgaacgcaaggaaaagatgcttcacctcgctgacgcctttatcgttttacctggcgggtttggcacctttgaagaattcttacaaatgttatcttggagtcaaatggatattcaccaaaagccgattgcgctctacaacatcgacggcttctacgacgatctagtcgccatgctacaaaagaccgccgacttagggtttgcccccgaggctaacctcgacctattcattaatgggcatgatcttgatgaaattttcgctggtttccatgatttcaaacatgtattaccgcctaagtatacgaactaa

SEQ ID NO: 34665 - protein, 191 aa, Lactobacillus plantarum WCFS1
MAIHNICVFCGSNSGLDPAFSEKTVALGQYLAANDYQLVYGGGDHGLMGKVAKATMDAGGRVIGIIPHFLVARELAFKDVTTFIETRTMTERKEKMLHLADAFIVLPGGFGTFEEFLQMLSWSQMDIHQKPIALYNIDGFYDDLVAMLQKTADLGFAPEANLDLFINGHDLDEIFAGFHDFKHVLPPKYTN

SEQ ID NO: 34666 - DNA, 576 bp, Enterococcus faecalis V583; identical to SEQ ID NO: 15265
  CDS (1)..(576): transl_table=11

SEQ ID NO: 34667 - protein, 191 aa, Enterococcus faecalis V583; identical to SEQ ID NO: 15266

SEQ ID NO: 34668 - DNA, 627 bp, Bordetella parapertussis 12822; identical to SEQ ID NO: 15271
  CDS (1)..(627): transl_table=11

SEQ ID NO: 34669 - protein, 208 aa, Bordetella parapertussis 12822; identical to SEQ ID NO: 15272

SEQ ID NO: 34670 - DNA, 570 bp, Synechococcus sp. WH 8102; identical to SEQ ID NO: 15275
  CDS (1)..(570): transl_table=11

SEQ ID NO: 34671 - protein, 189 aa, Synechococcus sp. WH 8102; identical to SEQ ID NO: 15276

SEQ ID NO: 34672 - DNA, 639 bp, Chromobacterium violaceum ATCC 12472; identical to SEQ ID NO: 145
  CDS (1)..(639): transl_table=11

SEQ ID NO: 34673 - protein, 212 aa, Chromobacterium violaceum ATCC 12472; identical to SEQ ID NO: 146

SEQ ID NO: 34674 - DNA, 636 bp, Rhodopseudomonas palustris CGA009; identical to SEQ ID NO: 149
  CDS (1)..(636): transl_table=11

SEQ ID NO: 34675 - protein, 211 aa, Rhodopseudomonas palustris CGA009; identical to SEQ ID NO: 150

SEQ ID NO: 34676 - DNA, 591 bp, Geobacter sulfurreducens PCA; identical to SEQ ID NO: 151
  CDS (1)..(591): transl_table=11

SEQ ID NO: 34677 - protein, 196 aa, Geobacter sulfurreducens PCA; identical to SEQ ID NO: 152

SEQ ID NO: 34678 - DNA, 579 bp, Bacillus cereus ATCC 10987; identical to SEQ ID NO: 153
  CDS (1)..(579): transl_table=11

SEQ ID NO: 34679 - protein, 192 aa, Bacillus cereus ATCC 10987; identical to SEQ ID NO: 154

SEQ ID NO: 34680 - DNA, 798 bp, Magnaporthe grisea 70-15; identical to SEQ ID NO: 155
  CDS (1)..(798)

SEQ ID NO: 34681 - protein, 265 aa, Magnaporthe grisea 70-15; identical to SEQ ID NO: 156

SEQ ID NO: 34682 - DNA, 723 bp, Gibberella zeae PH-1; identical to SEQ ID NO: 157
  CDS (1)..(723)

SEQ ID NO: 34683 - protein, 240 aa, Gibberella zeae PH-1; identical to SEQ ID NO: 158

SEQ ID NO: 34684 - DNA, 669 bp, Candida glabrata CBS 138; identical to SEQ ID NO: 159
  CDS (1)..(669)

SEQ ID NO: 34685 - protein, 222 aa, Candida glabrata CBS 138; identical to SEQ ID NO: 160

SEQ ID NO: 34686 - DNA, 696 bp, Debaryomyces hansenii CBS767; identical to SEQ ID NO: 161
  CDS (1)..(696)

SEQ ID NO: 34687 - protein, 231 aa, Debaryomyces hansenii CBS767; identical to SEQ ID NO: 162

SEQ ID NO: 34688 - DNA, 636 bp, Yarrowia lipolytica CLIB122; identical to SEQ ID NO: 163
  CDS (1)..(636)

SEQ ID NO: 34689 - protein, 211 aa, Yarrowia lipolytica CLIB122; identical to SEQ ID NO: 164

SEQ ID NO: 34690 - DNA, 744 bp, Aspergillus nidulans FGSC A4; identical to SEQ ID NO: 165
  CDS (1)..(744)

SEQ ID NO: 34691 - protein, 247 aa, Aspergillus nidulans FGSC A4; identical to SEQ ID NO: 166

SEQ ID NO: 34692 - DNA, 711 bp, Aspergillus nidulans FGSC A4; identical to SEQ ID NO: 167
  CDS (1)..(711)

SEQ ID NO: 34693 - protein, 236 aa, Aspergillus nidulans FGSC A4; identical to SEQ ID NO: 168

SEQ ID NO: 34694 - DNA, 669 bp, Candida albicans SC5314; identical to SEQ ID NO: 169
  CDS (1)..(669): transl_table=12

SEQ ID NO: 34695 - protein, 222 aa, Candida albicans SC5314; identical to SEQ ID NO: 170

SEQ ID NO: 34696 - DNA, 1539 bp, Cryptococcus neoformans var. neoformans B-3501A; identical to SEQ ID NO: 15303
  CDS (1)..(1539)

SEQ ID NO: 34697 - protein, 512 aa, Cryptococcus neoformans var. neoformans B-3501A; identical to SEQ ID NO: 15304

SEQ ID NO: 34698 - DNA, 597 bp, Herminiimonas arsenicoxydans; identical to SEQ ID NO: 171
  CDS (1)..(597): transl_table=11

SEQ ID NO: 34699 - protein, 198 aa, Herminiimonas arsenicoxydans; identical to SEQ ID NO: 172

SEQ ID NO: 34700 - DNA, 603 bp, Bradyrhizobium sp. ORS278
  CDS (1)..(603): transl_table=11
atgactgaaatccgcaccgtctgtgtctattgcggctccggcccgggcaccaatcccagcttcatcgaatcggcgaaaaccctcggcaaggcgctcgccgagaacggcgtcaggctcgtctatggcggcggctccatcggcatgatgggcgcggtcgccaaggccgtgctggagcatggcggcgacgtcaccggcatcattccggacttcctggtgaagaaggaagtgatgatgccgctcaaggacctcatcgtcacgcccgacatgcacgagcgcaagcggctgatgttcgagcattccgatgcgttcgtcgcgcttcccggcggcatcggcacgctcgaggagctggtcgagcagctcacctggaagcagctcgggcgccacgccaagccggtgttgatggccaatatcgacggcttttgggagccgctgttcgccctgctcgcccatatgcgcgagaccgagttcatccgcccgggcttccagatcgagttgctcaaggccgaccgcgccgaagagatcctgccgcgcctgcgcgaggccgcagcccgtgtcgccaaggaagagacggagatggagccggagatcgccaagcggctatga

SEQ ID NO: 34701 - protein, 200 aa, Bradyrhizobium sp. ORS278
MTEIRTVCVYCGSGPGTNPSFIESAKTLGKALAENGVRLVYGGGSIGMMGAVAKAVLEHGGDVTGIIPDFLVKKEVMMPLKDLIVTPDMHERKRLMFEHSDAFVALPGGIGTLEELVEQLTWKQLGRHAKPVLMANIDGFWEPLFALLAHMRETEFIRPGFQIELLKADRAEEILPRLREAAARVAKEETEMEPEIAKRL

SEQ ID NO: 34702 - DNA, 558 bp, Leptospira interrogans serovar Copenhageni str. Fiocruz L1-130; identical to SEQ ID NO: 15311
  CDS (1)..(558): transl_table=11

SEQ ID NO: 34703 - protein, 185 aa, Leptospira interrogans serovar Copenhageni str. Fiocruz L1-130; identical to SEQ ID NO: 15312

SEQ ID NO: 34704 - DNA, 579 bp, Bacillus thuringiensis serovar konkukian str. 97-27; identical to SEQ ID NO: 177
  CDS (1)..(579): transl_table=11

SEQ ID NO: 34705 - protein, 192 aa, Bacillus thuringiensis serovar konkukian str. 97-27; identical to SEQ ID NO: 178

SEQ ID NO: 34706 - DNA, 600 bp, Acinetobacter sp. ADP1; identical to SEQ ID NO: 181
  CDS (1)..(600): transl_table=11

SEQ ID NO: 34707 - protein, 199 aa, Acinetobacter sp. ADP1; identical to SEQ ID NO: 182

SEQ ID NO: 34708 - DNA, 576 bp, Bacillus licheniformis ATCC 14580; identical to SEQ ID NO: 183
  CDS (1)..(576): transl_table=11

SEQ ID NO: 34709 - protein, 191 aa, Bacillus licheniformis ATCC 14580; identical to SEQ ID NO: 184

SEQ ID NO: 34710 - DNA, 588 bp, Methylococcus capsulatus str. Bath; identical to SEQ ID NO: 185
  CDS (1)..(588): transl_table=11

SEQ ID NO: 34711 - protein, 195 aa, Methylococcus capsulatus str. Bath; identical to SEQ ID NO: 186

SEQ ID NO: 34712 - DNA, 597 bp, Bacteroides fragilis NCTC 9343; identical to SEQ ID NO: 15335
  CDS (1)..(597): transl_table=11

SEQ ID NO: 34713 - protein, 198 aa, Bacteroides fragilis NCTC 9343; identical to SEQ ID NO: 15336

SEQ ID NO: 34714 - DNA, 588 bp, Pseudomonas fluorescens Pf-5; identical to SEQ ID NO: 15337
  CDS (1)..(588): transl_table=11

SEQ ID NO: 34715 - protein, 195 aa, Pseudomonas fluorescens Pf-5; identical to SEQ ID NO: 15338

SEQ ID NO: 34716 - DNA, 600 bp, Dechloromonas aromatica RCB; identical to SEQ ID NO: 189
  CDS (1)..(600): transl_table=11

SEQ ID NO: 34717 - protein, 199 aa, Dechloromonas aromatica RCB; identical to SEQ ID NO: 190

SEQ ID NO: 34718 - DNA, 585 bp, Ralstonia eutropha JMP134; identical to SEQ ID NO: 191
  CDS (1)..(585): transl_table=11

SEQ ID NO: 34719 - protein, 194 aa, Ralstonia eutropha JMP134; identical to SEQ ID NO: 192

SEQ ID NO: 34720 - DNA, 582 bp, Burkholderia sp. 383; identical to SEQ ID NO: 195
  CDS (1)..(582): transl_table=11

SEQ ID NO: 34721 - protein, 193 aa, Burkholderia sp. 383; identical to SEQ ID NO: 196

SEQ ID NO: 34722 - DNA, 582 bp, Geobacter metallireducens GS-15; identical to SEQ ID NO: 199
  CDS (1)..(582): transl_table=11

SEQ ID NO: 34723 - protein, 193 aa, Geobacter metallireducens GS-15; identical to SEQ ID NO: 200

SEQ ID NO: 34724 - DNA, 594 bp, Desulfovibrio desulfuricans G20; identical to SEQ ID NO: 201
  CDS (1)..(594): transl_table=11

SEQ ID NO: 34725 - protein, 197 aa, Desulfovibrio desulfuricans G20; identical to SEQ ID NO: 202

SEQ ID NO: 34726 - DNA, 606 bp, Frankia sp. CcI3; identical to SEQ ID NO: 15357
  CDS (1)..(606): transl_table=11

SEQ ID NO: 34727 - protein, 201 aa, Frankia sp. CcI3; identical to SEQ ID NO: 15358

SEQ ID NO: 34728 - DNA, 582 bp, Novosphingobium aromaticivorans DSM 12444; identical to SEQ ID NO: 203
  CDS (1)..(582): transl_table=11

SEQ ID NO: 34729 - protein, 193 aa, Novosphingobium aromaticivorans DSM 12444; identical to SEQ ID NO: 204

SEQ ID NO: 34730 - DNA, 585 bp, Ralstonia metallidurans CH34; identical to SEQ ID NO: 207
  CDS (1)..(585): transl_table=11

SEQ ID NO: 34731 - protein, 194 aa, Ralstonia metallidurans CH34; identical to SEQ ID NO: 208

SEQ ID NO: 34732 - DNA, 594 bp, Myxococcus xanthus DK 1622; identical to SEQ ID NO: 209
  CDS (1)..(594): transl_table=11

SEQ ID NO: 34733 - protein, 197 aa, Myxococcus xanthus DK 1622; identical to SEQ ID NO: 210

SEQ ID NO: 34734 - DNA, 588 bp, Pseudomonas aeruginosa UCBPP-PA14; identical to SEQ ID NO: 211
  CDS (1)..(588): transl_table=11

SEQ ID NO: 34735 - protein, 195 aa, Pseudomonas aeruginosa UCBPP-PA14; identical to SEQ ID NO: 212

SEQ ID NO: 34736 - DNA, 585 bp, Solibacter usitatus Ellin6076; identical to SEQ ID NO: 34453
  CDS (1)..(585): transl_table=11

SEQ ID NO: 34737 - protein, 194 aa, Solibacter usitatus Ellin6076; identical to SEQ ID NO: 34454

SEQ ID NO: 34738 - DNA, 582 bp, Exiguobacterium sibiricum 255-15; identical to SEQ ID NO: 15377
  CDS (1)..(582): transl_table=11

SEQ ID NO: 34739 - protein, 193 aa, Exiguobacterium sibiricum 255-15; identical to SEQ ID NO: 15378

SEQ ID NO: 34740 - DNA, 612 bp, Prosthecochloris aestuarii DSM 271; identical to SEQ ID NO: 15379
  CDS (1)..(612): transl_table=11

SEQ ID NO: 34741 - protein, 203 aa, Prosthecochloris aestuarii DSM 271; identical to SEQ ID NO: 15380

SEQ ID NO: 34742 - DNA, 591 bp, Croceibacter atlanticus HTCC2559; identical to SEQ ID NO: 34463
  CDS (1)..(591): transl_table=11

SEQ ID NO: 34743 - protein, 196 aa, Croceibacter atlanticus HTCC2559; identical to SEQ ID NO: 34464

SEQ ID NO: 34744 - DNA, 564 bp, Roseovarius nubinhibens ISM
  CDS (1)..(564): transl_table=11
atgacccctttgtccgtctgtgtcttttgcggctcgaaaaccgggggaaacccggcctatgcggaggccgcagaaacgctgggccggacgcttgcggctgagggctggcggttggtctacggggccggggatatcgggctcatggggcttgtcgcgcgggccaatcagcaggcgggcggtaataattttggcgttatcccccaacaccttatggacctcgaggcgggcaagcgcgacctcaatgcgctggtcatcaccgagacgatgcatgagcgcaagaaggtgatgttttcgaactcgcatgcgatcgtcttgctgcccggtggggcggggtcgctcgacgagtttttcgaggtgctgacctgggcgcagatcgggctgcatgggcggccgattttcgtggtgaacaccgacggctactggacgccgctgctcgggttgatcgatcatgtggtggccgagggctttgcccatgagagcgtccgcgatctgtttcagacggtgccagacatcgccgcgctgaccgaggcgctgcggccgctggcggcggagctcaagggttga

SEQ ID NO: 34745 - protein, 187 aa, Roseovarius nubinhibens ISM
MTPLSVCVFCGSKTGGNPAYAEAAETLGRTLAAEGWRLVYGAGDIGLMGLVARANQQAGGNNFGVIPQHLMDLEAGKRDLNALVITETMHERKKVMFSNSHAIVLLPGGAGSLDEFFEVLTWAQIGLHGRPIFVVNTDGYWTPLLGLIDHVVAEGFAHESVRDLFQTVPDIAALTEALRPLAAELKG

SEQ ID NO: 34746 - DNA, 588 bp, Pseudomonas putida GB-1; identical to SEQ ID NO: 213
  CDS (1)..(588): transl_table=11

SEQ ID NO: 34747 - protein, 195 aa, Pseudomonas putida GB-1; identical to SEQ ID NO: 214

SEQ ID NO: 34748 - DNA, 591 bp, unidentified eubacterium SCB49; identical to SEQ ID NO: 215
  CDS (1)..(591): transl_table=11

SEQ ID NO: 34749 - protein, 196 aa, unidentified eubacterium SCB49; identical to SEQ ID NO: 216

SEQ ID NO: 34750 - DNA, 606 bp, Vitis vinifera; identical to SEQ ID NO: 219
  CDS (1)..(606)
  misc_feature (21)..(21): r is g or a

SEQ ID NO: 34751 - protein, 201 aa, Vitis vinifera; identical to SEQ ID NO: 220

SEQ ID NO: 34752 - DNA, 651 bp, Vitis vinifera; identical to SEQ ID NO: 221
  CDS (1)..(651)

SEQ ID NO: 34753 - protein, 216 aa, Vitis vinifera; identical to SEQ ID NO: 222

SEQ ID NO: 34754 - DNA, 645 bp, Vitis vinifera; identical to SEQ ID NO: 223
  CDS (1)..(645)

SEQ ID NO: 34755 - protein, 214 aa, Vitis vinifera; identical to SEQ ID NO: 224

SEQ ID NO: 34756 - DNA, 792 bp, Vitis vinifera
  CDS (1)..(792)
  misc_feature (126)..(126): y is t or c
atggagagagacaaggaaatgaagcaatcaaaattcaagaggatttgtgtcttctgtgggagtagccaaggaaagaagagcagttacaaggatgctgctatcgagcttggaagagaattgataacyggtgagacagttggggaagtgaaggcagttgcagacatgcaccaaaggaaggcagagatggctagacactcagatgcctttattgccttacctggtgggtatggaactctagaagagcttcttgaagtaataacctgggctcagcttggcatccatgacaaaccggtgggattgttgaatgtggatggctactacaactccctcctctcattcatagacaaagcagtagaggaagatttcataagcccaagtgcccgccatatcattgtatcagcccccactgccagggagttgatgaagaaattggaggagtattttcctcgccatgagggagttgcttcaaaactgagctgggaaactgaacagttaggctattctcccaaatgtgaactctctagtctcctaatcctctgtttggttgctgacaagtcaaaagaaaacaacattaatcttctcaattacttcttaatctacaagttttcctttgttccatgtaaagcccatctgatatcttctcattactggtgtattaatgttcttgatccattccagaatatgattgatgatggtggtagtatccatctacaacaaacttggatcccaactacctcttcctcgaatgacatcaaagatggagctaagttgacaagaacatctatcatctag

SEQ ID NO: 34757 - protein, 263 aa, Vitis vinifera
MERDKEMKQSKFKRICVFCGSSQGKKSSYKDAAIELGRELITGETVGEVKAVADMHQRKAEMARHSDAFIALPGGYGTLEELLEVITWAQLGIHDKPVGLLNVDGYYNSLLSFIDKAVEEDFISPSARHIIVSAPTARELMKKLEEYFPRHEGVASKLSWETEQLGYSPKCELSSLLILCLVADKSKENNINLLNYFLIYKFSFVPCKAHLISSHYWCINVLDPFQNMIDDGGSIHLQQTWIPTTSSSNDIKDGAKLTRTSII

SEQ ID NO: 34758 - DNA, 801 bp, Vitis vinifera; identical to SEQ ID NO: 225
  CDS (1)..(801)

SEQ ID NO: 34759 - protein, 266 aa, Vitis vinifera; identical to SEQ ID NO: 226

SEQ ID NO: 34760 - DNA, 654 bp, Vitis vinifera; identical to SEQ ID NO: 227
  CDS (1)..(654)

SEQ ID NO: 34761 - protein, 217 aa, Vitis vinifera; identical to SEQ ID NO: 228

SEQ ID NO: 34762 - DNA, 645 bp, Medicago truncatula; identical to SEQ ID NO: 235
  CDS (1)..(645)

SEQ ID NO: 34763 - protein, 214 aa, Medicago truncatula; identical to SEQ ID NO: 236

SEQ ID NO: 34764 - DNA, 660 bp, Medicago truncatula; identical to SEQ ID NO: 237
  CDS (1)..(660)

SEQ ID NO: 34765 - protein, 219 aa, Medicago truncatula; identical to SEQ ID NO: 238

SEQ ID NO: 34766 - DNA, 783 bp, Medicago truncatula; identical to SEQ ID NO: 239
  CDS (1)..(783)

SEQ ID NO: 34767 - protein, 260 aa, Medicago truncatula; identical to SEQ ID NO: 240

SEQ ID NO: 34768 - DNA, 732 bp, Aspergillus oryzae; identical to SEQ ID NO: 241
  CDS (1)..(732)

SEQ ID NO: 34769 - protein, 243 aa, Aspergillus oryzae; identical to SEQ ID NO: 242

SEQ ID NO: 34770 - DNA, 711 bp, Aspergillus oryzae; identical to SEQ ID NO: 243
  CDS (1)..(711)

SEQ ID NO: 34771 - protein, 236 aa, Aspergillus oryzae; identical to SEQ ID NO: 244

SEQ ID NO: 34772 - DNA, 576 bp, Streptomyces turgidiscabies; identical to SEQ ID NO: 245
  CDS (1)..(576): transl_table=11

SEQ ID NO: 34773 - protein, 191 aa, Streptomyces turgidiscabies; identical to SEQ ID NO: 246

SEQ ID NO: 34774 - DNA, 603 bp, Oryza sativa subsp; identical to SEQ ID NO: 247
  CDS (1)..(603)

SEQ ID NO: 34775 - protein, 200 aa, Oryza sativa subsp; identical to SEQ ID NO: 248

SEQ ID NO: 34776 - DNA, 642 bp, Arabidopsis thaliana; identical to SEQ ID NO: 249
  CDS (1)..(642)
  misc_feature (467)..(467): y is t or c

SEQ ID NO: 34777 - protein, 213 aa, Arabidopsis thaliana; identical to SEQ ID NO: 250
  misc_feature (156)..(156): The Xaa at location 156 stands for Ala, or Val.

SEQ ID NO: 34778 - DNA, 696 bp, Oryza sativa subsp; identical to SEQ ID NO: 251
  CDS (1)..(696)

SEQ ID NO: 34779 - protein, 231 aa, Oryza sativa subsp; identical to SEQ ID NO: 252

SEQ ID NO: 34780 - DNA, 642 bp, Arabidopsis thaliana; identical to SEQ ID NO: 253
  CDS (1)..(642)

SEQ ID NO: 34781 - protein, 213 aa, Arabidopsis thaliana; identical to SEQ ID NO: 254

SEQ ID NO: 34782 - DNA, 546 bp, Arabidopsis thaliana; identical to SEQ ID NO: 15431
  CDS (1)..(546)

SEQ ID NO: 34783 - protein, 181 aa, Arabidopsis thaliana; identical to SEQ ID NO: 15432

SEQ ID NO: 34784 - DNA, 609 bp, Arabidopsis thaliana; identical to SEQ ID NO: 257
  CDS (1)..(609)

SEQ ID NO: 34785 - protein, 202 aa, Arabidopsis thaliana; identical to SEQ ID NO: 258

SEQ ID NO: 34786 - DNA, 597 bp, Rhodococcus fascians; identical to SEQ ID NO: 15437
  CDS (1)..(597): transl_table=11

SEQ ID NO: 34787 - protein, 198 aa, Rhodococcus fascians; identical to SEQ ID NO: 15438

SEQ ID NO: 34788 - DNA, 588 bp, Pseudomonas aeruginosa; identical to SEQ ID NO: 259
  CDS (1)..(588): transl_table=11

SEQ ID NO: 34789 - protein, 195 aa, Pseudomonas aeruginosa; identical to SEQ ID NO: 260

SEQ ID NO: 34790 - DNA, 651 bp, Arabidopsis thaliana; identical to SEQ ID NO: 261
  CDS (1)..(651)

SEQ ID NO: 34791 - protein, 216 aa, Arabidopsis thaliana; identical to SEQ ID NO: 262

SEQ ID NO: 34792 - DNA, 738 bp, Saccharomyces cerevisiae; identical to SEQ ID NO: 263
  CDS (1)..(738)

SEQ ID NO: 34793 - protein, 245 aa, Saccharomyces cerevisiae; identical to SEQ ID NO: 264

SEQ ID NO: 34794 - DNA, 729 bp, Oryza sativa; identical to SEQ ID NO: 265
  CDS (1)..(729)

SEQ ID NO: 34795 - protein, 242 aa, Oryza sativa; identical to SEQ ID NO: 266

SEQ ID NO: 34796 - DNA, 672 bp, Oryza sativa; identical to SEQ ID NO: 267
  CDS (1)..(672)

SEQ ID NO: 34797 - protein, 223 aa, Oryza sativa; identical to SEQ ID NO: 268

SEQ ID NO: 34798 - DNA, 870 bp, Oryza sativa; identical to SEQ ID NO: 269
  CDS (1)..(870)

SEQ ID NO: 34799 - protein, 289 aa, Oryza sativa; identical to SEQ ID NO: 270

SEQ ID NO: 34800 - DNA, 636 bp, Oryza sativa; identical to SEQ ID NO: 271
  CDS (1)..(636)

SEQ ID NO: 34801 - protein, 211 aa, Oryza sativa; identical to SEQ ID NO: 272

SEQ ID NO: 34802 - DNA, 1032 bp, Oryza sativa; identical to SEQ ID NO: 273
  CDS (1)..(1032)

SEQ ID NO: 34803 - protein, 343 aa, Oryza sativa; identical to SEQ ID NO: 274

SEQ ID NO: 34804 - DNA, 741 bp, Oryza sativa; identical to SEQ ID NO: 275
  CDS (1)..(741)

SEQ ID NO: 34805 - protein, 246 aa, Oryza sativa; identical to SEQ ID NO: 276

SEQ ID NO: 34806 - DNA, 753 bp, Oryza sativa; identical to SEQ ID NO: 277
  CDS (1)..(753)

SEQ ID NO: 34807 - protein, 250 aa, Oryza sativa; identical to SEQ ID NO: 278

SEQ ID NO: 34808 - DNA, 672 bp, Oryza sativa; identical to SEQ ID NO: 279
  CDS (1)..(672)

SEQ ID NO: 34809 - protein, 223 aa, Oryza sativa; identical to SEQ ID NO: 280

SEQ ID NO: 34810 - DNA, 651 bp, Oryza sativa; identical to SEQ ID NO: 281
  CDS (1)..(651)

SEQ ID NO: 34811 - protein, 216 aa, Oryza sativa; identical to SEQ ID NO: 282

SEQ ID NO: 34812 - DNA, 567 bp, Oryza sativa; identical to SEQ ID NO: 283
  CDS (1)..(567)

SEQ ID NO: 34813 - protein, 188 aa, Oryza sativa; identical to SEQ ID NO: 284

SEQ ID NO: 34814 - DNA, 684 bp, Oryza sativa; identical to SEQ ID NO: 285
  CDS (1)..(684)

SEQ ID NO: 34815 - protein, 227 aa, Oryza sativa; identical to SEQ ID NO: 286

SEQ ID NO: 34816 - DNA, 615 bp, Oryza sativa; identical to SEQ ID NO: 287
  CDS (1)..(615)

SEQ ID NO: 34817 - protein, 204 aa, Oryza sativa; identical to SEQ ID NO: 288

SEQ ID NO: 34818 - DNA, 735 bp, Oryza sativa; identical to SEQ ID NO: 289
  CDS (1)..(735)

SEQ ID NO: 34819 - protein, 244 aa, Oryza sativa; identical to SEQ ID NO: 290

SEQ ID NO: 34820 - DNA, 651 bp, Brassica napus; identical to SEQ ID NO: 15469
  CDS (1)..(651)

SEQ ID NO: 34821 - protein, 216 aa, Brassica napus; identical to SEQ ID NO: 86

SEQ ID NO: 34822 - DNA, 678 bp, Glycine max; identical to SEQ ID NO: 291
  CDS (1)..(678)

SEQ ID NO: 34823 - protein, 225 aa, Glycine max; identical to SEQ ID NO: 292

SEQ ID NO: 34824 - DNA, 630 bp, Glycine max; identical to SEQ ID NO: 293
  CDS (1)..(630)

SEQ ID NO: 34825 - protein, 209 aa, Glycine max; identical to SEQ ID NO: 294

SEQ ID NO: 34826 - DNA, 642 bp, Glycine max
  CDS (1)..(642)
atggaagagaccaattccagattcaagaggatttgcgtcttctgtgggagcagttcagggaagaaacctacctatcaggaagctgctgttcaacttggcagggaactggtggaaagaaggattgatttggtctatggaggtggtagcgtggggctgatgggtctcgtttctcaggcagttcatgatggtgggcgccatgttctaggggttatcccaacaagtcttatgccaagagagataacaggtgatcctattggggaagtgagagccgtatctagtatgcaccaaaggaaagccgagatggcccgtcaagccgatgcttttattgccctccccggaggatatggaacccttgaagaattgctggaagtcattacatgggcgcagcttgggatccacagcaaacccgtgggcctgttgaatgtggatggattttacaattccttgttgtcgttcattgacaaagccgttgatgaaggctttatatcccctaaggcacgtcgcattatcgtgtcagcacccacagccaaacaattgatgctagagctagaggaacatgttcccgagcaagatgagtttgcgtccaagttggtgtgggaagaaagactgaattacgtgactgaatcagaagttgccatgtga

SEQ ID NO: 34827 - protein, 213 aa, Glycine max; identical to SEQ ID NO: 92

SEQ ID NO: 34828 - DNA, 627 bp, Triticum aestivum; identical to SEQ ID NO: 295
  CDS (1)..(627)

SEQ ID NO: 34829 - protein, 208 aa, Triticum aestivum; identical to SEQ ID NO: 296

SEQ ID NO: 34830 - DNA, 705 bp, Triticum aestivum; identical to SEQ ID NO: 15477
  CDS (1)..(705)

SEQ ID NO: 34831 - protein, 234 aa, Triticum aestivum; identical to SEQ ID NO: 94

SEQ ID NO: 34832 - DNA, 621 bp, Triticum aestivum
  CDS (1)..(621)
atgaggcagcaggcgagcaggttcaagaggatgtgcgtcttctgcggcagcagccagggcaacaagagcagctaccacgacgccgccatcgacctcgccaaccagctcgtgggcgggggcatcgacctggtgtacggcggcggcagcatcgggctgatggggctcgtctcgcaggccgtctaccacggcggcaggcacgtcatcggggtcattcccaagactctgatgacccccgagatcgtcggggagatggtgggggaggtgaggccggtgggcgacatgcaccagcgcaaggcccagatggccagcctctccgacgccttcatagccctgcccggtgggtacgggacgctggaggagctgctggaggtgatcacctgggcgcagctagggatccatcacaagccggtgggtctgctgaatgtggaggggtactacgactcgctgctgaccttcatcgaccaggccgtggaggaaggattcatcagccccgccgcccgccgcatcatcgtctccgcccccaccgcccaccaactcatggagaaactcgaggagtacgtcccttactacgaaatggtcgcgtccgggctggactgggagacggatcgcctagacttctga

SEQ ID NO: 34833 - protein, 206 aa, Triticum aestivum; identical to SEQ ID NO: 96

SEQ ID NO: 34834 - DNA, 627 bp, Triticum aestivum; identical to SEQ ID NO: 297
  CDS (1)..(627)

SEQ ID NO: 34835 - protein, 208 aa, Triticum aestivum; identical to SEQ ID NO: 298

SEQ ID NO: 34836 - DNA, 720 bp, Triticum aestivum; identical to SEQ ID NO: 299
  CDS (1)..(720)

SEQ ID NO: 34837 - protein, 239 aa, Triticum aestivum; identical to SEQ ID NO: 300

SEQ ID NO: 34838 - DNA, 651 bp, Linum usitatissimum; identical to SEQ ID NO: 301
  CDS (1)..(651)

SEQ ID NO: 34839 - protein, 216 aa, Linum usitatissimum; identical to SEQ ID NO: 302

SEQ ID NO: 34840 - DNA, 786 bp, Zea mays; identical to SEQ ID NO: 303
  CDS (1)..(786)

SEQ ID NO: 34841 - protein, 261 aa, Zea mays; identical to SEQ ID NO: 304

SEQ ID NO: 34842 - DNA, 675 bp, Hordeum vulgare
  CDS (1)..(675)
atgggcgacaccaccgcgccctcgccgccgaggaggttcggcaggatctgcgtcttctgcggcagcaactccggcaaccgcgccgtgttcggcgacgccgcgctcgagctcggccagggcctggtgacgaggggggtcgatctggtctacggcggcggcagcatcgggctgatgggcctgatcgcgcagacggttctcgacggcggctgccgcgtcctcggggtgattccaagagcactcatgcccctcgagatatccggtgcaagtgttggagaagtaaagattgtctccgacatgcatgagaggaaagctgagatggcgcgacaagccgatgcattcattgctcttccgggtgggtatggaacaatggaagagctgttagagatgatcacttggtcgcagcttggaatccatgacaaaccggtcgggttgctaaacgtcgatgggtactatgatccgttactcgcgctgttcgacaagggcgcggcggaagggtttattaaggccgattgcaggcagataatcgtgtcggcaccaactgcccacgaactgctgacaaaaatggagcaatacacccgttcacaccgggaggtggcctcgcggacgagctgggagatgaccgagatgggctacgggaaagcaccggagccggaggaggaggcggcggcatcgtag

SEQ ID NO: 34843 - protein, 224 aa, Hordeum vulgare; identical to SEQ ID NO: 98

SEQ ID NO: 34844 - DNA, 627 bp, Zea mays; identical to SEQ ID NO: 305
  CDS (1)..(627)

SEQ ID NO: 34845 - protein, 208 aa, Zea mays; identical to SEQ ID NO: 306

SEQ ID NO: 34846 - DNA, 660 bp, Brassica napus; identical to SEQ ID NO: 307
  CDS (1)..(660)

SEQ ID NO: 34847 - protein, 219 aa, Brassica napus; identical to SEQ ID NO: 308

SEQ ID NO: 34848 - DNA, 711 bp, Brassica napus; identical to SEQ ID NO: 309
  CDS (1)..(711)

SEQ ID NO: 34849 - protein, 236 aa, Brassica napus; identical to SEQ ID NO: 310

SEQ ID NO: 34850 - DNA, 642 bp, Brassica napus; identical to SEQ ID NO: 311
  CDS (1)..(642)

SEQ ID NO: 34851 - protein, 213 aa, Brassica napus; identical to SEQ ID NO: 312

SEQ ID NO: 34852 - DNA, 642 bp, Brassica napus; identical to SEQ ID NO: 313
  CDS (1)..(642)

SEQ ID NO: 34853 - protein, 213 aa, Brassica napus; identical to SEQ ID NO: 314

SEQ ID NO: 34854 - DNA, 651 bp, Brassica napus; identical to SEQ ID NO: 315
  CDS (1)..(651)

SEQ ID NO: 34855 - protein, 216 aa, Brassica napus; identical to SEQ ID NO: 316

SEQ ID NO: 34856 - DNA, 630 bp, Glycine max; identical to SEQ ID NO: 317
  CDS (1)..(630)

SEQ ID NO: 34857 - protein, 209 aa, Glycine max; identical to SEQ ID NO: 318

SEQ ID NO: 34858 - DNA, 660 bp, Glycine max; identical to SEQ ID NO: 319
  CDS (1)..(660)

SEQ ID NO: 34859 - protein, 219 aa, Glycine max; identical to SEQ ID NO: 320

SEQ ID NO: 34860 - DNA, 648 bp, Glycine max; identical to SEQ ID NO: 321
  CDS (1)..(648)

SEQ ID NO: 34861 - protein, 215 aa, Glycine max; identical to SEQ ID NO: 322

SEQ ID NO: 34862 - DNA, 645 bp, Glycine max; identical to SEQ ID NO: 323
  CDS (1)..(645)

SEQ ID NO: 34863 - protein, 214 aa, Glycine max; identical to SEQ ID NO: 324

SEQ ID NO: 34864 - DNA, 678 bp, Glycine max; identical to SEQ ID NO: 325
  CDS (1)..(678)

SEQ ID NO: 34865 - protein, 225 aa, Glycine max; identical to SEQ ID NO: 326

SEQ ID NO: 34866 - DNA, 648 bp, Brassica napus; identical to SEQ ID NO: 327
  CDS (1)..(648)

SEQ ID NO: 34867 - protein, 215 aa, Brassica napus; identical to SEQ ID NO: 328

SEQ ID NO: 34868 - DNA, 657 bp, Zea mays; identical to SEQ ID NO: 329
  CDS (1)..(657)

SEQ ID NO: 34869 - protein, 218 aa, Zea mays; identical to SEQ ID NO: 330

SEQ ID NO: 34870 - DNA, 711 bp, Zea mays; identical to SEQ ID NO: 331
  CDS (1)..(711)

SEQ ID NO: 34871 - protein, 236 aa, Zea mays; identical to SEQ ID NO: 332

SEQ ID NO: 34872 - DNA, 798 bp, Zea mays; identical to SEQ ID NO: 333
  CDS (1)..(798)

SEQ ID NO: 34873 - protein, 265 aa, Zea mays; identical to SEQ ID NO: 334

SEQ ID NO: 34874 - DNA, 672 bp, Zea mays; identical to SEQ ID NO: 335
  CDS (1)..(672)

SEQ ID NO: 34875 - protein, 223 aa, Zea mays; identical to SEQ ID NO: 336

SEQ ID NO: 34876 - DNA, 768 bp, Zea mays; identical to SEQ ID NO: 337
  CDS (1)..(768)

SEQ ID NO: 34877 - protein, 255 aa, Zea mays; identical to SEQ ID NO: 338

SEQ ID NO: 34878 - DNA, 627 bp, Zea mays; identical to SEQ ID NO: 339
  CDS (1)..(627)

SEQ ID NO: 34879 - protein, 208 aa, Zea mays; identical to SEQ ID NO: 340

SEQ ID NO: 34880 - DNA, 774 bp, Zea mays; identical to SEQ ID NO: 341
  CDS (1)..(774)

SEQ ID NO: 34881 - protein, 257 aa, Zea mays; identical to SEQ ID NO: 342

SEQ ID NO: 34882 - DNA, 20 bp, Artificial sequence
  primer
atggaaatagtgaagtcgag

SEQ ID NO: 34883 - DNA, 21 bp, Artificial sequence
  primer
ctaaagggcaatctcagtctg

SEQ ID NO: 34884 - protein, 197 aa, Artificial sequence
  consensus sequence
  Variant (3)..(3): Xaa in position 3 is any amino acid
  Variant (7)..(8): Xaa in position 7 to 8 is any amino acid
  Variant (10)..(12): Xaa in position 10 to 12 is any amino acid
  Variant (13)..(16): Xaa in position 13 to 16 is any or no amino acid
  Variant (19)..(20): Xaa in position 19 to 20 is any amino acid
  Variant (23)..(27): Xaa in position 23 to 27 is any amino acid
  Variant (28)..(31): Xaa in position 28 to 31 is any or no amino acid
  Variant (38)..(39): Xaa in position 38 to 39 is any amino acid
  Variant (44)..(52): Xaa in position 44 to 52 is any amino acid
  Variant (54)..(54): Xaa in position 54 is any amino acid
  Variant (55)..(57): Xaa in position 55 to 57 is any or no amino acid
  Variant (59)..(59): Xaa in position 59 is any amino acid
  Variant (61)..(61): Xaa in position 61 is any amino acid
  Variant (64)..(64): Xaa in position 64 is any amino acid
  Variant (65)..(65): Xaa in position 65 is any or no amino acid
  Variant (67)..(70): Xaa in position 67 to 70 is any amino acid
  Variant (71)..(120): Xaa in position 71 to 120 is any or no amino acid
  Variant (122)..(123): Xaa in position 122 to 123 is any amino acid
  Variant (126)..(126): Xaa in position 126 is any amino acid
  Variant (129)..(130): Xaa in position 129 to 130 is any amino acid
  Variant (133)..(135): Xaa in position 133 to 135 is any amino acid
  Variant (136)..(141): Xaa in position 136 to 141 is any or no amino acid
  Variant (143)..(143): Xaa in position 143 is any amino acid
  Variant (145)..(145): Xaa in position 145 is any amino acid
  Variant (151)..(151): Xaa in position 151 is any amino acid
  Variant (154)..(154): Xaa in position 154 is any amino acid
  Variant (158)..(158): Xaa in position 158 is any amino acid
  Variant (160)..(161): Xaa in position 160 to 161 is any amino acid
  Variant (164)..(164): Xaa in position 164 is any amino acid
  Variant (168)..(168): Xaa in position 168 is any amino acid
  Variant (170)..(170): Xaa in position 170 is any amino acid
  Variant (173)..(174): Xaa in position 173 to 174 is any amino acid
  Variant (178)..(179): Xaa in position 178 to 179 is any amino acid
  Variant (181)..(181): Xaa in position 181 is any amino acid
  Variant (183)..(184): Xaa in position 183 to 184 is any amino acid
  Variant (186)..(195): Xaa in position 186 to 195 is any amino acid
CVXCGSXXGXXXXXXXAAXXLGXXXXXXXXXLVYGGGXXGLMGXXXXXXXXXGXXXXVXGXIPXXLXXXXXXXXXXXXXXXXXXXXXXXXXXXXXXXXXXXXXXXXXXXXXXXXXXXXXXVXXMHXRKXXMAXXXXXXXXXDXFXALPGGXGTXEELXEXXTWXQLGXHXKPXXLLNXXGXYXXLXXXXXXXXXXGF

SEQ ID NO: 34885 - protein, 23 aa, Artificial sequence
  protein pattern
  Variant (3)..(3): Xaa in position 3 is any amino acid
  Variant (6)..(6): Xaa in position 6 is any amino acid
  Variant (7)..(7): Xaa in position 7 is Asp or Glu
  Variant (9)..(10): Xaa in position 9 to 10 is any amino acid
  Variant (12)..(13): Xaa in position 12 to 13 is any amino acid
  Variant (14)..(14): Xaa in position 14 is Ala, Ser or Thr
  Variant (16)..(16): Xaa in position 16 is any amino acid
  Variant (20)..(20): Xaa in position 20 is any amino acid
  Variant (22)..(22): Xaa in position 22 is any or no amino acid
GGXGTXXEXXEXXXWXQLGXHXK

SEQ ID NO: 34886 - protein, 15 aa, Artificial sequence
  protein pattern
  Variant (7)..(8): Xaa in position 7 to 8 is any amino acid
  Variant (10)..(10): Xaa in position 10 is Ile, Leu or Met
  Variant (13)..(13): Xaa in position 13 is any amino acid
  Variant (14)..(14): Xaa in position 14 is Ile, Leu or Val
  Variant (15)..(15): Xaa in position 15 is Ala or Ser
LVYGGGXXGXMGXXX

SEQ ID NO: 34887 - protein, 19 aa, Artificial sequence
  protein pattern
  Variant (3)..(3): Xaa in position 3 is Phe or Tyr
  Variant (6)..(6): Xaa in position 6 is any or no amino acid
  Variant (8)..(8): Xaa in position 8 is any amino acid
  Variant (9)..(9): Xaa in position 9 is any or no amino acid
  Variant (11)..(17): Xaa in position 11 to 17 is any amino acid
  Variant (18)..(18): Xaa in position 18 is any or no amino acid
CVXCGXSXXGXXXXXXXXA

SEQ ID NO: 34888 - protein, 13 aa, Artificial sequence
  protein pattern
  Variant (2)..(2): Xaa in position 2 is any amino acid
  Variant (4)..(4): Xaa in position 4 is Ile or Val
  Variant (7)..(8): Xaa in position 7 to 8 is any amino acid
  Variant (10)..(12): Xaa in position 10 to 12 is any amino acid
VXGXIPXXLXXXE

SEQ ID NO: 34889 - DNA, 1287 bp, Escherichia coli
  CDS (1)..(1287): transl_table=11
atgaaactctacaatctgaaagatcacaacgagcaggtcagctttgcgcaagccgtaacccaggggttgggcaaaaatcaggggctgttttttccgcacgacctgccggaattcagcctgactgaaattgatgagatgctgaagctggattttgtcacccgcagtgcgaagatcctctcggcgtttattggtgatgaaatcccacaggaaatcctggaagagcgcgtgcgcgcggcgtttgccttcccggctccggtcgccaatgttgaaagcgatgtcggttgtctggaattgttccacgggccaacgctggcatttaaagatttcggcggtcgctttatggcacaaatgctgacccatattgcgggtgataagccagtgaccattctgaccgcgacctccggtgataccggagcggcagtggctcatgctttctacggtttaccgaatgtgaaagtggttatcctctatccacgaggcaaaatcagtccactgcaagaaaaactgttctgtacattgggcggcaatatcgaaactgttgccatcgacggcgatttcgatgcctgtcaggcgctggtgaagcaggcgtttgatgatgaagaactgaaagtggcgctagggttaaactcggctaactcgattaacatcagccgtttgctggcgcagatttgctactactttgaagctgttgcgcagctgccgcaggagacgcgcaaccagctggttgtctcggtgccaagcggaaacttcggcgatttgacggcgggtctgctggcgaagtcactcggtctgccggtgaaacgttttattgctgcgaccaacgtgaacgataccgtgccacgtttcctgcacgacggtcagtggtcacccaaagcgactcaggcgacgttatccaacgcgatggacgtgagtcagccgaacaactggccgcgtgtggaagagttgttccgccgcaaaatctggcaactgaaagagctgggttatgcagccgtggatgatgaaaccacgcaacagacaatgcgtgagttaaaagaactgggctacacttcggagccgcacgctgccgtagcttatcgtgcgctgcgtgatcagttgaatccaggcgaatatggcttgttcctcggcaccgcgcatccggcgaaatttaaagagagcgtggaagcgattctcggtgaaacgttggatctgccaaaagagctggcagaacgtgctgatttacccttgctttcacataatctgcccgccgattttgctgcgttgcgtaaattgatgatgaatcatcagtaa

SEQ ID NO: 34890 - protein, 428 aa, Escherichia coli
MKLYNLKDHNEQVSFAQAVTQGLGKNQGLFFPHDLPEFSLTEIDEMLKLDFVTRSAKILSAFIGDEIPQEILEERVRAAFAFPAPVANVESDVGCLELFHGPTLAFKDFGGRFMAQMLTHIAGDKPVTILTATSGDTGAAVAHAFYGLPNVKVVILYPRGKISPLQEKLFCTLGGNIETVAIDGDFDACQALVKQAFDDEELKVALGLNSANSINISRLLAQICYYFEAVAQLPQETRNQLVVSVPSGNFGDLTAGLLAKSLGLPVKRFIAATNVNDTVPRFLHDGQWSPKATQATLSNAMDVSQPNNWPRVEELFRRKIWQLKELGYAAVDDETTQQTMRELKELGYTSEPHAAVAYRALRDQLNPGEYGLFLGTAHPAKFKESVEAILGETLDLPKELAERADLPLLSHNLPADFAALRKLMMNHQ

SEQ ID NO: 34891 - DNA, 1398 bp, Mesorhizobium loti MAFF303099
  CDS (1)..(1398): transl_table=11
atgcaatatgtgagtacgcgcggggaagcacccgcgcttggattttccgatgccgtgctggctgggctggcgcgcgatggtgggctttacgtgccgcgcgagtggccgcagttttcagcttccgagatccgcgccatgcgtggccttgcctatcccgatctcgcgatccgcgtgctgtcgccgttccttggcggtgaaattccggcgccggttttcgaacgcctggtgcgcgaagcctatgccacgttccgtcacgaggcggtctgcccgcttgtccagaccggcaccaatacctttgtcctcgaactcttccatgggccgacgctggcattcaaggatgtggcgatgcagctgctcgcccggctgatggaccatgtgcttgccgaacgcgatcagcatgccaccatcgtcggcgccacgtcaggcgacaccggcggcgcggcgatcgacgcctttgccgggcgcagccgcaccgacatcttcatcctgttcccgcatggccgcgtttcgccggtgcagcagcgccagatgacgacgtcgaaggccgagaacgtccatgcgctggcgatcgaaggcaatttcgacgactgccagggcctgctcaaggacatgttcaacgaccacgcctttcgcgaccgggtggcgctgtcgggggtcaattcgatcaactgggcgcgcatcatggcccagatcgtctattatttctcctcggcactgtcgctcggcgcgccggacaggccggtgtcgttcaccgtcccgaccggcaatttcggcgatatcttcgccggctacgccgccaagaagatgggcctgccgatcgagcggctggtcatcgccaccaacgacaacgacatattggcgcgcaccttcgccaccggcgagtaccgcaccaagggtgtctttgcgaccacctcaccgtcgatggacatccaggtttcgtcgaatttcgaacgcctgctgttcgaggcctccaaccgtgacgcggcgaccgtgcggcgctacatggacggcctgaagcagtccggcgccttcaccatagaatcccgcgaaatcaatgggatgcggtccgaattcgacgccggccgcgccaccatggacgaggtcgccgccaccatccgttcgacgctcgcggccagcaattatcttctggatccgcacaccgcggcagccatgcatgtggcggccggcaaggcatcgggcgccgtgccgatggtggtgctgggcacggcgcacccggcaaaatttccggccgccgtcgaggccgccagcggggtctcgccggccctgcccgcatggctaggcggattgatgacatttgaggaaaaatacacggtacttccatccgacctgaaaatggtggaagattatgtcagccgccgtgcgcgagcggcgcgttag

SEQ ID NO: 34892 - protein, 465 aa, Mesorhizobium loti MAFF303099
MQYVSTRGEAPALGFSDAVLAGLARDGGLYVPREWPQFSASEIRAMRGLAYPDLAIRVLSPFLGGEIPAPVFERLVREAYATFRHEAVCPLVQTGTNTFVLELFHGPTLAFKDVAMQLLARLMDHVLAERDQHATIVGATSGDTGGAAIDAFAGRSRTDIFILFPHGRVSPVQQRQMTTSKAENVHALAIEGNFDDCQGLLKDMFNDHAFRDRVALSGVNSINWARIMAQIVYYFSSALSLGAPDRPVSFTVPTGNFGDIFAGYAAKKMGLPIERLVIATNDNDILARTFATGEYRTKGVFATTSPSMDIQVSSNFERLLFEASNRDAATVRRYMDGLKQSGAFTIESREINGMRSEFDAGRATMDEVAATIRSTLAASNYLLDPHTAAAMHVAAGKASGAVPMVVLGTAHPAKFPAAVEAASGVSPALPAWLGGLMTFEEKYTVLPSDLKMVEDYVSRRARAAR

SEQ ID NO: 34893 - DNA, 1281 bp, Vibrio cholerae O1 biovar eltor str. N16961
  CDS (1)..(1281): transl_table=11
atgaagctgtacaacataaaagaaaatgatgaacaagtctcctttggtcaagccgttcgccaagggttaggccgcaatcaaggcctgttttttccggcacaattgccgaagtttgacgatattgatgctctattggccgaagatttcgtctctcgtagcagcaagattttatcggcgttgattggcgatgaactgcctgcggataaaattcgcgctatggtggattccgcctttcaattcgccgcaccgattgccaaagtgaaagagggcgtttacgcgctcgaattgttccacgggccaacgctcgcgtttaaagattttggtggtcgctttatggcccagtctctggcggcggtctcgaacggcggaaaaatcacgattttgacggcgacatccggtgataccggcgctgctgttgcgcacgcattttatggtatgccagacattaatgtggtgatcctttatccgaaaggaaaaatcagtccgctgcaagaaaagctgttctgcacattaggtaaaaacattcacaccgtggcgatcaatggcgattttgatgcttgccaagcactagtgaaacaagcttttgatgacgcagagctgcgccaacagataggtttgaactctgccaactcaattaacatcagccgtttgatggcacaaatctgttactactttgaagccgctgcgcagatgagcaaagctgagcgtgaaaatctggtgatttcagtgcctagtggcaactttggtaacttaaccgcagggctgttagccaaagcactgggtttaccggtgaagcgctttattgcggcaaccaatgccaacgatacagtgccacgttacttggaaacgggacgttgggaacccaaacccacggtagcaacaacgtcaaatgcgatggatgtcagccaaccgaacaactggccgcgtatcgaagagctctgccaacgtatgggatggggcttagaaacgctgggcaaaggcgcggtttctgacgaggaaagtgcgcaagccgtacaagaactttacgatctaggctacttgtgtgaaccgcatggttcgattgcttaccgtgtattggaagagcagcgccagccgcaagaaacggggctgttcttatgtaccgcgcatcccgccaaattcaaagaagtggtggacgatattttaggtaccgacattgctctaccagcgccattggcaaaacatgcggcgatggaattgctctcacaagagctgaatgccgatttcgcagcgctgcgtgcgttactggtgaatgtgaaataa

SEQ ID NO: 34894 - protein, 426 aa, Vibrio cholerae O1 biovar eltor str. N16961
MKLYNIKENDEQVSFGQAVRQGLGRNQGLFFPAQLPKFDDIDALLAEDFVSRSSKILSALIGDELPADKIRAMVDSAFQFAAPIAKVKEGVYALELFHGPTLAFKDFGGRFMAQSLAAVSNGGKITILTATSGDTGAAVAHAFYGMPDINVVILYPKGKISPLQEKLFCTLGKNIHTVAINGDFDACQALVKQAFDDAELRQQIGLNSANSINISRLMAQICYYFEAAAQMSKAERENLVISVPSGNFGNLTAGLLAKALGLPVKRFIAATNANDTVPRYLETGRWEPKPTVATTSNAMDVSQPNNWPRIEELCQRMGWGLETLGKGAVSDEESAQAVQELYDLGYLCEPHGSIAYRVLEEQRQPQETGLFLCTAHPAKFKEVVDDILGTDIALPAPLAKHAAMELLSQELNADFAALRALLVNVK

SEQ ID NO: 34895 - DNA, 1275 bp, Pasteurella multocida subsp. multocida str. Pm70
  CDS (1)..(1275): transl_table=11
atgaatttatacaacattaaacatccagaagaacaagtcaattttgcgcaagcggtacgtcaaggattaggcaaaaaccaagggttattttttccagaaaccctaccgcactttgaggatatggatgcgctgttagcgttaccattggtggagcgtagccagaagattttatctgcgttaattggtgaggaaatttcgccaacccagttagcaaaaatggtagaaaatgcctttactttcccagcacctgtagcaaaagtggaagagggggtttatgcattggagttatttcatggtccaaccttagccttcaaagactttggtggtcgttttatggcgcaagccttagctacagtacgtggtgagggcaaaattacgattttaacggcaacgtcaggggatactggagcggcggttgcccacgctttttatggtttagaaaacattgatgtggtgattttatatccacaaggcaaaatcagcccgctacaagaaaagttattctgtacgcttggtggcaatattcgtacgattgcaatcaacggggattttgatgattgtcaggcattagtgaaacaagcgtttgatgatgcagagttgcgtcaagcgattggcttaaactcagcaaattcgatcaatatcagccgtttattagcgcaggtttgttattactttgaggcggttgcgcaattaccaaaagcggcacgcgataatcttgtggtatcggtaccaagtggtaactttggtaacctgaccgcaggcttaattgccaagtctttaggcttgccaattaaacgttttgtagcgtcaaccaatgtgaatgataccgtaccgcgttatttacgcagtggcaattggcaaccgcatgacacggtggcgacgttatccaatgcaatggatgtgagtcgtccaaataactggccacgggttgaagagttatttaaacgcaatggttgggcgctatcagatttgcattctgatgccgtaaatgacaatgaaacggaacaaactttaaaagatatgtatgccaaagggtacttgtgtgaaccacatggtgcggtggcttatcgtgtgttaaaacaagatttacagccaggtgaaaccggcttattcctctgtacggctcatcctgcgaaatttaaagaaagtgttgaacgtattttagcgcttgaattacctttacccgatgcattagcaaaacacgcggctttaccgttgctttcggatatcatggaaaatgattttgctaaattacgtgcgtatttgttagcttaa

SEQ ID NO: 34896 - protein, 424 aa, Pasteurella multocida subsp. multocida str. Pm70
MNLYNIKHPEEQVNFAQAVRQGLGKNQGLFFPETLPHFEDMDALLALPLVERSQKILSALIGEEISPTQLAKMVENAFTFPAPVAKVEEGVYALELFHGPTLAFKDFGGRFMAQALATVRGEGKITILTATSGDTGAAVAHAFYGLENIDVVILYPQGKISPLQEKLFCTLGGNIRTIAINGDFDDCQALVKQAFDDAELRQAIGLNSANSINISRLLAQVCYYFEAVAQLPKAARDNLVVSVPSGNFGNLTAGLIAKSLGLPIKRFVASTNVNDTVPRYLRSGNWQPHDTVATLSNAMDVSRPNNWPRVEELFKRNGWALSDLHSDAVNDNETEQTLKDMYAKGYLCEPHGAVAYRVLKQDLQPGETGLFLCTAHPAKFKESVERILALELPLPDALAKHAALPLLSDIMENDFAKLRAYLLA

SEQ ID NO: 34897 - DNA, 1491 bp, Lactococcus lactis subsp. lactis Il1403
  CDS (1)..(1491): transl_table=11
atggtaactttttatcagtcaacacgtgataaatcaaataaaaaaacagcgtcgcaagctattttacaaggtttggcagaagatggtggactttttgttcccgttgactttccaaaagttgatttagactttgaaaaattaaaaaacgcttcttatcaagaaattgctgaacttgttttgaaagcattttttgatgatttttctgctgacgaaattaaatcaatggtgacaaaagcatacggagaaaaattcgatagtccggaaattgcaccgcttaaaagacttgggaatcactatattcttgaactttttcatggtgaaacgattgcttttaaagacatggcactctctatcttacctcatttaatgacccaagcggctaagaaaaatggtgtgactaatgaaattgttatcttgactgcaacttctggagatacagggaaagccgcaatggccggttttgctgatgtgccccaaacaaaaattattgttttttatcccaaaggtggtgtcagccatattcaagagcaacaaatgctgactcaaaaaggggaaaatgttcatgttgttggaattgatggaaactttgaccaagctcaaacagcagtaaaagaaatgtttaataacaaagttttacatgatcaacttttgaaaaataataaacaattttcgtcagcaaattcaatgaatattggacgtttgattccccaagttgcttattatatttatgcttacgcacaacttgtcaaaactggtcaaattactgacggagaagaaattaatttttcagttccaacagggaattttggaaatatcttagcggcttattatgctaaaaaattgggcttgcccgttcatcagctcatctgtgcttcaaataaaaataatgtactgacagactttttcaaaacaggactttatgataaaaatcgtgaattctatgtaacaagttcaccttcaatggatattttggtctcttcaaatcttgaacgtttaatttttgaattaactgacgaaaatgataaagtaacctcagatttactgacagccctatcagtagaagggcattatcaaatttctaaagaaatgattactaaacttcagggatttgtggccgactgggcatcagaagatgaaatttcaaaagaaattcaagaaacttttgaaaatgaaaaatatgttctggaccctcatacagcagtagcaaattatgtctatcatcaaattcaacccaaagaaaaaacagttgtggtcagcacggcaagtccttataagtttccaaaagttgttttagaagggcttgaaaatgataaaacagagctgtcagtaaatagagacgattttgctgctgttaaatcacttgaaaaattgagtgggattccattaccaaaagcagtcatcggacttgaagaagcagaagttctacatcataccgttattccagccgctgaaatgcaaaaagaagtagaaaaatatcttggcttaaaatga

SEQ ID NO: 34898 - protein, 496 aa, Lactococcus lactis subsp. lactis Il1403
MVTFYQSTRDKSNKKTASQAILQGLAEDGGLFVPVDFPKVDLDFEKLKNASYQEIAELVLKAFFDDFSADEIKSMVTKAYGEKFDSPEIAPLKRLGNHYILELFHGETIAFKDMALSILPHLMTQAAKKNGVTNEIVILTATSGDTGKAAMAGFADVPQTKIIVFYPKGGVSHIQEQQMLTQKGENVHVVGIDGNFDQAQTAVKEMFNNKVLHDQLLKNNKQFSSANSMNIGRLIPQVAYYIYAYAQLVKTGQITDGEEINFSVPTGNFGNILAAYYAKKLGLPVHQLICASNKNNVLTDFFKTGLYDKNREFYVTSSPSMDILVSSNLERLIFELTDENDKVTSDLLTALSVEGHYQISKEMITKLQGFVADWASEDEISKEIQETFENEKYVLDPHTAVANYVYHQIQPKEKTVVVSTASPYKFPKVVLEGLENDKTELSVNRDDFAAVKSLEKLSGIPLPKAVIGLEEAEVLHHTVIPAAEMQKEVEKYLGLK

SEQ ID NO: 34899 - DNA, 1410 bp, Neisseria meningitidis MC58
  CDS (1)..(1410): transl_table=11
atgaaatacatcagcacgcgcggcgaaaccgcacacaaaccgttcagcgaagttttattgatggggcttgcccccgacggcggcctgatgctgccggaacattatccgcaaatcgggcgcgaaaccttggacaaatggcgcggtttagcttatcccgaattggcgtttgaaattatgcgcctgtttgttacggatattccggaggacgatttgcgcgacattctgaaccgtacttacacggaagcggcgttcggtactaaggaaatcacccccgtccgcacgctttcagacggcatcaaaatccaagccttgtccaacggcccgacgctggcgttcaaagatatggcaatgcagtttttgggcaatgcgtttgaatatgttttaaacaaagaaggcaaaaaactcaatatcttgggcgcgaccagcggcgatacgggttcggctgcggaatatgccttgcgcggcaaaaagggcgtgaacgtatttatgttgtcgcccgacggtaaaatgagcgcgttccaacgcgcgcaaatgtacagcctgcaagacgagaatatccacaatatcgccgtgaagggaatgtttgacgactgtcaggatattgtgaaggcggtgcagaacgatgccgcgttcaaggaaaaataccatatcggtacggtcaactcgatcaactggggacgcatcgtcgcgcaagtggtttattactttgcaggctatttcaacgccacttcaagcaatgacgaaaccgtcagcttctgcgtaccgagcggcaacttcggcaatgtttgcgcgggacacattgccaaacaaatgggcctgcctatccgccgcctgattgtcgcgaccaatgaaaacgatgtgttggacgagtttttcaaaaccggtgcataccgcccgcgcaacagcgcgcatacttatgtaacctccagcccgtctatggacatttccaaagcgtccaacttcgagcgtttcgtgttcgacctgatggatcgcgatcctgcggaaatcaatacgctgtgggcggaagtggctgcaggcaaaggctttgacctgcgatttgccttggacaaagtcggtggcaaatacggttttacctctggcaaatccacccacgccgaccgcctcgccaccatcaagcaggtttacgagcaagaccaagaactcatcgacccgcacactgccgacggcgtaaaagtcgcccgcgaagtgcgcgaagaaggtgaaatggtggtttgtttggaaaccgcgttggcggcgaaattcgatgcgaccatacgcgaagccgtcggcgatgccgccattccgcgccctgccgcgctggaaggtttggaaaacctgccgcagcgcgtgcaaaccgtgccgaacagtgcggatgcggtaaaaggcatcatcgaacaaacccttgcctga

SEQ ID NO: 34900 - protein, 469 aa, Neisseria meningitidis MC58
MKYISTRGETAHKPFSEVLLMGLAPDGGLMLPEHYPQIGRETLDKWRGLAYPELAFEIMRLFVTDIPEDDLRDILNRTYTEAAFGTKEITPVRTLSDGIKIQALSNGPTLAFKDMAMQFLGNAFEYVLNKEGKKLNILGATSGDTGSAAEYALRGKKGVNVFMLSPDGKMSAFQRAQMYSLQDENIHNIAVKGMFDDCQDIVKAVQNDAAFKEKYHIGTVNSINWGRIVAQVVYYFAGYFNATSSNDETVSFCVPSGNFGNVCAGHIAKQMGLPIRRLIVATNENDVLDEFFKTGAYRPRNSAHTYVTSSPSMDISKASNFERFVFDLMDRDPAEINTLWAEVAAGKGFDLRFALDKVGGKYGFTSGKSTHADRLATIKQVYEQDQELIDPHTADGVKVAREVREEGEMVVCLETALAAKFDATIREAVGDAAIPRPAALEGLENLPQRVQTVPNSADAVKGIIEQTLA

SEQ ID NO: 34901 - DNA, 1413 bp, Campylobacter jejuni subsp. jejuni NCTC 11168
  CDS (1)..(1413): transl_table=11
gtgaaattggtcgagagtagaaatgtaaataatgtatcaagttttaaggaagctttgattaacccaaacgctccagaaggagggctttactcacctttaaatttgcctatttttgaaggagaaaaatatgccaatttgtcttataaagattttgctttaaagcttatagaaagttttggttttggcgaagaagagctttttaaaaaggctttgaaaagttacgaaagctttgatgataaaaatacacctatttctttgcaaaaaatctctgaaaaaacctatattaacgagctttggcatgggcctacaagagcttttaaagatatggctttacagccttttggcgtgcttttaagcgaattttcaaaggataaaaatattttaattatctgtgctacaagcggcgatacagggcctgcaaccctaaaaagttttgaaaatgcaaaaaatgttaaagtagcttgtatgtatccaaaaggtggcacaagtggagttcaagagttgcaaatgcgagctttagataaggataacttgaaagtttttgccatagatgaggattttgacgcagcgcaacgcactttaaaagaattgcttttttcaaaagattttcaaaatgaaattaaagctttaaattatgagctttgcgcagctaattctgtaaattttgggcgtattttatttcagattatttatcattattatgcgagtttaaaactttttaatgagtttttagaagaagtacaaatcatcgttccaagtggaaattttggcaatgctttaggagctttttatgctaaaaaaatgggagctaaaatttcaaaaatcaaaatcgcttcaaacgcaaataatattttgagtgaattttttaatcaaggcgtttatgatttgcgtgaaaaaagtcttaagaagactatttctccagctatggatatacttatttcatctaatatcgaaagacttttgtttgcgaaatttaaagataaaagaactaaagaactgatgaatttgttaaaaaatgaaagatattttaaacttgaaaaagaagaattacaaagtttgcaagaagattttgaggcggatttttgcaccgatgaagaatgtatgcaatttatcaaacaaagcaagattttaatcgatccgcataccgcaacttgttttaaaatgcttgatcctttaaaacctagcattatcacttctacagcagaatggacaaaatttactccaagtatgataaaagctttatatgatagggattctaagaatgaaaaagaagatttaaaatttatagctaaagagtttaatgtccaagttaaagatgaaattttggctttatttgatttgaaaaatagcgatgaaaaggtatttgaagccagaaatataaaaaaagaaattttagattggatgcaaaaatga

SEQ ID NO: 34902 - protein, 470 aa, Campylobacter jejuni subsp. jejuni NCTC 11168
MKLVESRNVNNVSSFKEALINPNAPEGGLYSPLNLPIFEGEKYANLSYKDFALKLIESFGFGEEELFKKALKSYESFDDKNTPISLQKISEKTYINELWHGPTRAFKDMALQPFGVLLSEFSKDKNILIICATSGDTGPATLKSFENAKNVKVACMYPKGGTSGVQELQMRALDKDNLKVFAIDEDFDAAQRTLKELLFSKDFQNEIKALNYELCAANSVNFGRILFQIIYHYYASLKLFNEFLEEVQIIVPSGNFGNALGAFYAKKMGAKISKIKIASNANNILSEFFNQGVYDLREKSLKKTISPAMDILISSNIERLLFAKFKDKRTKELMNLLKNERYFKLEKEELQSLQEDFEADFCTDEECMQFIKQSKILIDPHTATCFKMLDPLKPSIITSTAEWTKFTPSMIKALYDRDSKNEKEDLKFIAKEFNVQVKDEILALFDLKNSDEKVFEARNIKKEILDWMQK

SEQ ID NO: 34903 - DNA, 1410 bp, Neisseria meningitidis Z2491
  CDS (1)..(1410): transl_table=11
atgaaatacatcagcacgcgcggcgaaaccgcacacaaaccgttcagcgaagttttattgatggggcttgcacccgacggcggcctgatgctgccggaacattatccgcaaatcgggcgggaagccttggacaaatggcgcggtttggcttatcccgaattggcgtttgaaattatgcgcctgttcgttaccgacattccggaggacgatttgcgcgatattctgaaccgtacttacacggaagcggcgttcggtactaaggaaatcacccccgtccgcacgctttcagacggcatcaaaatccaagccttgtccaacggcccgacgctggcgttcaaagatatggcgatgcagtttttgggcaatgcgtttgaatatgttttaaacaaagaaggcaaaaaactcaatatcttgggcgcaaccagcggcgatacgggttcggctgcggaatatgccttgcgcggcaaaaaaggtgtgaatgtatttatgctgtcgcccgatggcaaaatgagcgcgttccaacgtgcgcagatgtacagcctgcaagacgggaatatccacaatatcgccgtgaagggtatgtttgacgactgtcaggatattgtgaaggcggtgcaaaacgatgccgcgttcaaggaaaaataccatatcggtacggtcaattcgattaactggggacgcatcgtcgcgcaagtggtttattactttgccggctatttcaaagcgacgcaaagcaatgacgagcaagtcagcttttgcgtgccgagcggcaacttcggcaacgtttgcgcgggacacattgccaaacaaatgggcctgcctgtccgccgcctgattgtcgcgaccaatgaaaacgatgtgttggacgagtttttcaaaaccggcgcgtaccgcccgcgcaacagcgcgcatacttatgttacctccagcccgtcgatggacatttccaaagcgtccaacttcgagcgtttcgtgttcgacctgatggatcgcgatcctcaggaaatcaatacgctttgggcggaagtggcggcgggtaagggctttaacctgcggtttgccttggacaaagttggcggcaaatacggctttacctccggcaaatctacccacgccgaccgcctcgccaccatcagacaggtttacgagcaagaccaagaactcatcgacccgcacactgccgacggcgtaaaagtcgcccgcgaagtgcgtgaagaaagggaaacggtggtttgtttggaaaccgcgttggcggcgaaattcgatgcgaccatacgcgaagccgtcggcgatgtcgccattccgcgtcccgccgcgctggaaggtttggaaaacctgccgcaacgcgtgcaaaccgtgccgaacagtgcggatgcggtaaaaggcatcatcgaacaaacccttgcctga

SEQ ID NO: 34904 - protein, 469 aa, Neisseria meningitidis Z2491
MKYISTRGETAHKPFSEVLLMGLAPDGGLMLPEHYPQIGREALDKWRGLAYPELAFEIMRLFVTDIPEDDLRDILNRTYTEAAFGTKEITPVRTLSDGIKIQALSNGPTLAFKDMAMQFLGNAFEYVLNKEGKKLNILGATSGDTGSAAEYALRGKKGVNVFMLSPDGKMSAFQRAQMYSLQDGNIHNIAVKGMFDDCQDIVKAVQNDAAFKEKYHIGTVNSINWGRIVAQVVYYFAGYFKATQSNDEQVSFCVPSGNFGNVCAGHIAKQMGLPVRRLIVATNENDVLDEFFKTGAYRPRNSAHTYVTSSPSMDISKASNFERFVFDLMDRDPQEINTLWAEVAAGKGFNLRFALDKVGGKYGFTSGKSTHADRLATIRQVYEQDQELIDPHTADGVKVAREVREERETVVCLETALAAKFDATIREAVGDVAIPRPAALEGLENLPQRVQTVPNSADAVKGIIEQTLA

SEQ ID NO: 34905 - DNA, 1413 bp, Deinococcus radiodurans R1
  CDS (1)..(1413): transl_table=11
atgaagtacgtctccacccgcagccagaccgacctcggcagcttttgcgatgtgctgctctccggcctcgcgcccgacggggggctggcgatgcccgctttcatcccgaccttcagcgcggcggagctggaggccctgcgcggcctgagctaccccgacctcgcctacgcggtgatgcggcccttcatctccgacatccccgaggccgacctgcgggcgctgctgcacgcgacctaccgcgccgaggtgttcggcagcccggacattacgccgctgacacccctgggcgagtcgggactttacctgctcgaactctccaacggccccagcctcgccttcaaggacatggcgatgcagtttatggggcacgccttcgagtatgtgctggaaaagcgcgaccagcgcgtgaatatcctcggcgcgacgtcgggcgacaccggcagcgccgccgagtacgcgatgctcggcaaggcgcgggtcaacgtcttcatgctctcgccgcagggccgcatgagcgcctttcagcaggcgcagatgtacagcctgaatgagccaaatattttcaacatcgccatcgagggcgtgttcgacgactgccaagacctcgtgaaagaggtgaacgccgacgcggagttcaaggcgaagtaccacatcggcgccgtcaactcgatcaactggggccgggtgctcgcgcaggcggtgtactacttccgggcgtactttgcgctgggactgcctgcggatgccgaggccgatttctcggtgccgagcggcaatttcggcaacgtgttcgccggctacctcgccaaacggatgggcctgccggtcggccagctcatcgttgccagcaatgaaaacgacgtgctgcacgagtttttcaccaccggcagctatcacgtccgcccggcagcgcgggtggcggtcacgtcgagccccagcatggacatcggcaaggcgagcaacttcgagcgctacctctacctgattgccggggccgacgcggtgcagacggcgggctggtgggacgaagtcggcgcgggccgcccggtggaactgcgcgacacggcgcactggccggagattcagagcagcggctttcgcgcgggcaaaagcacccacgccgaccggctggcgaccatccggcgggtggacgagcagtttggccgcctgatcgacccccacaccgccgacggcgtgctggccggcgaggggttccggcgcagcggcgtgccgatggtctgtctggaaaccgccctgcccgctaaattcgaggaaacggtgcgcgaggcggtgggccgcgtgcccgagcgccccacacgctttgtcggcatcgaaagcaaggagcgcttctgcgacgtgctgcccaacgacgcggcggcgctcaaggcatatctggcggctaaactcggctga

SEQ ID NO: 34906 - protein, 470 aa, Deinococcus radiodurans R1
MKYVSTRSQTDLGSFCDVLLSGLAPDGGLAMPAFIPTFSAAELEALRGLSYPDLAYAVMRPFISDIPEADLRALLHATYRAEVFGSPDITPLTPLGESGLYLLELSNGPSLAFKDMAMQFMGHAFEYVLEKRDQRVNILGATSGDTGSAAEYAMLGKARVNVFMLSPQGRMSAFQQAQMYSLNEPNIFNIAIEGVFDDCQDLVKEVNADAEFKAKYHIGAVNSINWGRVLAQAVYYFRAYFALGLPADAEADFSVPSGNFGNVFAGYLAKRMGLPVGQLIVASNENDVLHEFFTTGSYHVRPAARVAVTSSPSMDIGKASNFERYLYLIAGADAVQTAGWWDEVGAGRPVELRDTAHWPEIQSSGFRAGKSTHADRLATIRRVDEQFGRLIDPHTADGVLAGEGFRRSGVPMVCLETALPAKFEETVREAVGRVPERPTRFVGIESKERFCDVLPNDAAALKAYLAAKLG

SEQ ID NO: 34907 - DNA, 1293 bp, Xylella fastidiosa 9a5c
  CDS (1)..(1293): transl_table=11
atgaacttccattccacccgcaccacagcgccggcggccaccctcagccaggcaatcgctgccggcttagcaccggatggcggcttatatgtccccgagtgcttgccatcccttggtgacttggaccacagcgcagatttcatcaacaccgccaccgcactactgacccccttctttgcgggcgatccgctggaagtgcatgtaccgtcgatctgtgccgaagcgttggatctccccgcaccactgctgcccttggccacccctgaagattatgtccttgagttatttcacggccccaccgctgccttcaaagattttggcgcacgttttctggccgcctgcctgacccggctacgacgtgatgccgaacgtcccttgacgattctggtggcgacctccggtgatacgggtgctgcggtggcggcggcatttcatcggcaacccggattgcgtgtcgtcgtcctgtacccggatggccgtgtatcgccacgtcaggcccaccaattgggttgttttggcgacaacgtacacaccctgcgtgtggctggcgtgttcgatgactgccaagccatggtcaagcaggccctgaacgataccagcctccaaacagccgtgccgctgagttcggccaacagcatcagcctgggccgcttgctgccgcagatgagctactacgcccatgcagccttgacccaccgtgccagcacgggccgccctctgaacctcattgtgcccaccggcaacctcggcaatgccttggccgcgattctggcgcgcgccctgggagtgcccttaggacagattgtgttggcgacaaacgccaaccacgtactccctgattacttttccggagcacattaccgcccccagcccagtgtggcgacgttggcgaatgcaatggacgttggagcgcccagtaattttgaacgattgcgctggttgtatcgcggcgatgacgccgcattgcgtgccgcctttaccgcctattccgtcgacgacatcgcgatccgccagaccatcaccgcacggcatcgtcgctacgacgagatattttgtccccataccgctacggcggtgtttgtgcttgagcacttgcgtacccagggcgtcgctgggaattgggccgttgtggcaaccgcccatccagccaaatttgagcaggtggtagaaccgttgatcggtaccaccgtgcccgtgccggcggccctggatagcctcctgcaacgtcccgcgcgcgacgaaccgctcgccccagagtacccggcattgcggcacatgctgctggccacctaa

SEQ ID NO: 34908 - protein, 430 aa, Xylella fastidiosa 9a5c
MNFHSTRTTAPAATLSQAIAAGLAPDGGLYVPECLPSLGDLDHSADFINTATALLTPFFAGDPLEVHVPSICAEALDLPAPLLPLATPEDYVLELFHGPTAAFKDFGARFLAACLTRLRRDAERPLTILVATSGDTGAAVAAAFHRQPGLRVVVLYPDGRVSPRQAHQLGCFGDNVHTLRVAGVFDDCQAMVKQALNDTSLQTAVPLSSANSISLGRLLPQMSYYAHAALTHRASTGRPLNLIVPTGNLGNALAAILARALGVPLGQIVLATNANHVLPDYFSGAHYRPQPSVATLANAMDVGAPSNFERLRWLYRGDDAALRAAFTAYSVDDIAIRQTITARHRRYDEIFCPHTATAVFVLEHLRTQGVAGNWAVVATAHPAKFEQVVEPLIGTTVPVPAALDSLLQRPARDEPLAPEYPALRHMLLAT

SEQ ID NO: 34909 - DNA, 1485 bp, Streptococcus pneumoniae TIGR4
  CDS (1)..(1485): transl_table=11
atgacattagtttatcaatcaacgcgtgatgccaacaatacagtaactgccagccaagcaattttgcaaggtttggcgacggacggcggtttgtttacaccggatacttatccaaaggtagatttgaactttgacaaattgaaagatgcttcttaccaggaagttgctaagctagttttgtcagcatttttagatgactttacagttgaggagttggactactgtatcaacaatgcctacgatagcaaatttgatactccagctattgcaccattagtgaaattagatgggcaatacaatttggaacttttccatggttcaacgattgcctttaaggatatggccttgtctattttgccatactttatgacgactgctgctaagaaacatggtttggagaacaagattgttatcttgacagcgacatctggtgacacggggaaagctgctatggcggggtttgcgaatgtgcctggtactgagattatcgtcttttatccaaaggatggtgtcagcaagattcaagagttacaaatgaccactcagactggcgacaatactcatgttattgctattgatggtaactttgacgatgcgcaaacaaatgtgaagcacatgtttaacgacgtggctcttcgtgaaaaattgactaccaacaagttgcaattttcatcagctaactctatgaacattggtcgtctggtgccacaaattgtttattatgtttatgcttacgctcaattggttaagactggtgaaattgtagctggtgaaaaggttaacttcacagtaccaacaggaaactttggaaatatcttggctgccttttatgccaaacaaattggtttgccagttggtaaattaatctgtgcttcaaatgacaacaatgttttgacagacttctttaaaacacgtgtctatgacaaaaaacgtgagtttaaggtaacaaccagcccatctatggatatcttggtatcttcaaacttggagcgcttgattttccatcttttgggaaataatgctgaaaagacaactgaacttatgaatgccttgaacacgcaaggacaatataagttgacagactttgatgcagagattttggacctctttgcagctgaatatgcgactgaggaagaaacggcagcagagatcaagcgtgtttgtgagttagattcttatatcgaggaccctcatacagctgttgcttcagcagtttataaaaaataccaatcggccactggagatgtaactaagacagtgattgcttcaacagctagtccatacaagttcccagtagttgcagtagaagctgtaactggaaaagcaggtttaacagactttgaagccttggctcaattacatgaaatctcaggcgttgcagtgccaccagcagttgatgggcttgaaatagctccaattcgtcacaagacaacagtggcagctgctgacatgcaagcagcggttgaggcttatttaggactttaa

SEQ ID NO: 34910 - protein, 494 aa, Streptococcus pneumoniae TIGR4
MTLVYQSTRDANNTVTASQAILQGLATDGGLFTPDTYPKVDLNFDKLKDASYQEVAKLVLSAFLDDFTVEELDYCINNAYDSKFDTPAIAPLVKLDGQYNLELFHGSTIAFKDMALSILPYFMTTAAKKHGLENKIVILTATSGDTGKAAMAGFANVPGTEIIVFYPKDGVSKIQELQMTTQTGDNTHVIAIDGNFDDAQTNVKHMFNDVALREKLTTNKLQFSSANSMNIGRLVPQIVYYVYAYAQLVKTGEIVAGEKVNFTVPTGNFGNILAAFYAKQIGLPVGKLICASNDNNVLTDFFKTRVYDKKREFKVTTSPSMDILVSSNLERLIFHLLGNNAEKTTELMNALNTQGQYKLTDFDAEILDLFAAEYATEEETAAEIKRVCELDSYIEDPHTAVASAVYKKYQSATGDVTKTVIASTASPYKFPVVAVEAVTGKAGLTDFEALAQLHEISGVAVPPAVDGLEIAPIRHKTTVAAADMQAAVEAYLGL

SEQ ID NO: 34911 - DNA, 1491 bp, Clostridium acetobutylicum ATCC 824
  CDS (1)..(1491): transl_table=11
atgaatcacatatattataaaagtaccagaaataatgatgttagtattttagcgtctagagctattttaaagggtatatctgatgatggtggcttgtatgtaccagagagagtaccagagcttgattttgatattaaagatattgttaatatggattataaagaaatagcttataaagttatgaagactttttttaccgattttactgaagaggagctcaagtactgcattgaaaatgcctatgacagcaaatttgatacagaagaaatagctcctataaaaaaggcaggagatacatattttttagaattatatcatggtcctaccttagcatttaaggatatggcactttcaattttaccatatcttttaaaaactgcttcaaagaaaaatggaattcaggataaaatagttattttaacagcaacatctggcgataccggaaaagcagcattagaaggttttaaggatgttgaaggtaccgagataatagtgtttttcccgaatgatggagtgagtgaagttcaaagacttcaaatggtaacacagaaaggaaaaaatacacatgttgtggctataagaggaaactttgatgatgctcaaagcggagttaaaaaaatatttacggacaaagaatttatacaggagcttaaagagaataattgtgtattttcatctgcaaactcaattaacataggaagattagttcctcagatagtatattatttttatgcttattctaagatgtgctcaaaaggtgaaattaattttggagaaaagataaattttgttgttcctacaggcaattttggaaatatactagcagcatattttgctaagagtatgggagtgcctattaataagctaatatgtgcttcaaatgacaataaagttctttatgatttctttgaaaatggaacttatgatagaaatagagagtttgtaactacaatatcaccttccatggatattttaatttcaagtaaccttgaaagacttatttatcttgtatgcgatagagattcaagcaaggtggctgattttatgagagagcttagtgaaggcggaaaatataatataacagagaatatgaagaaaaaacttaaggatttttatgctggatatgctacagaggaagaaactaaaaaggctatagaaaaaatgtataaagaaaataaatatcttatagacactcatacggctgtagcttatagtgtgtatgaaaaatatttaaagaatacgaaggataaagcaaaaactgttatagcgtcaactgcaagtccatacaaatttacaaatgcagttatgacctctcttgataataaatatgcttcttacgacgattttgaactcatgaagaagatgagtgaggttataaataaggatataccaagtggtgttaaaggacttaatgaaagaaaagttattcataaagatatttgtagtaaagatgaaatgaaaaaaatagttagaagttttttaggtaagtag

SEQ ID NO: 34912 - protein, 496 aa, Clostridium acetobutylicum ATCC 824
MNHIYYKSTRNNDVSILASRAILKGISDDGGLYVPERVPELDFDIKDIVNMDYKEIAYKVMKTFFTDFTEEELKYCIENAYDSKFDTEEIAPIKKAGDTYFLELYHGPTLAFKDMALSILPYLLKTASKKNGIQDKIVILTATSGDTGKAALEGFKDVEGTEIIVFFPNDGVSEVQRLQMVTQKGKNTHVVAIRGNFDDAQSGVKKIFTDKEFIQELKENNCVFSSANSINIGRLVPQIVYYFYAYSKMCSKGEINFGEKINFVVPTGNFGNILAAYFAKSMGVPINKLICASNDNKVLYDFFENGTYDRNREFVTTISPSMDILISSNLERLIYLVCDRDSSKVADFMRELSEGGKYNITENMKKKLKDFYAGYATEEETKKAIEKMYKENKYLIDTHTAVAYSVYEKYLKNTKDKAKTVIASTASPYKFTNAVMTSLDNKYASYDDFELMKKMSEVINKDIPSGVKGLNERKVIHKDICSKDEMKKIVRSFLGK

SEQ ID NO: 34913 - DNA, 1401 bp, Sinorhizobium meliloti 1021
  CDS (1)..(1401): transl_table=11
atggtgaagtatatttcgacacggggagaagcggcctctctcggcttttgcgatgctcttctggcgggacttgcccgcgacggcgggctttacctgccgaaggaatggccggcactctcgaagaaggagatccgggcgctgcgcggcaaatcctatcaggagatcgccttcaccgttctcgaacccttcaccaatggcgagatcccggcggccaagttccgcgagatgatcgacgaggcctatgccactttccgtcatccggccgtagcacccctggtccagaccggaccgaacgctttcgtgatggagctctttcacggttcgacgctcgccttcaaggacgtcgccatgcagttgctcgcccggctgatggactatgttcttgccgaacggggcgagcgggcgacgatcgtgggagcgacatcaggcgataccggcggtgccgcgatcgacgccttcgccggccgcgaccgcaccgacatcttcatcctctttccgcagggcaaagtgtcgccggtgcagcaaagacagatgaccacgtccacggcatcgaacgtgcacgcggttgccgtcaaaggcaatttcgacgactgccagaacctggtcaaagccatgttcaacgaccaggccttccgcgaccgcgtgaagctttccggcgtcaattcgatcaactgggcgcgcatcatggcccagatcgtctactatttcacgacggcggtcgctctcggcgcgcccgaccggaagatctccttcaccgtgcctaccggcaatttcggcgatattttcgcaggctacgtcgccaagcgcatgggtctgccgatcgacaagctgatcatcgccaccaacgaaaacgacattctggcgcgcacgctgaagaacggccgctacgagatgcgcgacgtcaaggcgacgacctcgccttcgatggacatccagatctcgtcgaacttcgaaaggctcatcttcgaggcgaacgagcgcgatccggcggaagtccgcgcggccatggcgagcctcaggcaatccggctcgttcacgatcggcgacgcagcgctgaaaaaaatccgcaaggaatttcgcgccggccgcgcctcggagaaagatgtggcgaaaacgatccgcaagaccttcgacgagaccggctatctccttgatccgcatacggcaatcggcgttttcgtggcaaccaagcacgagaagaactccgccccgatggtcacccttgcgactgcccatccggcaaaatttcccgccgcagtaaaatcggcaagtggtattgaccccacgcttccgacgtggcttgctgatctcatgactagggcggagcgtttcgacatcctggatccggagctcaagagcgtcgaaaccttcatcggcgagcgtacccgcgttcgggaatag

SEQ ID NO: 34914 - protein, 466 aa, Sinorhizobium meliloti 1021
MVKYISTRGEAASLGFCDALLAGLARDGGLYLPKEWPALSKKEIRALRGKSYQEIAFTVLEPFTNGEIPAAKFREMIDEAYATFRHPAVAPLVQTGPNAFVMELFHGSTLAFKDVAMQLLARLMDYVLAERGERATIVGATSGDTGGAAIDAFAGRDRTDIFILFPQGKVSPVQQRQMTTSTASNVHAVAVKGNFDDCQNLVKAMFNDQAFRDRVKLSGVNSINWARIMAQIVYYFTTAVALGAPDRKISFTVPTGNFGDIFAGYVAKRMGLPIDKLIIATNENDILARTLKNGRYEMRDVKATTSPSMDIQISSNFERLIFEANERDPAEVRAAMASLRQSGSFTIGDAALKKIRKEFRAGRASEKDVAKTIRKTFDETGYLLDPHTAIGVFVATKHEKNSAPMVTLATAHPAKFPAAVKSASGIDPTLPTWLADLMTRAERFDILDPELKSVETFIGERTRVRE

SEQ ID NO: 34915 - DNA, 1398 bp, Caulobacter crescentus CB15
  CDS (1)..(1398): transl_table=11
atgcgttacgtttcgacccgcggccagtccgcccccatcggcttcctcgacgccgtcctggccggcctggcccccgacggtggcctgtacgtgcccgccgaatggcccagcttcacggccaagcagatcgccgccttcgccggcaagccctatgccgaggtcgccgccgccgtggtcggcaagttcgtgggcgacgacattcccgccgacgacttgctccagatgtgcgaggaggcctacgccaccttcgcccacaccgctgtgacgccggtaaagcaactgactgccaaccgctatctgctggaactgttccacggaccgaccctggcgttcaaagatgttgcgatgcagctcttgggccgcctctacgactacgtgctcgagcgccagtcgcggaagatgaccatcatctgcgccacttcgggcgataccggcggcgcggccgtcgaagcgttccggggccgcaagaacgcccgcatcgtcgcgctcttccccgagggccgcatcagcgaggtgcagcgccggttcatgaccaccgcgaccgacgccaatgtcgcctgcgtctcggtgctgggttcgttcgacgactgccaggccatcgtcaagcaggccttccaggacgaccagttccgccacgcggtggacctgtcgggcgtcaactcgatcaactgggcgcggatcgcggcccagagcgtctattacttcaccgccgccgtggccctgggcgccccggcgcgcgaagtggccttcgtggtgccgaccggcaatttcggcgacgcctacgccgccttcgtggccaagacgctgggcctgccgatccattcggtgaccgccgccaccaacagcaacgacatcctggcccgcgccttcgaggacggccgctattcgcgcggcgcggtggccgccacccagagcccggccatggacatccaggtcgcgtcgaacttcgagcgtctctatttcgaggccgtgcgtcgcgacggggtcgagaccggccgcgccttccgcgcgttcgccgacaccggcctgctggacatcccgcccgccgcccatgcctggatgcgcgagctgttccgcggcgcgtcagtcagcgaggccgacaccgccaagaccatgctctcgacgctgaacgagaccggcgaggtcgtcgatccgcacacggctgtcggcctggccgccgcccagggcgtccggatcgatccggccatcccggtcgtggtgctgtcgaccgcccatccggccaagttcccagaggcggttcaggccgccacgggcctgctgccctcgaccccgcgcgctacgcccgacctctccaagaagccggaaaagttcgagcgtctgcccgcggatggatcgtcggtgaaggcctttgtgcggaccttcgcggcgaatagttga

SEQ ID NO: 34916 - protein, 465 aa, Caulobacter crescentus CB15
MRYVSTRGQSAPIGFLDAVLAGLAPDGGLYVPAEWPSFTAKQIAAFAGKPYAEVAAAVVGKFVGDDIPADDLLQMCEEAYATFAHTAVTPVKQLTANRYLLELFHGPTLAFKDVAMQLLGRLYDYVLERQSRKMTIICATSGDTGGAAVEAFRGRKNARIVALFPEGRISEVQRRFMTTATDANVACVSVLGSFDDCQAIVKQAFQDDQFRHAVDLSGVNSINWARIAAQSVYYFTAAVALGAPAREVAFVVPTGNFGDAYAAFVAKTLGLPIHSVTAATNSNDILARAFEDGRYSRGAVAATQSPAMDIQVASNFERLYFEAVRRDGVETGRAFRAFADTGLLDIPPAAHAWMRELFRGASVSEADTAKTMLSTLNETGEVVDPHTAVGLAAAQGVRIDPAIPVVVLSTAHPAKFPEAVQAATGLLPSTPRATPDLSKKPEKFERLPADGSSVKAFVRTFAANS

SEQ ID NO: 34917 - DNA, 1455 bp, Sinorhizobium meliloti 1021
  CDS (1)..(1455): transl_table=11
atgatcaagtatgttagcacgaccgggggaatagagccggtaggcttcgacgaagccgtgctgcagggctttgcagccgatgggggcctgttcgtacccgatcgaattccggtgatcgaccaggagcagctgcaggcattttcaacccttagctttcaagacctcgccttcgaactggtatcgctctacatcgatgcatcgatcattccgcggcaggatctcagacgtttgatcgacaacagctaccgcgaattccagcgccccgacatcgtcaatctcgtgcctatccgcggcaatcgcgacacatacgtactagagcttttccatggtccgacccagtccttcaaggacatggcaatgggcttcctgatgcaggtggtcgactatcttctcgggcagcgtcgggaaagactgaacatcgtgcttgcgacaaccggtgatacaggccccgccgccgcatgggcggccgcaggcaaacagcgcatcgattgctggccgctttacccgagaggaatgatttcccgggagcaggagcgccagatgaccacattgagggcggataatgtgcatcccgtcggggtcgagaactgcccggacggcggggacgacctcgacctcgtggtcgcagagttgttctccgacgaaaaactcaagcgcaccttggcgctctccagcgtcaattccatcaactggtgccgcgtcatgacgcagacggtgcactatttctactcctactaccgggcagtcgagcgcgtcggcgatcccgtcgtcttttccgtaccgtccggtgcgttcggtaatttgttcgccggctacctcgcgcgctccatgggcttgccggtcgcccgtttcgtctgcgccaacaatgtcaacaacgcgctgcataccgcgttttcgcggggggtgctgccccgtcacgatctcgttcaaacgccttcgtccgccattgatatcgtggccccttacaacttctggcggctcctatatttcgcgacgaacagagacaccgcgcgtatccgccagtggatgaaggacttcgccgcgcgccgggaggtggtgctcgacgtcgaaacgacgaagaccatccaagggggcttcatttccgcttcgatatctgatgaggagacactggccaccgtccgcagtgtctacgaagcggaaggccattacctcattgacccgcacacggctgttgccgttgcggcggttgaagcggtcagggacagcctgcccgcggctgccgcgatcgtttgctttgcaacggcgcatccggccaagttccccgatgtcatcaaacgcgcccttgacgtggaggaactgccggcagcagggcaccatccggtaatcgacgaggctcgcgatgcctgtgagcacctgcgtatatgccagttggagaacctcagatcgaatctgattggtgagatgacgcggcaggtcgcacgcagaagaggttga

SEQ ID NO: 34918 - protein, 484 aa, Sinorhizobium meliloti 1021
MIKYVSTTGGIEPVGFDEAVLQGFAADGGLFVPDRIPVIDQEQLQAFSTLSFQDLAFELVSLYIDASIIPRQDLRRLIDNSYREFQRPDIVNLVPIRGNRDTYVLELFHGPTQSFKDMAMGFLMQVVDYLLGQRRERLNIVLATTGDTGPAAAWAAAGKQRIDCWPLYPRGMISREQERQMTTLRADNVHPVGVENCPDGGDDLDLVVAELFSDEKLKRTLALSSVNSINWCRVMTQTVHYFYSYYRAVERVGDPVVFSVPSGAFGNLFAGYLARSMGLPVARFVCANNVNNALHTAFSRGVLPRHDLVQTPSSAIDIVAPYNFWRLLYFATNRDTARIRQWMKDFAARREVVLDVETTKTIQGGFISASISDEETLATVRSVYEAEGHYLIDPHTAVAVAAVEAVRDSLPAAAAIVCFATAHPAKFPDVIKRALDVEELPAAGHHPVIDEARDACEHLRICQLENLRSNLIGEMTRQVARRRG

SEQ ID NO: 34919 - DNA, 1287 bp, Salmonella typhimurium LT2
  CDS (1)..(1287): transl_table=11
atgaaactctataatctgaaagaccataatgagcaggtcagctttgcgcaggccgtcacgcaaggactgggcaaacagcagggacttttttttccgcacgatctgccggagtttagcctgacggaaattgatgagatgctcaaccaggactttgtcagccgtagcgcaaagatcctctcggcatttattggcgatgaaataccgcagcaaattctggaagagcgcgtccgcgcggcgtttgcgttcccggcaccggtagcgcaggtagaaagcgatgtcggctgcctggagctgttccatggtccgacgctggcctttaaagacttcggcgggcgttttatggcgcaaatgctgacgcatatcagcggcgacaaaccggtgacgattctgactgcaacgtcaggcgataccggcgcggcggtggctcacgcgttctatggcctggaaaatgtgcgggtcgtcattctctacccgcgcggtaagatcagtccgttgcaggaaaaactgttctgtacgctgggcggcaacattgaaaccgtggcgatcgacggcgatttcgacgcgtgccaggcgctggtgaaacaggcatttgatgacgaagaactgaaaacggcgctggggctgaattcggctaattcgattaatatcagccgcctgttggcgcaaatttgctactactttgaagccgtggcgcaactgccgcagggggcgcgtaaccaactggtgatctccgtccccagcggcaactttggcgatttgacggcagggctgctggcgaagtcgttaggcctaccggtgaaacgttttatcgccgccaccaacgtcaacgacacggtgccgcgttttctgcatgacggaaagtgggcgccgaaagcgacgcaggcgaccctgtcgaatgcgatggatgtcagccagccgaataactggccgcgcgtggaggagctattccgccgtaaaatctggcgcctgactgagctgggctatgcggcggtggatgatactacgacacagcagacgatgcgcgagctgaaagcgaaaggttatatctcggaacctcatgcggcggtagcgtatcgggcattacgcgaccagttaaaccctggcgagtatggcttgtttctcggaacggcgcatccggcgaagtttaaagagagcgtggagtccattctgggagaaacgctggccttgcctgaagcgctcgccgaacgcgccgacctgccgctgctttcacatcatctgcctgcggattttgccgccctgcgtaagctgatgatgacccgccaataa

SEQ ID NO: 34920 - protein, 428 aa, Salmonella typhimurium LT2
MKLYNLKDHNEQVSFAQAVTQGLGKQQGLFFPHDLPEFSLTEIDEMLNQDFVSRSAKILSAFIGDEIPQQILEERVRAAFAFPAPVAQVESDVGCLELFHGPTLAFKDFGGRFMAQMLTHISGDKPVTILTATSGDTGAAVAHAFYGLENVRVVILYPRGKISPLQEKLFCTLGGNIETVAIDGDFDACQALVKQAFDDEELKTALGLNSANSINISRLLAQICYYFEAVAQLPQGARNQLVISVPSGNFGDLTAGLLAKSLGLPVKRFIAATNVNDTVPRFLHDGKWAPKATQATLSNAMDVSQPNNWPRVEELFRRKIWRLTELGYAAVDDTTTQQTMRELKAKGYISEPHAAVAYRALRDQLNPGEYGLFLGTAHPAKFKESVESILGETLALPEALAERADLPLLSHHLPADFAALRKLMMTRQ

SEQ ID NO: 34921 - DNA, 1446 bp, Ralstonia solanacearum GMI1000
  CDS (1)..(1446): transl_table=11
atgcaataccgttccacgcgcggccacgccgagccgcagagcttctcccgcatcctgctgggcggcctggcgccggacggcggcctgtacctgcccgagcagtacccgcaagtcagcgccgaagagctgacgcgttggcgcgacctgccgtatgcggacctcgccttcgagatcctgcgcaagttcgccaccgacatccccgaggatgacctgcgcgcgctgacccgccgcacctacacgcccgaggtctactgcaacgcgcgcaacggcgacaacaccgccgacatcacgccgctgcaccgcctgggcgaggaggccggcacgtcgctgtcgctgctgtgcctgtcgaacggcccgacgctggccttcaaggacatggcgatgcagctgctgggcaacctgttcgaatacgcgctcgaccgcgagcacgccgagttgaacatcctgggcgcgacctccggcgacaccggcagcgcggccgaatacgccatgcgcggcaagcgcggcgtgcgcgtgttcatgctgagcccgcaccgcaagatgagcgcgttccagaccgcgcagatgttcagcctgcaggacaagaacatcttcaacatcgccatcgaaggcgtgttcgatgacgcacaggacatcgtcaaggcggtgtcgaatgatctggaatacaaggcccgccagaagatcggcacggtcaattccatcaactgggcgcgtgtcgtggcccaagtcgtctactacttcaagggctacctgctggcggctccgaagatcggcgacaaggtgtcgttctgcgtgccgtcgggcaacttcggcaacgtctgcgccggtcacattgcgcgcatgatgggcctgccgatcgacaagctcgtcgttgccaccaacgagaacgacgtgctcgacgagttcttccgcaccggtacttaccgcgtgcgttcggccgcgcagacgtaccacacgtccagcccgagcatggatatcagcaaggcctcgaacttcgagcgcttcgtgttcgatctgctcggccgcgatccggcgcgcctcgcgcagctgttccgcgacgtggacgagaaaggcggtttctcgatgacgggcaagccggagttcgaccgcatcgccgagttcggtttcgtctcgggccgcagcacgcacgaagatcgcgtcaacacgatccgcgatgtgttcgtccgctacggcacgatggtcgacacccacaccgccgacggcgtgaaggtggcgcgcgaaaacctggtgcccggtgtgccgatggtggtgctggagacggcgctgccggccaagttcggtgacaccatccgcgaagcgctggaccgcgagccggagcgtccggccggttacgctgacatcgaatcgctgccgcagcggttcgaagtcatgcctgccgatgccgatcgcatcaagggctacatcgcccagcacaccggtctgtaa

SEQ ID NO: 34922 - protein, 481 aa, Ralstonia solanacearum GMI1000
MQYRSTRGHAEPQSFSRILLGGLAPDGGLYLPEQYPQVSAEELTRWRDLPYADLAFEILRKFATDIPEDDLRALTRRTYTPEVYCNARNGDNTADITPLHRLGEEAGTSLSLLCLSNGPTLAFKDMAMQLLGNLFEYALDREHAELNILGATSGDTGSAAEYAMRGKRGVRVFMLSPHRKMSAFQTAQMFSLQDKNIFNIAIEGVFDDAQDIVKAVSNDLEYKARQKIGTVNSINWARVVAQVVYYFKGYLLAAPKIGDKVSFCVPSGNFGNVCAGHIARMMGLPIDKLVVATNENDVLDEFFRTGTYRVRSAAQTYHTSSPSMDISKASNFERFVFDLLGRDPARLAQLFRDVDEKGGFSMTGKPEFDRIAEFGFVSGRSTHEDRVNTIRDVFVRYGTMVDTHTADGVKVARENLVPGVPMVVLETALPAKFGDTIREALDREPERPAGYADIESLPQRFEVMPADADRIKGYIAQHTGL

SEQ ID NO: 34923 - DNA, 1572 bp, Agrobacterium tumefaciens str. C58
  CDS (1)..(1572): transl_table=11
ttggcgatggtctatagcagcgacgccggaaaaaatcgattggcatgttcggttttgcttgaattttcaaaaaagcccttcattacctcgccaatcgcctcattccggcgggatgctgctgataaagagccggtaacggcacggacagaccggttaaggacaagggactatctcgtgaaatatgtatcgaccaggggtgcggccccttcgcttggtttctgcgacgcgctgctggcaggccttggccgtgacggcgggctttacgtgccgcgcgagtggccttccatgtcgaagaaggaaatccgcaacctgcgcggaaaatcctatcaggacgtcgccttcgaggttctctaccgtttcaccggcggcgaaattccggccgacaagttcaaggcgatgatcgacgacgcctattcgacgttccgtcaccctgccgtcgtgccactgacgcagaccggcccgaacaccttcgtgctggagcttttccatggcaccacgctcgccttcaaggatgtggcgatgcagcttctcgcccgcctgatggactatacgctgacggaacgcggcgagcgcgccgccattgtcggcgccacatcgggcgacaccggcggtgcggcgatcgatgcctttgccgggcgcgaacgcaccgatatcttcatccttttcccgaacggcaaggtctcgccggtgcagcagcgccagatgacgacatccaccgcttccaacgtgtatgcgctggcgatcaacggcaatttcgacgattgccagacgctggtcaaagagatgttcaacgacgtgaagttccgcgacggcgtgaagctttccggcgtcaactccatcaactgggcgcgcatcatggcgcaggtggtgtattatttcaccgcctcgctgtcgctcggcggcccggaccggaagatttccttcaccgttccgacaggcaatttcggcgatatcttcgccggttacgtcgccaagaagatggggctgccgatcgacaagctggtcatcgccaccaatgacaacgacattctggcacgcacgctgaagaccggccgttacgagatgcgcggcgtcaagcccaccacctcgccttcgatggatatccagatttcgtccaacttcgaacgcctgctgtttgaagcctatgatcgcgattccgctgcggtgaaggcgtccatggatggcctgaagcagtccggcgcgtttgaaattccgccgaaggcactgaaattcatcaaaaaggatttccgtgccggccgcgccaccgaaaagcaggttgcggcgaccattcgcgacacacttgaaaagaccggatacctgatcgacccgcatacggcgaccggcgttttcgtggctgagaagcacgaaaaagcgggaagcccgatggtggttctgtcgaccgcccacccggctaaattcccggccgctgtaaaatccgcttgcgcaatcgagcctgcgcttccagtatggctagctgacattatgaaccgggaggagcgtttcgacattctggacgcagagctgaaagccgtggaaaccttcatcggccaacatgcacgcgccggcaaatag

SEQ ID NO: 34924 - protein, 523 aa, Agrobacterium tumefaciens str. C58
MAMVYSSDAGKNRLACSVLLEFSKKPFITSPIASFRRDAADKEPVTARTDRLRTRDYLVKYVSTRGAAPSLGFCDALLAGLGRDGGLYVPREWPSMSKKEIRNLRGKSYQDVAFEVLYRFTGGEIPADKFKAMIDDAYSTFRHPAVVPLTQTGPNTFVLELFHGTTLAFKDVAMQLLARLMDYTLTERGERAAIVGATSGDTGGAAIDAFAGRERTDIFILFPNGKVSPVQQRQMTTSTASNVYALAINGNFDDCQTLVKEMFNDVKFRDGVKLSGVNSINWARIMAQVVYYFTASLSLGGPDRKISFTVPTGNFGDIFAGYVAKKMGLPIDKLVIATNDNDILARTLKTGRYEMRGVKPTTSPSMDIQISSNFERLLFEAYDRDSAAVKASMDGLKQSGAFEIPPKALKFIKKDFRAGRATEKQVAATIRDTLEKTGYLIDPHTATGVFVAEKHEKAGSPMVVLSTAHPAKFPAAVKSACAIEPALPVWLADIMNREERFDILDAELKAVETFIGQHARAGK

SEQ ID NO: 34925 - DNA, 1305 bp, Xanthomonas campestris pv. campestris str. ATCC 33913
  CDS (1)..(1305): transl_table=11
atgttcatctctacccgtggcgccgcacctgccgtgagcctgagccaggcgatcgccgccggcctggccccggacggcggcctgtacgtgccgcagaccctgccgccggcgcgcaccctgcaggccggcgcaacgctggccgacacggccaccacactgctgcagccgttcttcgaaggtgacgcgctggcaggcgagctggcggccatctgcgccgaagcgttcgatttcccggcgccgctggtgccgctggccacgccgggcgactacgcgctggagctattccatggccccaccgcggccttcaaagattttggtgcgcggtttctggccgcttgtctgacgcggctgcggcgcgccgaagaccgcccgctgaccattctggtggctacctccggcgataccggcgcggccgtggcggcggcgttccatcggcagcccggcctgcgggtggtggtgctgtatccggatggccgcgtgtcgccccggcaggcgcatcagctgggctgcttcggcgacaacatccaggcattgcgtgtggccggcaccttcgacgactgccaggccatggtcaagcaggccttgaacgatggcgagctgcaggcgcagctgccgctgagttcggccaatagcatcagcctggggcggctgctgccgcagatgagctactacgcgcacgcagcgctgcagcaccacgctggctccggggccgcattgaacctggtggtgcccaccggcaacctgggcaacggcctggccgcgatcctggcacgcgcgctcggcgtgccgctgggccagatcgtgctggcgtccaacgccaaccatgtgttgcccgactacttcgccggcgacgactacgcaccgcaacccagcgtggccaccgtggccaacgcgatggacgtgggtgcacccagcaatttcgaacgcctgcgttggctgtatgacggcgacgatgcggccctgcgcgaggcgttccgtgcgctgtcggtggatgacacggcgatccgccataccgtgcagcaacgcttcgcacgctacggcgaggtgcattgcccgcataccgccaccgccgtgcacgtactggagcaattgcgcgcggaaggggtcgagggcggcaccggcgactgggcggtggcggccacggcgcacccggccaagttcgaggcggtggtggagccactgatcggccgcgcggtggagattccgccggcgctggcggcgctgttgcagcgtccggcgcatgccgaaccgctggcaccggactacctggcgttccggcagcgtctgctcgcggatgcgccctga

SEQ ID NO: 34926 - protein, 434 aa, Xanthomonas campestris pv. campestris str. ATCC 33913
MFISTRGAAPAVSLSQAIAAGLAPDGGLYVPQTLPPARTLQAGATLADTATTLLQPFFEGDALAGELAAICAEAFDFPAPLVPLATPGDYALELFHGPTAAFKDFGARFLAACLTRLRRAEDRPLTILVATSGDTGAAVAAAFHRQPGLRVVVLYPDGRVSPRQAHQLGCFGDNIQALRVAGTFDDCQAMVKQALNDGELQAQLPLSSANSISLGRLLPQMSYYAHAALQHHAGSGAALNLVVPTGNLGNGLAAILARALGVPLGQIVLASNANHVLPDYFAGDDYAPQPSVATVANAMDVGAPSNFERLRWLYDGDDAALREAFRALSVDDTAIRHTVQQRFARYGEVHCPHTATAVHVLEQLRAEGVEGGTGDWAVAATAHPAKFEAVVEPLIGRAVEIPPALAALLQRPAHAEPLAPDYLAFRQRLLADAP

SEQ ID NO: 34927 - DNA, 1305 bp, Xanthomonas axonopodis pv. citri str. 306
  CDS (1)..(1305): transl_table=11
atgtttatctccacccgtggcggtgcccccgccgcaagcctgagccaagccattgccgccgggctggcgcccgatggcggcctctacgtgccgcagaccctgccacctgcccgtacgctggttgcgggcgccggcctggccgacaccgccactgcgctgttgcagccatttttcgagggcgacgcactggcggccgaactgcctgccatctgtgccgaagccttcgatttcccggcgccattggtggcgctgggtacgccgggcgattacgcgctggagctgtttcatggccccacggcggcgttcaaggatttcggtgcgcgcttcctggctgcctgcctgacccgcttgcgccgcgctgaagaccgcccgctcaccatcctggtcgccacctccggcgacaccggcgccgccgtggccgccgcgttccatcgccagcccggcctgcgcgtggtggtgctgtatccggacggccgcgtgtcgccgcggcaggcgcatcagttggggtgtttcggcgacaacatccaggccctgcgcgtggccggctcgttcgacgactgccaggcgatggtcaagcaggccttgaacgatgccgcgttgcagacgcaggtgccgctgagttcggccaacagcatcagtctgggccggctgctgccgcagatgagttactacgcgcatgccgccctgcagcatcatgcggcgtcgggcagcgtgctcaatctggtgatacccaccggtaacctgggcaacgcgctggcggcgatcatcgcgcgcgcgctcggggtgccgttgggccgcatcgcgctggcgtccaacgccaatcacgtgttgccggactatttcgcgggcgatgcctacgcaccgcagcccagcgtgtccaccctggccaatgcgatggacgtgggcgcgccgagcaacttcgagcggctgcggtggctctacaacggcgacgatgccgccttgcgtgaggaattccgggccttgtcggtggacgatgcggcgattcgcaacaccgtgcagcagcgcttcgcgcgctacggcgaggtgcattgcccgcataccgccaccgcggtgcatgtgctcgaacaactgcgtgccgaaggcgcggagggcggcactggcgactgggcggtagcggccaccgcgcatccggcaaagttcgagggcgtggtggagccgctgattggccgttccgtagaggttccgccggcactggccgcactgctgcagcgcccagcgcatgccgaagcactggcgccggactacgccgcccttcggcagcgcttgcttgccgatgccacctga

SEQ ID NO: 34928 - protein, 434 aa, Xanthomonas axonopodis pv. citri str. 306
MFISTRGGAPAASLSQAIAAGLAPDGGLYVPQTLPPARTLVAGAGLADTATALLQPFFEGDALAAELPAICAEAFDFPAPLVALGTPGDYALELFHGPTAAFKDFGARFLAACLTRLRRAEDRPLTILVATSGDTGAAVAAAFHRQPGLRVVVLYPDGRVSPRQAHQLGCFGDNIQALRVAGSFDDCQAMVKQALNDAALQTQVPLSSANSISLGRLLPQMSYYAHAALQHHAASGSVLNLVIPTGNLGNALAAIIARALGVPLGRIALASNANHVLPDYFAGDAYAPQPSVSTLANAMDVGAPSNFERLRWLYNGDDAALREEFRALSVDDAAIRNTVQQRFARYGEVHCPHTATAVHVLEQLRAEGAEGGTGDWAVAATAHPAKFEGVVEPLIGRSVEVPPALAALLQRPAHAEALAPDYAALRQRLLADAT

SEQ ID NO: 34929 - DNA, 1326 bp, Chlorobium tepidum TLS
  CDS (1)..(1326): transl_table=11
atgatcttctacagcacgacgaaagcgtctgctcccgtcacgatgaaaaaagccaccctcgaagggctcgcacccgatggagggttgtatgttccatcgacgatgccgcacttctccgccgaagagattgcccttctggagaacggctcgttcaacaatattgcctttgccgtcgccaagaagttcgccggtgacgaaatcccgctcgaccgcctctcggaactgatcgacgagtgctttaccttcgacacgccgctgcacgaacttgacccggacaccttcgtcgaggagctgttccacggtccgacgctcgcattcaaggactacggcgcccgatttctcgcgcggatgaccggctatttcgccgccgaagagagccgcctcatcacggtgctggtcgccacgtcgggcgacaccggcagcgctgtggcctacggcttccacggcattccgaacacccgcgtggtgctgctctatccgtcgggcaaggtgagccgccttcaggagcagcagctcaccacggcaggcgacaacgtcttcgcgctcgaagtgaaaggcgatttcgacgactgccagcgcctcgtcaagcaggccttcgtcgaccaatcgctgcgtcagaagctgacgctcacttcggcaaactccatcaacatctcgcgcctgattccgcagtcgttctactatgcctgggcggcgctccagctccgccagcgcaagccagacgctctgccgatcttctcagtaccaagcggcaactacggcaacctgacggcgggcgtcatggcaaagatgatgggctttccgatcggccacttcatcgccgcctcgaacgccaacgacagcgtcacccgctatctcgacgaggggcgctacgagccgaaaccgaccgtccggacgctgaccacggcgatggatgtgggcaacccgagcaacttcgcgaggctgcgctatttcttcgaaaacgatttccggaaaatgggccaagagatcaccggcatcgcggtctcggatgcagaaaccctcgaaacgatccgctcggtttacgagaaatacggctatgtcatggatccgcacaccgccgtcggctaccgggcgctcgaccggttccgtcaggatcatgccggagcgggcaccccgggcgtcgtgctttcgaccgctcacccggtcaaattcgacgaggcgatcaaagaggcaaccggcaatgaggtgccacttccggaaacgatggaagaaatcatgagcaagccgaaaaaagccacgctgatcggcaaccgctacgaagagctggctcgctttctctcggagctcaacacccagacaaactga

SEQ ID NO: 34930 - protein, 441 aa, Chlorobium tepidum TLS
MIFYSTTKASAPVTMKKATLEGLAPDGGLYVPSTMPHFSAEEIALLENGSFNNIAFAVAKKFAGDEIPLDRLSELIDECFTFDTPLHELDPDTFVEELFHGPTLAFKDYGARFLARMTGYFAAEESRLITVLVATSGDTGSAVAYGFHGIPNTRVVLLYPSGKVSRLQEQQLTTAGDNVFALEVKGDFDDCQRLVKQAFVDQSLRQKLTLTSANSINISRLIPQSFYYAWAALQLRQRKPDALPIFSVPSGNYGNLTAGVMAKMMGFPIGHFIAASNANDSVTRYLDEGRYEPKPTVRTLTTAMDVGNPSNFARLRYFFENDFRKMGQEITGIAVSDAETLETIRSVYEKYGYVMDPHTAVGYRALDRFRQDHAGAGTPGVVLSTAHPVKFDEAIKEATGNEVPLPETMEEIMSKPKKATLIGNRYEELARFLSELNTQTN

SEQ ID NO: 34931 - DNA, 1491 bp, Streptococcus agalactiae 2603V/R
  CDS (1)..(1491): transl_table=11
atggcaatagtatatcaatcaacacgtgatgctagtaataaagtgacagctagtcaagcgattctaaagggattagctgacgatggaggactctttacccccatcacatttccaaaagttgatttagatttcactaaacttaaggatgcttcctaccaagaagtggctaaactcgttttgtcagctttttttgatgattttactgaacaagaattggattactgtattagtcaagcttatgatactaaatttgatacaactgaaatagccccgatagtaaagattggagaccggtatcaccttgaattatttcacggtcctacaattgcatttaaagatatggctttatccattcttccttatttgctaacaacagcagccaaaaaacaaggggttgataataaaatcgttattttaacagcaacatcaggtgacactggcaaggcagcgatggcaggttttgcagatgttccaggaactgagattattgtcttttatcctaaaaatggtgttagttatatccaagaattgcagatgataacacaagccggacaaaatactcatgttgttgcgattgaaggaaattttgatgatgcacagacttcagttaaagaaatgttcaataattcccttcttcgattaaaattatcacagcagcatatgcagttatcatcagccaattcaatgaacatcggtcgccttgttcctcaaattgtttactatatatatgcatatgctcaattagttaagtcaaaggaaatctcaattggtcaaccaattaattttagtgtacctacaggaaattttggtaatattttagcagcatattatgctagtcaaattggattacctgttaccaaactcatttgtgcctcaaatgataataacgttctaacagatttttttaagacacaaacctacgataaaaatcgagaatttaaagtgacatcaagtccctctatggatattttggtctcctctaatctagaacgattaatctttcaccttttaggcgatgatgcagaaacgactaaaaaattaatggaagatttagtgactactggggagtatgccttagaggctaggcaagcaaatattttagagagctttgtagcgggatttgcgacagaacaatttgttgaattagacatcaaacatttatttgaccagtatcagtatatagaggatccgcatacagctgtagcatcagctgtttatcaagcttatcagacagaaactaaagatcaaactccagcagtaattgtgtcaacagcaagtccttataagttcccgtgtgttgttacaaaggctattacaaataaagaagagatacaggatttcgctgctatttcaatcttaaacgatttgtcaggtgtttctttacctaaggcggttacagatctacaaaaggccgaagtaatccatagaacggtagtacctacctcaaatatgcgagaaacggttgaagagtgtctaggtttgaaacaataa

SEQ ID NO: 34932 - protein, 496 aa, Streptococcus agalactiae 2603V/R
MAIVYQSTRDASNKVTASQAILKGLADDGGLFTPITFPKVDLDFTKLKDASYQEVAKLVLSAFFDDFTEQELDYCISQAYDTKFDTTEIAPIVKIGDRYHLELFHGPTIAFKDMALSILPYLLTTAAKKQGVDNKIVILTATSGDTGKAAMAGFADVPGTEIIVFYPKNGVSYIQELQMITQAGQNTHVVAIEGNFDDAQTSVKEMFNNSLLRLKLSQQHMQLSSANSMNIGRLVPQIVYYIYAYAQLVKSKEISIGQPINFSVPTGNFGNILAAYYASQIGLPVTKLICASNDNNVLTDFFKTQTYDKNREFKVTSSPSMDILVSSNLERLIFHLLGDDAETTKKLMEDLVTTGEYALEARQANILESFVAGFATEQFVELDIKHLFDQYQYIEDPHTAVASAVYQAYQTETKDQTPAVIVSTASPYKFPCVVTKAITNKEEIQDFAAISILNDLSGVSLPKAVTDLQKAEVIHRTVVPTSNMRETVEECLGLKQ

SEQ ID NO: 34933 - DNA, 1491 bp, Bifidobacterium longum NCC2705
  CDS (1)..(1491): transl_table=11
gtgacaaccaccttccattccacccgtagcaccaacgattcgctgaccgccaagcaggcgattcgtaagggcatcgccgatgacggcggcctgttcgtttcggacgcgttgggcaagaccaaggtggacgtggcctccctgccgggcaagtcgtaccagcagatcgccgccgaggtgctgggcgcgctgctgccggacttcacggccgaggagctgggccagtgcatcgccgacgcctacggcgaacagtggtccgatgagcgcatcaccccactcaagcccctgggtgacgattacgtgctcgaactgttcaacggtccgacttccgcgttcaaggacgtggcgctgcagatcctgccgcgcttcatggcgcacaccacgccggccgatggcgacgcggacgagaagatcatgatcctcaccgccacctccggcgacaccggcaaggccgcgctggccggcttcgcggacgccccgggcaccgcgatcaccgtcttctacccggaaggcaaggtctcccaggtccaggaactgcagatgaccacgcaggccggctccaacgtgcaggtggccgccgtggaaggcaacttcgacgacgcccagtccgcggtcaagcgcatcttcggcgaccgtgccctggccgagcgtctcgccggcaattcgcacgtggtgctttcctccgccaactccatcaacgtgggccgtctggtgccgcaggtcgtctactacttctccgcttacgcccagctgctcgccgaccaggtgatcaacgtcggcgatgaggtcgagttcgtggtcccgaccggcaacttcggcgatatcctcgccggctactatgccaagctgctcggtctgccggtcaagcacctcgtggtggcttccgacaagaacaacgtgctgttcgacttcctgaccaccggtacctacaaccgccagcgcccgttcttccagaccatctccccctcgatggacatcctcatctcctccaacctggagcgcatgctgtactacttgtccgagggcgacacccgtctgatctccatgctgatgaacgacctcaacaagtggggcacgtacgagatcccggaagaactgctggccaagattcgtcagatcttcggcaccggttgggccgatgaggatcaggtacgcgagtccatcaaacactgctgggacgagcaccactacgtgatcgacccgcacaccgcctgcggctactacctgcttgagcagatgccgcgcgacccgctgaccccgcgcgtgctgctctccaccgccagcccctacaagttcccgcgcgtggtgaacgaggcattgggcttcgacgccaccggcaccgacttcgagtgcatggatgtgctggcccacgagaccggcaccaccgccccggccgccctgcgtggtcttgagaccgccgacgtgcggttcaaggacgtcgtggccatcgacggcatggaggactacgtggagaaggccgcccaggcgctgtga

SEQ ID NO: 34934 - protein, 496 aa, Bifidobacterium longum NCC2705
MTTTFHSTRSTNDSLTAKQAIRKGIADDGGLFVSDALGKTKVDVASLPGKSYQQIAAEVLGALLPDFTAEELGQCIADAYGEQWSDERITPLKPLGDDYVLELFNGPTSAFKDVALQILPRFMAHTTPADGDADEKIMILTATSGDTGKAALAGFADAPGTAITVFYPEGKVSQVQELQMTTQAGSNVQVAAVEGNFDDAQSAVKRIFGDRALAERLAGNSHVVLSSANSINVGRLVPQVVYYFSAYAQLLADQVINVGDEVEFVVPTGNFGDILAGYYAKLLGLPVKHLVVASDKNNVLFDFLTTGTYNRQRPFFQTISPSMDILISSNLERMLYYLSEGDTRLISMLMNDLNKWGTYEIPEELLAKIRQIFGTGWADEDQVRESIKHCWDEHHYVIDPHTACGYYLLEQMPRDPLTPRVLLSTASPYKFPRVVNEALGFDATGTDFECMDVLAHETGTTAPAALRGLETADVRFKDVVAIDGMEDYVEKAAQAL

SEQ ID NO: 34935 - DNA, 1392 bp, Brucella suis 1330
  CDS (1)..(1392): transl_table=11
atgaaatatgtaagtacgcgtggggaagcaccggttctggaattcagcgatgcattgctcgcaggcctcgcccgtgatggcggtctttatctgccgcaggaatatccgcaattcacagccgaacagatccgcgccctgcgtggaaaatcctatgtcgaagtcgcgctggccgtcctcacgccctttaccggcggtgaaattccggcagccgatttcgagcgcatggtccgcgaagcttacggaaccttccgtcacgatgccgtctgcccgttggtgcagaccgacgcgaacgaattcgtgctggagcttttccatggccccacccttgccttcaaggatgtcgccatgcagcttctggcccgcatgatggattatgttctggcacagcgcggcgagcgcgcaacgatcgtcggcgctacatccggcgatacgggcggcgcagccatcgaagcctttggcgggcgcgacaacacagacattttcatcctgttccccaatgggcgggtctcgccggtacagcaacgccagatgacgtcttccggcttttccaatgtccatgcgctttccatcgagggcaatttcgacgattgccagaacctcgtaaaaggcatgttcaatgatctggaattccgtgacgccctgtcgctttccggcgtgaactcgatcaactgggcgcgcatcatgccgcaggttgtctattatttcacggcagcactcagcctcggcgcaccggaccgcgccgtgtccttcacggtgcccaccggcaatttcggcgatattttcgcaggctacgtcgccaagcgcatgggcctgcccatcgagcaactcatcatcgccaccaacgacaacgatattctttcgcgcacgctggaaagcggggcctatgagatgcgcggcgtagcgcagaccacttcgccctcaatggatatccagatttcctccaatttcgagcggcttctgttcgaggcacacgggcgcgatgcggcggccgtgcgcgggctgatgcagggcctgaagcaatctggcggatttacgatttccgaaaagccgctttcggccatccgcagcgaattttcggctggccgctccaccgtcgatgagacggcggcgactatcgaatcggttctttccaaagacggctatctgcttgatccgcattcggcgatcggtgtgaaggtcgcgcgtgaaaaagcatccggcaccgccccgatggtggttctggcgaccgcccatccggccaaattcccggatgcggtgaaggctgcatgtggggtcgagccgcaattgccggcatggctttgcgacctgatgcaacgaaaagaaagcttcacagttcttcacaacgagctgaaaatcgtggaagaatatgtgcgccaccattcccgagcctga

SEQ ID NO: 34936 - protein, 463 aa, Brucella suis 1330
MKYVSTRGEAPVLEFSDALLAGLARDGGLYLPQEYPQFTAEQIRALRGKSYVEVALAVLTPFTGGEIPAADFERMVREAYGTFRHDAVCPLVQTDANEFVLELFHGPTLAFKDVAMQLLARMMDYVLAQRGERATIVGATSGDTGGAAIEAFGGRDNTDIFILFPNGRVSPVQQRQMTSSGFSNVHALSIEGNFDDCQNLVKGMFNDLEFRDALSLSGVNSINWARIMPQVVYYFTAALSLGAPDRAVSFTVPTGNFGDIFAGYVAKRMGLPIEQLIIATNDNDILSRTLESGAYEMRGVAQTTSPSMDIQISSNFERLLFEAHGRDAAAVRGLMQGLKQSGGFTISEKPLSAIRSEFSAGRSTVDETAATIESVLSKDGYLLDPHSAIGVKVAREKASGTAPMVVLATAHPAKFPDAVKAACGVEPQLPAWLCDLMQRKESFTVLHNELKIVEEYVRHHSRA

SEQ ID NO: 34937 - DNA, 1287 bp, Shigella flexneri 2a str. 301
  CDS (1)..(1287): transl_table=11
atgaaactctacaatctgaaagatcacaacgagcaggtcagctttgcgcaagccgtaacccaggggttgggcaaaaatcaggggctgttttttccgcacgacctgccggaattcagcctgactgaaattgatgagatgctgaagctggattttgtcacccgcaatgcgaagatcctctcggcgtttattggtgatgaaatcccacaggaaatcctggaagagcgcgtgcgcgcggcgtttgccttcccggctccggtcgccaatgttgaaagcgatgtcggttgtctggaattgttccacgggccaacgctggcatttaaagatttcggcggtcgctttatggcacaaatgctgacccatattgcggatgataagccagtgaccattctgaccgcgacctccggtgataccggagctgcagtggctcatgctttctacggtttgccgaatgtgaaagtggttatcctctatccacgaggcaaaatcagtccactgcaagaaaaactgttctgtacgttgggcggcaatatcgaaactgttgccatcgacggcgatttcgatgcctgtcaggcgctggtgaagcaggcgtttgatgatgaagaactgaaagtggcgctggggttaaactcggctaactcgattaacatcagccgtttgctggcgcagatttgctactactttgaagctgttgcgcagctgccgcaggaggcgcgcaaccagctggttgtctcggtgccaagcggaaacttcggcgatttgacggcgggtctgctggcgaagtcattcggtctgccggtgaaacgttttattgctgcgaccaacgtgaacgataccgtgccacgtttcctgcacgacggtcagtggtcacccaaagcgactcaggcgacgttatccaacgcgatggacgtgagtcagccgaacaactggccgcgtgtggaagagttgttccgccgcaaaatctggcaactgaaagagctgggttatgcagccgtggatgatgaaaccacgcaacagacaatgcgtgagttaaaagaactgggctacacctcggagccgcacgctgccgtagcgtatcgtgcgctgcgtgaccagttgaatccaggcgaatatggcttgttcctcggcaccgcgcatccggcgaaatttaaagagagcgtggaagcgattctcggtgaaacgttggatctgccaaaagagctggcagaacgtgctgatttacccttgctttcacataatctgcccgccgatttttctgcgttgcgtaaattgatgatgaatcatcagtaa

SEQ ID NO: 34938 - protein, 428 aa, Shigella flexneri 2a str. 301
MKLYNLKDHNEQVSFAQAVTQGLGKNQGLFFPHDLPEFSLTEIDEMLKLDFVTRNAKILSAFIGDEIPQEILEERVRAAFAFPAPVANVESDVGCLELFHGPTLAFKDFGGRFMAQMLTHIADDKPVTILTATSGDTGAAVAHAFYGLPNVKVVILYPRGKISPLQEKLFCTLGGNIETVAIDGDFDACQALVKQAFDDEELKVALGLNSANSINISRLLAQICYYFEAVAQLPQEARNQLVVSVPSGNFGDLTAGLLAKSFGLPVKRFIAATNVNDTVPRFLHDGQWSPKATQATLSNAMDVSQPNNWPRVEELFRRKIWQLKELGYAAVDDETTQQTMRELKELGYTSEPHAAVAYRALRDQLNPGEYGLFLGTAHPAKFKESVEAILGETLDLPKELAERADLPLLSHNLPADFSALRKLMMNHQ

SEQ ID NO: 34939 - DNA, 1284 bp, Shewanella oneidensis MR-1
  CDS (1)..(1284): transl_table=11
atggaactatataatttaaaacacccttcgcagacagtgagctttaaggaagcggtgcaattaggactcggtaaagacagagggctgtttttcccaactcaaatcccggtgttgcatgatattgaggcgcttttggcgatgccttttgtcgagcgtagcaaaaaagtacttggtgcttggctcgcctctgaactgggtcaagatatggtagatcaactggttgagcgtgcctttaactttgatttacccttggtggcagtcgatgagcaacgtgcgtgccttgaactcttccatgggcccaccttagcatttaaggattttggggcgcgttttatggcgcaatgcatcaatgtctttgctcaagactcgcgcttaaccattttaacggcaacatcaggggatacaggggcggcagtggccgatgcgttttatggcctcgaaaaagtgaatgttgtggtgctctatcctaagggcaagatcagtgaattacaggaaaaaatgttcactactttaggcaagaacatccacacagtcgcggtggcgtcagacttcgatgcatgccagcatttagtcaaacaggcttttgaagatagcgatgtgcgtgatggtttgcatttaaactcggcaaactcaatcaacatcagtcgcttactggcacagatttgttattacttcgaggcggttgcccagtcgaaacagcgtcacgaggccgaccctgtaattgcggtgcccagtggaaattttggaaatctgaccgcaggcttgtttgccaaagccatggggttacctgtcaaacgctttatcgccgcgaccaacgcaaatgataccgttccacgttatttagatagcggtcattggcaacccaatcctactcaagcgactatgtccaatgcgatggatgtgagcgagcccagcaactggccgcgtgtcgaagctatttgtgagaaacttggttggccactggcggatttagtgggtatttgcttgtcggaagcacaaacctcggaggcgttggtagatctttatgcgaaaggttatgtgtctgagccccatgcagcgattgcggctaaggcgttaaccttgaatttagtgcctgacgaagtggggatctttttaggcacagcccatcccgctaagtttaaggatgtggttgacagggagcttgcccttaacttacctctgccgccagaattaaaagcggtagcgcataaaccgatattatctgctgaattagccgctgattttgcccaattaaaagcccatttatttgcagtattaagctga

SEQ ID NO: 34940 - protein, 427 aa, Shewanella oneidensis MR-1
MELYNLKHPSQTVSFKEAVQLGLGKDRGLFFPTQIPVLHDIEALLAMPFVERSKKVLGAWLASELGQDMVDQLVERAFNFDLPLVAVDEQRACLELFHGPTLAFKDFGARFMAQCINVFAQDSRLTILTATSGDTGAAVADAFYGLEKVNVVVLYPKGKISELQEKMFTTLGKNIHTVAVASDFDACQHLVKQAFEDSDVRDGLHLNSANSINISRLLAQICYYFEAVAQSKQRHEADPVIAVPSGNFGNLTAGLFAKAMGLPVKRFIAATNANDTVPRYLDSGHWQPNPTQATMSNAMDVSEPSNWPRVEAICEKLGWPLADLVGICLSEAQTSEALVDLYAKGYVSEPHAAIAAKALTLNLVPDEVGIFLGTAHPAKFKDVVDRELALNLPLPPELKAVAHKPILSAELAADFAQLKAHLFAVLS

SEQ ID NO: 34941 - DNA, 1485 bp, Streptococcus mutans UA159
  CDS (1)..(1485): transl_table=11
atgacattagtgtatcaatcaacccgtgatgaaaataataaagtaagcgccagtctggctattttgcaaggcttagcaagagatggcggtctttttacgccgacatcttatccacaagttgatttggattttgaccagcttaaaacggcttcctaccaagaagttgccaagttggttttatcagcttttttggatgattttacagaagcagaattggattattgtattgctaatgcctatgatgataagtttgatacaccggtcattgcgcctttagttaaacttaatggccaatataatcttgaactttttcatggttcaactattgcctttaaggatatggcgctttcgattttgccttatcttttaacaacgtcagctaaaaagcaaggcattaataacaagatcgtcattttaacagcgacatctggagatactggtaaggcagctatggcaggctttgcggatgttccggggacagaaattattgtcttttatcctaatggtggtgtcagtaagattcaagaattacaaatgacgacacaggtaggagataatacacatgttgttgctattgaaggaaactttgatgatgctcagacaaatgtcaaaaagatgttcaacgatagtgatctgcgaacaaaacttttagagcacggtgcccaattttcatcggcaaactctatgaatgtcggacgtttagtgccacaagtggtttactacgtttatgcttatgcccagttgcttaaatcaggtgacattaaaaacggtgatagggttaactttacagtaccaacgggaaattttggaaatattttggctgcttattatgcacgtcaaattggtgtgccaattggcaaacttatctgtgcttcaaatgaaaataatgttttgactgacttctttaaaacagggacttatgataagaaaagagaatttcgtgtaacaaccagtccctcaatggacattcttgtttcatctaatttggaacgccttatttttcatcttttgggaaatgattctgttaaaacaaaagaactcatgcaggctttgattgaaaagggtgagtatactttagaaaaagctgataaagctattttagatttatttgctgcgggatttgcgaccgaagaagagacagccgctgagattaaacgtgtttataccgcttcgcgttatattgaagatccgcatacagcagttgcttcggctgtttaccatgcttataggaaatctagtggtgatcaaagcccaactgtaatagcttcaacagctagcccttataaatttccgcgtgtcgttgtttctgcagtcggaggtaaagatccaaaagatgattttgcagctgtacgtgagctgagtcgtttatcaggtgtatcagtgccaagggcagttgatggccttgaaactgctgaagttcgtcatcgaaaggttgtcgcgacagctgatatgcaaaaagcagtagagtcatatttaggaatttaa

SEQ ID NO: 34942 - protein, 494 aa, Streptococcus mutans UA159
MTLVYQSTRDENNKVSASLAILQGLARDGGLFTPTSYPQVDLDFDQLKTASYQEVAKLVLSAFLDDFTEAELDYCIANAYDDKFDTPVIAPLVKLNGQYNLELFHGSTIAFKDMALSILPYLLTTSAKKQGINNKIVILTATSGDTGKAAMAGFADVPGTEIIVFYPNGGVSKIQELQMTTQVGDNTHVVAIEGNFDDAQTNVKKMFNDSDLRTKLLEHGAQFSSANSMNVGRLVPQVVYYVYAYAQLLKSGDIKNGDRVNFTVPTGNFGNILAAYYARQIGVPIGKLICASNENNVLTDFFKTGTYDKKREFRVTTSPSMDILVSSNLERLIFHLLGNDSVKTKELMQALIEKGEYTLEKADKAILDLFAAGFATEEETAAEIKRVYTASRYIEDPHTAVASAVYHAYRKSSGDQSPTVIASTASPYKFPRVVVSAVGGKDPKDDFAAVRELSRLSGVSVPRAVDGLETAEVRHRKVVATADMQKAVESYLGI

SEQ ID NO: 34943 - DNA, 1491 bp, Streptococcus agalactiae NEM316
  CDS (1)..(1491): transl_table=11
atggcaatagtatatcaatcaacacgtgatgctagtaataaagtgacagctagtcaagcgattctaaagggattagctgacgatggaggactctttacccccatcacttttccaaaagttgatttagatttcactaaacttaaggatgcttcctaccaagaagtggctaaactcgttttgtcagctttttttgatgattttactgaacaagaattggattactgtattagtcaagcttatgatactaaatttgatacaactgaaatagccccaatagtaaagattggagaccggtatcaccttgaattatttcacggtcctacaattgcatttaaagatatggctttatccattcttccttatttgctaacaacagcagccaaaaaacaaggggttgatgataaaatcgttattttaacagcaacatcaggtgacactggtaaggcagcgatggcaggttttgcagatgttccaggaactgagattattgtcttttatcctaaaaatggtgttagttatatccaagaattgcagatgataacacaagccggacaaaatacccatgttgttgcgattgaaggaaattttgatgatgcacagacttcagttaaagaaatgttcaataattcccttcttcgatcaaaattatcacagcagcatatgcagttatcatcagccaattcaatgaacatgggtcgccttgttcctcaaattgtttactatatatatgcatatgctcaattagttaagtcaaaggaaatctcaattggtcaaccaattaattttagtgtacctacaggaaattttggtaatattttagcagcatattatgctagtcaaattggattacctgttaccaaactcatttgtgcctcaaatgataataacgttctaacagatttttttaagacacaaacctacgataaaaatcgagaatttaaagtgacatcaagtccctctatggatattttggtctcctctaatctagaacgattaatctttcaccttttaggcgatgatgcagaaacgactaaaaaattaatggaagatttagtgactactggggagtatgccttagaggctaggcaagcaaatattttagagagctttgtagcgggatttgcgacagaacaatttgttgaattagacatcaaacgtttatttgaccagtatcagtatatagaggatccgcatacagctgtagcatcagctgtttatcaagcttatcagacagaaactaaagatcaaactccaacagtaattgtgtcaacagcaagtccttataagttcccgagtgttgttacaaaggctattacaaataaagaagagatacaggatttcgctgctatttcaatcttaaacgatttgtcaggtgtttctttacctaaggcggttacagatttacaaaaggccgaagtaatccatagaacggtagtacctacctcaaatatgcgagaaacggttgaagagtgtctaggtttgaaacaataa

SEQ ID NO: 34944 - protein, 496 aa, Streptococcus agalactiae NEM316
MAIVYQSTRDASNKVTASQAILKGLADDGGLFTPITFPKVDLDFTKLKDASYQEVAKLVLSAFFDDFTEQELDYCISQAYDTKFDTTEIAPIVKIGDRYHLELFHGPTIAFKDMALSILPYLLTTAAKKQGVDDKIVILTATSGDTGKAAMAGFADVPGTEIIVFYPKNGVSYIQELQMITQAGQNTHVVAIEGNFDDAQTSVKEMFNNSLLRSKLSQQHMQLSSANSMNMGRLVPQIVYYIYAYAQLVKSKEISIGQPINFSVPTGNFGNILAAYYASQIGLPVTKLICASNDNNVLTDFFKTQTYDKNREFKVTSSPSMDILVSSNLERLIFHLLGDDAETTKKLMEDLVTTGEYALEARQANILESFVAGFATEQFVELDIKRLFDQYQYIEDPHTAVASAVYQAYQTETKDQTPTVIVSTASPYKFPSVVTKAITNKEEIQDFAAISILNDLSGVSLPKAVTDLQKAEVIHRTVVPTSNMRETVEECLGLKQ

SEQ ID NO: 34945 - DNA, 1524 bp, Corynebacterium efficiens YS-314
  CDS (1)..(1524): transl_table=11
gtgtcaaagtcacggcatcccgaaaatgatgggcatccgggggagtcttatcccaccccctgggctaatctgtattgcgtggactacatttcgacgcgtgattccagccgcacccctgcccgattcagcgatatcctgctcggtggcctcgccccggacggtggactctacctgccggtggagtatccccagatcaccgatgacaccctgaccgagtggcgtggcatcctcgccactgacggttatgcagccctggccgccgaggtcatcgccctgttcgccgatgacatcccggccgaggacatccgcgccatgaccgcgcgcgcctacacccatcccaagttctcctccgaggagatcgttcccgtgacggagctggaggatgggttgtggatcggccacctctccgaggggcccactgctgcattcaaggatatggccatgcagctgctgggtgagctgtttgagtacgagctgcgccgccgcggcgagaccctcaacatcctcggtgccacctcgggtgacaccggttccgccgccgaatacgccatgcgtggccgtgagggtatccgtgtcttcatgctcaccccggccggtcgcatgaccccgttccagcaggcccagatgttcggtctggatgaccccaacatcttcaacatcgccctggacggtgtcttcgatgactgccaggatgtggtcaaggcggtctccgcggatgcggagttcaagcgggaacagcgtatcggtgcggtcaactccatcaactgggcgcgtctcatggcccaggtggtgtactacatctcctcctggatcaaggtgaccgacagcaacgaccagaaggtcagcttctcggttcccaccggtaacttcggtgatatctgcgccggtcacatcgcccgtcagatggggctgccgatcgaccgcctgatcgtggccaccaacgaaaatgatgttctggatgagttcttccgcaccggcgagtaccgcgtgcgcagctcggaggacacccacgagacctccagcccgtcgatggacatctcccgcgcctccaacttcgaacgattcgtcttcgacctgctgggtcgcgacgcagcccgcgtgaatgatctgttcggcacccaggtcaaacagggtggtttctccctggccgatgatccggtgttccttgaggcggccgaccgctacgggttcgcctcgggtcgttccacccatgccaaccgtgtggagaccatccgggatatcgcgacgcgcctcgacgtggtcatcgacccccacaccgcggacggtgtgtacgtcgcacgccaatggcgcgatgaggtcaccaccccgatcatctgcctggaaaccgccctgccggtgaagttcgcggacatcatccgtgaggccaccggtgcggagccggagatgccggaacgtttcgccgccatcatggatgccgagcacaaggtgtcggacctgcccaatgatgccgaggtggtcaagcagttcatcgtggactcgatcgccaacaccagcgtgaagtaa

SEQ ID NO: 34946 - protein, 507 aa, Corynebacterium efficiens YS-314
MSKSRHPENDGHPGESYPTPWANLYCVDYISTRDSSRTPARFSDILLGGLAPDGGLYLPVEYPQITDDTLTEWRGILATDGYAALAAEVIALFADDIPAEDIRAMTARAYTHPKFSSEEIVPVTELEDGLWIGHLSEGPTAAFKDMAMQLLGELFEYELRRRGETLNILGATSGDTGSAAEYAMRGREGIRVFMLTPAGRMTPFQQAQMFGLDDPNIFNIALDGVFDDCQDVVKAVSADAEFKREQRIGAVNSINWARLMAQVVYYISSWIKVTDSNDQKVSFSVPTGNFGDICAGHIARQMGLPIDRLIVATNENDVLDEFFRTGEYRVRSSEDTHETSSPSMDISRASNFERFVFDLLGRDAARVNDLFGTQVKQGGFSLADDPVFLEAADRYGFASGRSTHANRVETIRDIATRLDVVIDPHTADGVYVARQWRDEVTTPIICLETALPVKFADIIREATGAEPEMPERFAAIMDAEHKVSDLPNDAEVVKQFIVDSIANTSVK

SEQ ID NO: 34947 - DNA, 1389 bp, Pseudomonas putida KT2440
  CDS (1)..(1389): transl_table=11
atgcagtacacatccacgcgcggcaacgagacacgggtcgatttccgcacggcattgctttctggcctggccgacgatggcgggctttatgtgcccacctcggtgccggtgttcagcccacaggaaattgccagctggtcgtggttgcccttcgacgaactggcctggcgggtaatggcaccgtttgtcggcgataccctcgacgagcctacgctcaggtcgctggtcagcgacagctatcgcgggttccgccaccgcggcattgcgccgttgcagcagcttggccataacgaatggatcctgcagcttttccatgggcctacccggtcctccaaggactttgccgcgcagttgcaggcgcgctttgtccggcactttctgggggcagagtgcgagcgggtcatgctggtcggtgccagcaacggcgataccgcagtagcggctatcgaagcgttgcggcattgccctgcagcaggcttgctggcgctataccccagcgcaggcacgcccgccgaccgcgcggcagtgatgcgcagtgccgcgtccgacagcgtgagctgcgtggccgtggatggcagctttgacgattgccagtcgctggtgtcggcgctgctgcgtgactggccatgccccgggctgattccggtcagcttcaactccaccaactgggtcggtgtgctggcgcagattgtgttctatttccatgcggcgctgcagctcggtggcggcatacgcccggttgggttcagcatccccacggccagttttgccgagatctacgcggggttcattgcccagaaaatgggcctgccgatcaaccagatcatcgtctccaccaaccgcaacgatgccttgcaccggttcatccactgcaaccgctacagccgtggctcaaccagccagaccttgtcaccggtcatggacttttcgctgttctccaacctggagcgcttcgtctgggaactgtatgaccgcgatggtggggcgacccgggcactgatggagcacttcgaggcgtgcggcgagctgagcatcggcaaccgccagtggttgcatgcgcgcatgctgttcgactcctatgccgtggacgacgcgctgattcgcgaagaaattgtcacgctgttccacgaaacgggcagcgcagtagacccccatgccgcgacaggggtattcgccgggcgcctgcaccggcgcaacatcggtgcgcccatcgtcacgctggggcagtttgcccccgaaaagtctgccgggctgctggcggagctgggggcctggcacggtgaggtgcccgccggcgcggtcggcacagcgggcgatgggccgctgttggcacctgacgacctggccggtgttcatgccttgttgacccggttgcaggctgggcgatga

SEQ ID NO: 34948 - protein, 462 aa, Pseudomonas putida KT2440
MQYTSTRGNETRVDFRTALLSGLADDGGLYVPTSVPVFSPQEIASWSWLPFDELAWRVMAPFVGDTLDEPTLRSLVSDSYRGFRHRGIAPLQQLGHNEWILQLFHGPTRSSKDFAAQLQARFVRHFLGAECERVMLVGASNGDTAVAAIEALRHCPAAGLLALYPSAGTPADRAAVMRSAASDSVSCVAVDGSFDDCQSLVSALLRDWPCPGLIPVSFNSTNWVGVLAQIVFYFHAALQLGGGIRPVGFSIPTASFAEIYAGFIAQKMGLPINQIIVSTNRNDALHRFIHCNRYSRGSTSQTLSPVMDFSLFSNLERFVWELYDRDGGATRALMEHFEACGELSIGNRQWLHARMLFDSYAVDDALIREEIVTLFHETGSAVDPHAATGVFAGRLHRRNIGAPIVTLGQFAPEKSAGLLAELGAWHGEVPAGAVGTAGDGPLLAPDDLAGVHALLTRLQAGR

SEQ ID NO: 34949 - DNA, 1410 bp, Pseudomonas putida KT2440
  CDS (1)..(1410): transl_table=11
atgcgctatatcagtacccgcggccaggcaccggccctgaatttcgaagacgtgctgctggctggcctggccagcgacggcggcctgtacgtgccggaaaacctgccacgcttcacccaggaagaaatcgcctcgtgggccggcttgccctaccacgagctggccttccgcgtgatgcgcccgttcgtcgaaggcagcatcgccgacgccgacttcaagaagatcctcgaagaaacctacggcgagttcgcccacgctgcggtcgccccgttgcgtcagctgaacagcaacgagtgggtgctggagctgttccacggcccgaccctggcgttcaaggactttgccctgcagttgctcggtcgcctgcttgaccatgtgctggccaagcgcaacgagcgcgtggtcatcatcggtgccaccagcggtgataccggttctgccgcgatcgaaggctgccgccgttgcgacaacgtcgacatcttcatcctgcacccgcaccagcgtgtgtcggaagtgcagcgccgccagatgactacaatctttggcgacaacatccacaacatcgccatcgaaggcaacttcgacgactgccaggaaatggtcaaggccagtttcgccgaccagtcgttcctcaagggcacccgcctggtcgccgtcaactcgatcaactgggcgcggatcatggcccagatcgtctactacttccatgcagccctgcagctgggtggcccggcgcgctcggtggcgttctcggtaccaaccggcaacttcggcgacatcttcgccggctacctggcgcgcaacatgggcctgccggtcagccaattgatcgtcgccaccaaccgcaacgacatcctgcaccgcttcatgagcggcaaccagtacgtcaaggaaaccctgcacgcgaccctgtcgccgtcgatggacatcatggtctcgtccaacttcgagcgcctgttgttcgacctgcatggccgcaacggtggtgcgattgccgagctgatggccaacttcaagcaaggtggcggcttcagcgtcgagcaagaccgctggaccgaagcccgcaaactgttcgactcgctggccgtcagcgacgagcaaacctgcgagaccatcgcagaagtgttcgccgccaccggtgaagtgctcgacccgcataccgcaatcggcgtcaaggctgcccgcgagtgccgccgcagtctggacacgccaatggtggtgctgggtaccgcgcacccggtcaagttcccggaagcggtggagaaggccggtgtgggcaaggcgctggagctacccgcgcacctcagcgacctgttcagccgtgaagagcgttgcacggtcctggccaacgacctgaaggctgtacagggctttgtcagccagcacggcaaccgcggcaagccgctgtaa

SEQ ID NO: 34950 - protein, 469 aa, Pseudomonas putida KT2440
MRYISTRGQAPALNFEDVLLAGLASDGGLYVPENLPRFTQEEIASWAGLPYHELAFRVMRPFVEGSIADADFKKILEETYGEFAHAAVAPLRQLNSNEWVLELFHGPTLAFKDFALQLLGRLLDHVLAKRNERVVIIGATSGDTGSAAIEGCRRCDNVDIFILHPHQRVSEVQRRQMTTIFGDNIHNIAIEGNFDDCQEMVKASFADQSFLKGTRLVAVNSINWARIMAQIVYYFHAALQLGGPARSVAFSVPTGNFGDIFAGYLARNMGLPVSQLIVATNRNDILHRFMSGNQYVKETLHATLSPSMDIMVSSNFERLLFDLHGRNGGAIAELMANFKQGGGFSVEQDRWTEARKLFDSLAVSDEQTCETIAEVFAATGEVLDPHTAIGVKAARECRRSLDTPMVVLGTAHPVKFPEAVEKAGVGKALELPAHLSDLFSREERCTVLANDLKAVQGFVSQHGNRGKPL

SEQ ID NO: 34951 - DNA, 1431 bp, Bradyrhizobium japonicum USDA 110
  CDS (1)..(1431): transl_table=11
ttggagggcagtttgactcgttatatctcgacccggggcgaggcccccgaactcggcttctgcgacgtgatgctgaccgggcttgcccgcgacggtggcctgtatgtgccggcgacatggccgcagctctcggctgacacgatcgccggcttcttcggccgcccgtattgggaggtcgccgtcgacgtgatccgtcccttcgccggaggcgagatcacggacgctgagctcggccggatggcgaacgaggcctacgccaccttccgccatcccgcggtggtgccgctgcgccagatgtcgccgcaccagttcgtgctggagctgttccacggcccgacgctcgccttcaaggacgtggcgatgcagctcatctcgcggctgatggaccatgtgctcgccaagcgcgaccagcgcaccaccatcgtggtcgcaacctccggcgacaccggcggcgctgcggtcgaagccttcgcggggctggagaacgtcgatctcatcgtactgttcccgcacggccgcatctccgaggtgcagcggcggatgatgacgacgacgggcgcggccaacgtgcatgcgctcgccatcgaaggcacgttcgacgactgccaggccctcgtgaagggaatgttcaacaaccatcgcttccgcgatgcgacctcgctgtccggcgtcaattccatcaactgggcgcgtatcgttgcccaggtggtctattacttcacctccgccgttgccgccggcgcgccggcgcgcgcggtggacttcgtcgtgccgaccggcaatttcggcgacatctttgccggctacgtcgccaagcgcatgggtctgccggtgcggaccctgcgcatcgccgccaacgtcaacgacatcctggcgcggacgctgaagaccggcatctacgaggtgcgcgaggtgcacgccacggcgtcgccgtcgatggacatccagatctcctcgaacttcgagcggctgctgttcgaagccggccggcgcgatgcggccggtgtgcgccgtctcatggattcgctgaagcagtccgggcgcttcgtgctgcccgatgcgacgctcgccgcgatccgcgaggagttcgacgccgggcgcgccgacgagaccgaaaccgcggccgcgatccgcgccgcctggcgtgaggcgggcgagctggtcgatccccatactgcggtcgcgctcgcggtcgccgatcgcgacaccaccgacaccacggtgcccagcatcgtgctctccaccgcgcatccggccaaattccccgacgcggtcgaagcggcctgcggccagcggccgcaactgccggcctggctcgacggcctcatgaccaaatccgaacacatgaaggtgatgaagaacgatcaggccgaggtcgagcggttcgtgctgtcggtcagccgtgccgcaaaacagggagttgccggatga

SEQ ID NO: 34952 - protein, 476 aa, Bradyrhizobium japonicum USDA 110
MEGSLTRYISTRGEAPELGFCDVMLTGLARDGGLYVPATWPQLSADTIAGFFGRPYWEVAVDVIRPFAGGEITDAELGRMANEAYATFRHPAVVPLRQMSPHQFVLELFHGPTLAFKDVAMQLISRLMDHVLAKRDQRTTIVVATSGDTGGAAVEAFAGLENVDLIVLFPHGRISEVQRRMMTTTGAANVHALAIEGTFDDCQALVKGMFNNHRFRDATSLSGVNSINWARIVAQVVYYFTSAVAAGAPARAVDFVVPTGNFGDIFAGYVAKRMGLPVRTLRIAANVNDILARTLKTGIYEVREVHATASPSMDIQISSNFERLLFEAGRRDAAGVRRLMDSLKQSGRFVLPDATLAAIREEFDAGRADETETAAAIRAAWREAGELVDPHTAVALAVADRDTTDTTVPSIVLSTAHPAKFPDAVEAACGQRPQLPAWLDGLMTKSEHMKVMKNDQAEVERFVLSVSRAAKQGVAG

SEQ ID NO: 34953 - DNA, 1293 bp, Xylella fastidiosa Temecula1
  CDS (1)..(1293): transl_table=11
atgaacttccattccacccgcaccacagctccggtgaccaccctcagccaggcaatcgctgcaggcttagcaccggatggcggcttatatgtccccgagtgcttgccaccccttggtgacttggaccacagcgcagatttaatcaacaccgccaccgcactactgacccccttctttgcgggggatccgctagaagtgcatgtgccgtcgatctgtgccgaagcgctggatctccccgcaccactgctgcccttggctacccctgaagattatgtccttgagttatttcacggccccactgctgccttcaaggattttggcgcacgttttctagcggcctgcctgactcggctacgacgtgatgccgaacgtcccttgacgattctggtggctacctccggtgatacgggtgctgcggtggcggcggcatttcatcggcaacccggattgcgtgtcgtcgttctgtacccggatggccgtgtatcgccacgtcaggcccaccaattgggttgttttggcgacaacatacatacactgcgtgtggctggcgtgttcgatgactgccaagccatggtcaagcaggccctgaacgataccagcctccaaacagccgtgccgctgagttcggccaacagcatcagcctgggccgcttgctgccgcagatgagctactacgcccatgcagccttgacccaccgtgccagcacgggccgccctctgaacctcattgtgcccaccggcaacctcggcaatgccttggccgcgattctggcgcgcgccctgggagtacccttaggacagattgtgttggcgacaaacgccaaccacgtactccctgattacttttccggagcacattaccgcccccagcccagtgtggcgacgttggccaatgcaatggacgttggagcgcccagtaattttgaacgattgcgctggttgtatcgcggcgatgacgccgcattgcgtgccgcctttaccgcctattccgtcgacgacaccgcgatccgccagaccatcaccgcacggcatcgtcgctacgacgagatattttgtccccataccgctacggcggtgtttgtgcttgagcacttgcgtgcacagggcgtcgctggggattgggccgttgtggcgaccgcgcatccagccaaatttgagcaggtggtagaaccgttgatcggtaccaccgtgcccgtgccggcggccctggatagcctcctgcaacgtcccgcgcgcgacgaaccgcttgccccagagtacccggcattgcggcacatgctactggccacctaa

SEQ ID NO: 34954 - protein, 430 aa, Xylella fastidiosa Temecula1
MNFHSTRTTAPVTTLSQAIAAGLAPDGGLYVPECLPPLGDLDHSADLINTATALLTPFFAGDPLEVHVPSICAEALDLPAPLLPLATPEDYVLELFHGPTAAFKDFGARFLAACLTRLRRDAERPLTILVATSGDTGAAVAAAFHRQPGLRVVVLYPDGRVSPRQAHQLGCFGDNIHTLRVAGVFDDCQAMVKQALNDTSLQTAVPLSSANSISLGRLLPQMSYYAHAALTHRASTGRPLNLIVPTGNLGNALAAILARALGVPLGQIVLATNANHVLPDYFSGAHYRPQPSVATLANAMDVGAPSNFERLRWLYRGDDAALRAAFTAYSVDDTAIRQTITARHRRYDEIFCPHTATAVFVLEHLRAQGVAGDWAVVATAHPAKFEQVVEPLIGTTVPVPAALDSLLQRPARDEPLAPEYPALRHMLLAT

SEQ ID NO: 34955 - DNA, 1494 bp, Clostridium tetani E88
  CDS (1)..(1494): transl_table=11
gtgatacagttgaagttatcctataaaagtactagatcagaaacaaatataaattcaagtgaagcaatagtacaaggtatagcagataagggtggattatttgtgccaacatcctttcctaaaatagatatacctttttctcaattaaaagattttgattataaaagattagctatttatatattaaaaaaatttctaactgatttttcagaagaagaattaaatggatatgtggaaaaagcatatgatcaaaaatttgaaaataagtctatagttcctatagtaaaaaaagaagatgtatactttttagagctatatcatgggccaaccttagcatttaaagatatggcattatccatattaccatatttattaaaagcctctttaaaaaagaataaaatagaaaaagaggttgttatattaacagctacttctggtgatacaggcaaagcagcactagaaggttttgctgatgtagatgatacaaaaattatagtgttttacccagaacatggtgtaagtccaatacaaaaaaaacagatgagtactcaaaaaggggaaaatacttatgttataggtgtcaatggaaattttgatgaggcacaaaatagtataaaagaaatatttaatgatgaagtattagaagagagtatagagaaaaaaggatacatattttcttctgccaactccataaatataggaagattaattcctcaaatagtttattatgtttattcatatatgtggcttttgaaaaaaggagaaatagaggaaggagaagaaatcaacatagtagtacctacaggtaattttggtaatatattagcggcatactatagtaaaaaaatggggataccagtaaataagtttatatgtgcatcaaatgaaaataatgtgctttgtgaattttttaataaaggaatctatgataaaaataaagaatttaaaataacttcttctccatcaatggatatattaatatctagtaacttagaaagattaatttatgaaatatgtgatggaaatgaggataaagtaaaaacatatatggataaactaaaatatggtggaacatatgaactagataaagaggagttggagaaattaaatagtttttattcaagttttgcaacagatgaagaaacctatgaaaaacttaaagaagtatatgataaatactcatatcttatggatactcacactgcagtagcatataaagtttatgaggattataagaaggatacaggggataagagaaaatctataatagcttctacagcaagtccatttaaattcactagggatgtagctaaggcgctaaagataaatgatgaaaaactagatgattttcaattaatttataaaatatctgaatatacgggagttatggtacctaaaactatagaaaaactttataaagaagaaataatacataatagaaaatgtgaaaaagaagatataaaaaatgttataaaagaaattttaaaagtatag

SEQ ID NO: 34956 - protein, 497 aa, Clostridium tetani E88
MIQLKLSYKSTRSETNINSSEAIVQGIADKGGLFVPTSFPKIDIPFSQLKDFDYKRLAIYILKKFLTDFSEEELNGYVEKAYDQKFENKSIVPIVKKEDVYFLELYHGPTLAFKDMALSILPYLLKASLKKNKIEKEVVILTATSGDTGKAALEGFADVDDTKIIVFYPEHGVSPIQKKQMSTQKGENTYVIGVNGNFDEAQNSIKEIFNDEVLEESIEKKGYIFSSANSINIGRLIPQIVYYVYSYMWLLKKGEIEEGEEINIVVPTGNFGNILAAYYSKKMGIPVNKFICASNENNVLCEFFNKGIYDKNKEFKITSSPSMDILISSNLERLIYEICDGNEDKVKTYMDKLKYGGTYELDKEELEKLNSFYSSFATDEETYEKLKEVYDKYSYLMDTHTAVAYKVYEDYKKDTGDKRKSIIASTASPFKFTRDVAKALKINDEKLDDFQLIYKISEYTGVMVPKTIEKLYKEEIIHNRKCEKEDIKNVIKEILKV

SEQ ID NO: 34957 - DNA, 1494 bp, Lactobacillus plantarum WCFS1
  CDS (1)..(1494): transl_table=11
atgaaaacactttatcgcagtacccgcgaaactgcaagtcacaccatgacgtcatcacaagccgtacttcaaggcctgacgccggatggtggtctctttgtgcccgtaacgctaccgaccgctaattttgacttcgaccagctcgccacgatgagctaccaagaagttgcttacgaggtccttaaactcttcttcacggattataccgctgatgaattacacgcctgcattgacgcggcttatggtgatcagtttgatgacccccaaattgcgccggtcaccaagcatggtcagcagtattaccttgaactttttcatggaccgaccattgcattcaaagacttggcccttcaaatcctaccgcatttgatgacaacggcagttaaaaagaaccatttacaagccgaagtcgttattttagcggccacctctggcgatactggtaaagctgccatggccgggtttgccaatgttgatcagactcgcatcatcgtcttctatccaaaagatggtgtcagcgcaatccaaaaacagcagatggtgacccaaaccggagccaatactagtgttgttgcgatcaacggtaacttcgatgaggcccaaacaacggttaaaaaactgttaaacgaccaccaattacacgcggaattagccacccaccagttccaattctcaagcgctaattccatcaatattggtcgtttattcccacaagtggcctattatgtctacacctacgctcaacttatcaagcaggggcaaatcaagaacggtgatgagattaactttagtgttccaactgggaactttggggatattttagctggctactatgccaaacaactgggcacgcccattcataaactgatctgtgcttccaatcgcaataacgttctcaccgatttctttaataccgggacttatgataaaaaccgtgaattcttcttgacgagttcaccgtccatggacatcttagtctcaagtaacttggaacggctcctcttctacttgacaggatcagacgccacggcgactgctaaactaatgactgatttgcaaacgaccggccgttatacgattacaccggcaatgcgtgccaacttagctgatttttgggccggcttcgtgactgaaagccaagatcaagctgaaattcatcacctgaaccatgcccatcactacacaatcgatccacatacggccgtggcctcggcggttgccaaacagtatcaagccgcaaccagagatcagcggcccatggtggttgtttcaaccgctagtccgtataaattcccacaggccgtcctaacggcaattactggtgagcttagtgcggtagatggcctagccgcagttgatcagttacatgagttgattcaaacgcccattccagcaacggtcacagccctccgtactgcgcccgtgcgccataagcgggttgcggatgttgatgatatgggaacgaccattaaaacaattttaaatcttaactag

SEQ ID NO: 34958 - protein, 497 aa, Lactobacillus plantarum WCFS1
MKTLYRSTRETASHTMTSSQAVLQGLTPDGGLFVPVTLPTANFDFDQLATMSYQEVAYEVLKLFFTDYTADELHACIDAAYGDQFDDPQIAPVTKHGQQYYLELFHGPTIAFKDLALQILPHLMTTAVKKNHLQAEVVILAATSGDTGKAAMAGFANVDQTRIIVFYPKDGVSAIQKQQMVTQTGANTSVVAINGNFDEAQTTVKKLLNDHQLHAELATHQFQFSSANSINIGRLFPQVAYYVYTYAQLIKQGQIKNGDEINFSVPTGNFGDILAGYYAKQLGTPIHKLICASNRNNVLTDFFNTGTYDKNREFFLTSSPSMDILVSSNLERLLFYLTGSDATATAKLMTDLQTTGRYTITPAMRANLADFWAGFVTESQDQAEIHHLNHAHHYTIDPHTAVASAVAKQYQAATRDQRPMVVVSTASPYKFPQAVLTAITGELSAVDGLAAVDQLHELIQTPIPATVTALRTAPVRHKRVADVDDMGTTIKTILNLN

SEQ ID NO: 34959 - DNA, 1410 bp, Pseudomonas syringae pv. tomato str. DC3000
  CDS (1)..(1410): transl_table=11
atgcgctatatcagtactcgcgggcaagcgcctgcattgaatttcgaagacgtgctgttgactggtctggccagcgatggtggtctgtatgtgccggaaaacctgccacgtttcacacaggaagagatcgcttcctgggccggcctgccgtatcacgagctggccttcaaggtgatgcgcccgttcgtcgccggaagcattccggacgccgatttcaagaagatcctggaagaaacctatggtgtcttcgcccacagctcggtcgcgccgttgcgccagttgaacggcaacgagtgggtgcttgagctgttccacggcccgaccctggcgttcaaggactttgccctgcaattgctcggtcgtttgctggactacgtgctggccaagcgcggcgagcgtgtggtgatcatcggtgccacttcgggcgataccggttctgcggccatcgaaggctgccgtcgctgcgataacgtcgatatcttcatcctgcacccgaacaaccgtgtatcggatgttcagcgtcggcagatgaccaccatctttggcgataacattcataacatcgcagtggaaggcaacttcgacgactgccaggaaatggtcaaggacagcttcgccgatcagagcttcctcaagggcacgcgtctggtggcggtcaactcgatcaactgggcgcggatcatggcccagatcgtctactacttccatgcatcgctgcagttgggcggcccggcgcgttcggtatcgttctcggtgccgaccggcaacttcggcgacatcttcgccggttacctggcgcgcaacatggggctgccggtcaatcaactgatcgttgccaccaaccgcaatgacattctgcaccgcttcatgagcggcaatcagtacgtcaaggaaaccctgcacgcaacgttgtcgccgtcgatggacatcatggtctcgtcgaatttcgagcgcctgctgttcgacatgcacggtcgcaacggctcggcgattgccgatctgatgagcaatttcaggcagggcggcggtttcagtgtcgaagaagagcgctggaccgaaacccgcaaactgttcgactcgctggcggtcagcgacgaagacacctgcaagaccatcgccgaggtgttcgccagcaccggcgagctgctcgacccgcacactgctatcggtgtgaaggctgcccgcgaatgccgtcgcagccttgacaccccgatggtgattctggggacggcacatccggtcaagttcgctgagtcagtggagaaggccggtgtaggaaaagcgctggagctacctgcacatttgtctgatttgttcgagcgtgacgaacgttgcaccgtgttgccaaatgacctgaaagccatacaggcgtttgtcagccagcatggcaatcgcggcaaaccgctctga

SEQ ID NO: 34960 - protein, 469 aa, Pseudomonas syringae pv. tomato str. DC3000
MRYISTRGQAPALNFEDVLLTGLASDGGLYVPENLPRFTQEEIASWAGLPYHELAFKVMRPFVAGSIPDADFKKILEETYGVFAHSSVAPLRQLNGNEWVLELFHGPTLAFKDFALQLLGRLLDYVLAKRGERVVIIGATSGDTGSAAIEGCRRCDNVDIFILHPNNRVSDVQRRQMTTIFGDNIHNIAVEGNFDDCQEMVKDSFADQSFLKGTRLVAVNSINWARIMAQIVYYFHASLQLGGPARSVSFSVPTGNFGDIFAGYLARNMGLPVNQLIVATNRNDILHRFMSGNQYVKETLHATLSPSMDIMVSSNFERLLFDMHGRNGSAIADLMSNFRQGGGFSVEEERWTETRKLFDSLAVSDEDTCKTIAEVFASTGELLDPHTAIGVKAARECRRSLDTPMVILGTAHPVKFAESVEKAGVGKALELPAHLSDLFERDERCTVLPNDLKAIQAFVSQHGNRGKPL

SEQ ID NO: 34961 - DNA, 1281 bp, Vibrio parahaemolyticus RIMD 2210633
  CDS (1)..(1281): transl_table=11
atgaagctttacaatataaaagaaaatgatgaacaagtttcctttggtcaagccgttcgccaaggattaggtcgtaatcaaggcctatttttcccatcggaattaccaaaatttgaagatgttgatgcgttgttagcagaagattttgtctctcgtagcactaagattctatcagcactgattggtgatgaactggcggaagagcaagttaacgcaatggttgatgcagcattccaattcccagcaccaatcaaccaagtaaaagaaggcgtttacgcgctagaacttttccatggcccgacgttagcatttaaagatttcggtggccgcttcatggcgcaatcccttgcggcagtttctaatggcggcaagatcaccattttgaccgcaacgtcaggcgatactggcgcagctgttgcgcatgctttctacggaatggaagacattaatgttgtgattctttacccgaaaggcaagatcagcccgctccaagagaagctgttttgtacactaggtaaaaacatccacactgtagcaatcaatggtgatttcgatgcatgtcaagcattggtgaaacaagcgtttgatgatgcggagctgcgtgaagagatcggtctgaactctgcaaactcaatcaacatcagccgcttgatggcacaaatctgttactactttgaagctgcggcgcaaatgagtaagcaagagcgtgaaaacctcgtggtttctgtaccaagcggtaactttggtaacctaacagcaggtctattagcaaaagcgctaggtttacctatcaaacgttttattgctgctaccaacgcgaatgacacggtgcctcgttacctcgaaacgggcaaatgggagccaaaaccaacggttgcaaccacttcaaatgcgatggacgtgagccaaccgaacaactggccgcgtatcgaagagctgtgccgtgtgaaagagtggggcctagagacactaggtaaaggcgcagtttctgatgaacaaagcgcacaatcagtaaaagacttgtacgcattaggctacctatgtgagccacacggtgcgattgcttaccgcgtattggaagagcaactgcaagaaggtgaaacgggtctgttcttgtgtactgcgcaccctgcgaagttcaaagaggttgtagatgatattcttcaaacggatatcgaattgcccgcaccactagctaaacatgctgcgatggagttgttgtctgaagatcttgatgcggattttgatgcactaaaaacagtattacgtcgcgttcagtaa

SEQ ID NO: 34962 - protein, 426 aa, Vibrio parahaemolyticus RIMD 2210633
MKLYNIKENDEQVSFGQAVRQGLGRNQGLFFPSELPKFEDVDALLAEDFVSRSTKILSALIGDELAEEQVNAMVDAAFQFPAPINQVKEGVYALELFHGPTLAFKDFGGRFMAQSLAAVSNGGKITILTATSGDTGAAVAHAFYGMEDINVVILYPKGKISPLQEKLFCTLGKNIHTVAINGDFDACQALVKQAFDDAELREEIGLNSANSINISRLMAQICYYFEAAAQMSKQERENLVVSVPSGNFGNLTAGLLAKALGLPIKRFIAATNANDTVPRYLETGKWEPKPTVATTSNAMDVSQPNNWPRIEELCRVKEWGLETLGKGAVSDEQSAQSVKDLYALGYLCEPHGAIAYRVLEEQLQEGETGLFLCTAHPAKFKEVVDDILQTDIELPAPLAKHAAMELLSEDLDADFDALKTVLRRVQ

SEQ ID NO: 34963 - DNA, 1287 bp, Salmonella enterica subsp. enterica serovar Typhi Ty2
  CDS (1)..(1287): transl_table=11
atgaaactctataatctgaaagaccataatgagcaggtcagctttgcgcaggccgtcacgcaagggctgggcaaacagcagggacttttttttccgcacgatctgccggagtttagcctgacggaaattgatgagatgctcaaccaggactttgtcagccgtagcgcaaagatcctctcggcatttattggcgatgaaataccgcagcaaattctggaagagcgcgtccgcgcggcgtttgctttcccggcgccggtagcgcaggtagaaagtgatgtcggctgcctggagctgttccatggtccgacgctggcctttaaagacttcggcgggcgttttatggcgcaaatgctgacgcatatcagcggcgataaaccggtgacgattctgaccgcaacgtcaggcgataccggcgcggcggtggctcacgcgttctatggcctggaaaatgtgcgggtcgtcattctctacccgcgcggtaaaatcagtccgttgcaggaaaaactgttctgtacgctgggcggcaacattgagaccgtggcgatcgacggcgatttcgacgcttgccaggcgctggtgaaacaggcatttgatgacgaagaactgaaaacggcgctggggttgaattcggctaattcgattaatatcagccgcctgctggcgcaaatttgctactactttgaagccgtggcgcaactgccgcagggggcgcgtaaccaactggtgatctccgtacccagcggcaactttggcgatttgacggcaggactgctggcgaagtcgttaggcctaccggtgaaacgctttatcgccgccaccaacattaacgatacggtgccgcgttttctgcatgacgggaagtgggcgccaaaagcgacgcaggcgaccctgtcgaatgcgatggatgtcagccagccgaataactggccgcgtgtggaggagctattccgccgtaaaatctggcgtctgactgagctgggctatgcggcggtggatgacactacgacacaacagacgatgcgcgagctgaaagcgaaaggttatatctcggaacctcatgcggcggtagcgtatcgggcattacgcgaccagttaaaccctggcgagtatggcttgtttctcggaacggcgcatccggcgaagtttaaagaaagcgtggagtccattctgggagaaacgctggcattgcctgaagcgctcgccgaacgcgccgatctgccgttgctttcacatcatctgcctgcggattttgccgccctgcgtaagctaatgatgacccgccagtaa

SEQ ID NO: 34964 - protein, 428 aa, Salmonella enterica subsp. enterica serovar Typhi Ty2
MKLYNLKDHNEQVSFAQAVTQGLGKQQGLFFPHDLPEFSLTEIDEMLNQDFVSRSAKILSAFIGDEIPQQILEERVRAAFAFPAPVAQVESDVGCLELFHGPTLAFKDFGGRFMAQMLTHISGDKPVTILTATSGDTGAAVAHAFYGLENVRVVILYPRGKISPLQEKLFCTLGGNIETVAIDGDFDACQALVKQAFDDEELKTALGLNSANSINISRLLAQICYYFEAVAQLPQGARNQLVISVPSGNFGDLTAGLLAKSLGLPVKRFIAATNINDTVPRFLHDGKWAPKATQATLSNAMDVSQPNNWPRVEELFRRKIWRLTELGYAAVDDTTTQQTMRELKAKGYISEPHAAVAYRALRDQLNPGEYGLFLGTAHPAKFKESVESILGETLALPEALAERADLPLLSHHLPADFAALRKLMMTRQ

SEQ ID NO: 34965 - DNA, 1302 bp, Bacteroides thetaiotaomicron VPI-5482
  CDS (1)..(1302): transl_table=11
atgaaatactatagtacaaataaacaagcgccgatggcttctttgcaggaggctgtagtaaaagggcttgccgccgacagaggacttttcatgccaatgactatcaagcctcttccccaagaattttacgatacgatagatactttgtcttttcaggagattgcttatcgggtagccgatgctttctttggcgaagacatccccaccgatacactgaaacaaatagtgtatgacacattgagctttgatgtaccgttggtgaaagtggcggacaacatctattctctggaacttttccacggaccgactctggctttcaaagatgtaggcggccgttttatggcacgtttgctgggttacttcatcaagaaagaagggcagaaggatgtgaatgtgctggtagcgacttccggtgatacgggaagtgccgttgccaacggttttctgggtgtggaaggtattcatgtatatgtactttacccgaaaggaaaagtcagcgaaatacaggaaaagcagttcactactttgggacagaatattaccgctctcgaagtggacggaacgtttgatgattgccaggcactggtaaaagctgctttcatggataaggaactgaatgaacatctgtcactgacttccgccaattctatcaatgtagcccgcttcctgccgcaagcattctattatttctatgcttatgcacagctgaaacgtgccggaaaagccgataatgccgtgatttgtgttcctagcggaaacttcggaaacatcacagccggattgttcggcaaaaagatgggcttgcctgtcaaacgttttattgctgccaacaatcgcaacgatatattctatcaatacctgcaaacaggtaaatataatccccgcccatccgttgcaaccatagccaacgctatggacgtaggtgatccgagcaactttgcccgtgtgcttgacttgtatggcggttctcatgctgacatttctgctgagatttcgggaactacatataccgacgaacagattcgcgaaacggtgaaagaaacctggaaggaacatcattacctgctcgatcctcatggagcttgcggttatcgcgctttgcaagaaggactgaaacaaggcgaaacgggagtcttccttgaaactgctcatcctgctaaattcctggaaactgtagaaagtatcattggcgaagcggtagaaatacctgccaagttgcaggaatttatgaaaggggagaaaaagagcttgcaaatgacgaaagaatttgcagacttcaagaagtatttgctttctgtttga

SEQ ID NO: 34966 - protein, 433 aa, Bacteroides thetaiotaomicron VPI-5482
MKYYSTNKQAPMASLQEAVVKGLAADRGLFMPMTIKPLPQEFYDTIDTLSFQEIAYRVADAFFGEDIPTDTLKQIVYDTLSFDVPLVKVADNIYSLELFHGPTLAFKDVGGRFMARLLGYFIKKEGQKDVNVLVATSGDTGSAVANGFLGVEGIHVYVLYPKGKVSEIQEKQFTTLGQNITALEVDGTFDDCQALVKAAFMDKELNEHLSLTSANSINVARFLPQAFYYFYAYAQLKRAGKADNAVICVPSGNFGNITAGLFGKKMGLPVKRFIAANNRNDIFYQYLQTGKYNPRPSVATIANAMDVGDPSNFARVLDLYGGSHADISAEISGTTYTDEQIRETVKETWKEHHYLLDPHGACGYRALQEGLKQGETGVFLETAHPAKFLETVESIIGEAVEIPAKLQEFMKGEKKSLQMTKEFADFKKYLLSV

SEQ ID NO: 34967 - DNA, 1407 bp, Nitrosomonas europaea ATCC 19718
  CDS (1)..(1407): transl_table=11
atgtcgcccagaacatttactgaaatactgctgaccggcctggcacccgatggcgggctggccatgccggaagcctatccggaaatcagctcggcaacgcttgaatcctggcgaccactcgactacccgtcacttgcgttcgaaattctgtcgcgtttcatggatgacatccctgccgacgatttgcgcacactgatcgcacgcacttatacccctgagatatttggcagtaaagacattacacccgtccagacgctcgaacccgatctgcatctgctacacctgtccaatggacccacgctggcattcaaggatattgccatgcagttcatgggtaacctgttcgaatacgttctggcaaaaaataacgatgaactgaatattctgggtgcaacgtccggcgataccggctccagtgcggaatatgccatgcgcgggaaacaggggatccacgtattcatgctgtcaccctacggcaaaatgagtgcttttcagacagcacagatgttttcactccaggatgaaaacatcttcaacatcgcgatcgaaggggtattcgacgactgccaggatatcgtcaaaacagtcagtaatgatcaggcattcaaacagcaatatcggatcggcgccgtcaattcaatcaactgggctcgcatcgccgcacaggtggtttactacttcaaggcctatttcgcagtcacccgttccagcgacgaagtggtctcgttttccgtcccttccggcaacttcggcaacatttttgccggccatgtcgctcgtatgatgggtctgccaattcggaaactgattctggcaaccaatgaaaacgatgtactggatgaatttttccgcaccggtttgtaccggccacgctcaacggctgaaaccaggcaaaccagcagcccctcgatggatatttccaaggcatcgaatttcgagcgattcatcttcgatctgaccggccgggatgctgaacgagtcaaagaactctggaaatcggtcgatcagggaggatcattcgatctctccggtaccgatttatgggcaaaaatcagagattttggcattacatcagggaccagctgccacgctgaacgcatcaataccattcgcgagatataccgcaaattcaacgtcctgatcgacacacacactgcagatgggctgaaaacagggatggcattgcgcgaacctggcattccactgatctgcctggaaacggcactacccgtcaaatttgcggacagcatccgggaagcggtcggatttgaactggaacagccggccgggtacgataatctggaaagtctgccccaacgttttgaacgcatggcggcagatgccgaacaggtcaaacagttcatggccagccggatcgattcatcagacaaaataaacaagtcataa

SEQ ID NO: 34968 - protein, 468 aa, Nitrosomonas europaea ATCC 19718
MSPRTFTEILLTGLAPDGGLAMPEAYPEISSATLESWRPLDYPSLAFEILSRFMDDIPADDLRTLIARTYTPEIFGSKDITPVQTLEPDLHLLHLSNGPTLAFKDIAMQFMGNLFEYVLAKNNDELNILGATSGDTGSSAEYAMRGKQGIHVFMLSPYGKMSAFQTAQMFSLQDENIFNIAIEGVFDDCQDIVKTVSNDQAFKQQYRIGAVNSINWARIAAQVVYYFKAYFAVTRSSDEVVSFSVPSGNFGNIFAGHVARMMGLPIRKLILATNENDVLDEFFRTGLYRPRSTAETRQTSSPSMDISKASNFERFIFDLTGRDAERVKELWKSVDQGGSFDLSGTDLWAKIRDFGITSGTSCHAERINTIREIYRKFNVLIDTHTADGLKTGMALREPGIPLICLETALPVKFADSIREAVGFELEQPAGYDNLESLPQRFERMAADAEQVKQFMASRIDSSDKINKS

SEQ ID NO: 34969 - DNA, 1545 bp, Helicobacter hepaticus ATCC 51449
  CDS (1)..(1545): transl_table=11
atgaatacatatgatgagaatctcttatattccacgcgagatgatacagcctttggcgtaagctttcaacacgctttattacacccgaatgcacaacataatgggctttatacctttaccaaactccctcatatcagcctagaggacattgaaaattttacaaaccttacttataccaagctgtgcgtagatatttttaatcgcttaaaacttggaatccatagaagtgtgcttgaagaagcacttttaagctataaaaattttgatgattcttataatcctgctccacttaaagtggtaaatgagaatctctttatgcttaatctcttctctggtcctacgcgtgcttttaaagatatggcacttcaaccctttggacgtttgtttgcacatcttgctacgcaagatacaagaccctatcttattctcactgccacaagcggtgataccggacctgcaaccttgcagagctttgcaaatcaacctcatatcagggttgtgtgcatttatccttatggaggcactagcgatgtgcagcgattacaaatgacaactcataccgcaccaaatgtaaaagttattggtattgagggggattttgatggagcgcaaagtgcattaaaaaaacttatcgcaaatgtagattttgtaaaaaaactcaaagagcaaggatttgcgctctctgctgcaaattctgtgaatattggacgcattgcatttcaaatcatttattatttttgggcgtatgtaaaattacttaaagatggacatattacacttggggaaaagatctctgttgtcgtgccaagtggcaactttggcaatattttaggagcgttttttgcaaaaaaaatgggtttaccccttgagcgtcttgtgagcgcttctaatgcaaataatatcttaagtgattttataaacacgggtgtatatgatatttctaagcgaaacttaattaaaaccaaatcccctgctatggatattttaaaaagttcaaatgtagagagagtgctttatgcactctttggcgcacaacgcacaaagcaattaatggatagccttgataaaaaagatttttatagcctcactgctgaagagttaagcttacttcagcaagattttagtgcatttgaatgtgatgataaaatgtgtatgcagagcattgcgcaaggattcaaagaaggattactacttgacccgcatagtgcgattgcttattttgtagcaaaaaatttgcaaaaaagtagtgtaattggcaaaagtgtatttcttgccacagcagaatggagtaaattcgccccaagtgtgagagaagcactcaaagaagcagacatcattaaaaacacacaagaagcttatgaaataagcgataaacaagccattgatgagatttgctcactctcttgtgccaataatcctatcaaagcacccgagcagattctccaactttttagcaaaaaagaagtgcagcaagacattatccctattccacagctagagatgtgtataatgcgatgggtgagatgttctctcaagcattcttaa

SEQ ID NO: 34970 - protein, 514 aa, Helicobacter hepaticus ATCC 51449
MNTYDENLLYSTRDDTAFGVSFQHALLHPNAQHNGLYTFTKLPHISLEDIENFTNLTYTKLCVDIFNRLKLGIHRSVLEEALLSYKNFDDSYNPAPLKVVNENLFMLNLFSGPTRAFKDMALQPFGRLFAHLATQDTRPYLILTATSGDTGPATLQSFANQPHIRVVCIYPYGGTSDVQRLQMTTHTAPNVKVIGIEGDFDGAQSALKKLIANVDFVKKLKEQGFALSAANSVNIGRIAFQIIYYFWAYVKLLKDGHITLGEKISVVVPSGNFGNILGAFFAKKMGLPLERLVSASNANNILSDFINTGVYDISKRNLIKTKSPAMDILKSSNVERVLYALFGAQRTKQLMDSLDKKDFYSLTAEELSLLQQDFSAFECDDKMCMQSIAQGFKEGLLLDPHSAIAYFVAKNLQKSSVIGKSVFLATAEWSKFAPSVREALKEADIIKNTQEAYEISDKQAIDEICSLSCANNPIKAPEQILQLFSKKEVQQDIIPIPQLEMCIMRWVRCSLKHS

SEQ ID NO: 34971 - DNA, 1332 bp, Candidatus Blochmannia floridanus
  CDS (1)..(1332): transl_table=11
atgaaattatataatattaaacaacgtgaagaaacggttaattttttacatgctcttatacagggtttaggtaagaatcaaggattattttttccagttgatttgcctaggttttcaatttctgaaattgataatttattaggaatgcagtttgtagaacgtagtgcatatatattatctaaatttataggatctgagttttcacaaaattgtattttaaattgtgtagaaaaagcgtttaattttccggttccactaaattttattaaaaaaaatgttgcaattttagaactttttcatggaccgactttagcatttaaagattttggtagtcgattaatggctcaaatgttattgataactatggaaacacataggtatgaacaagaaaaacctatggttattcttactgctacttctggagatactggagcagctgtagcccatgcattttatggattagataatatacatgtgattattttgtatcctagaaataagattagtatattacaagaaaaattattttgtacattgggtgaaaatatatcaactatatcggtagaaggagattttgatatttgtcaagatttggttaaaaaatcttttaatgatgatttattaaaaaaaatgctgtatttaaattctgctaattctattaatatcagtagggtattagcacaggtttgttattattttgaagcattggctcaaattgattatgaaagacgatatcataataatttgattatttcagttcctagtggaaattttggtaatttaacagcaggtttgttagctcagagttctgggttgcctataaaaaattttattgctgcgaccaatatcaatgatacagtacctagatttttaacatctggactgtggaatccattacctactatttcaactttttctaatgctatggatgtgagttgtcctagcaattggagtagaatagaagaattatttagacgggaaaataggtctatttttgaattacagtttggtagtgtaaatgatgaattaataaaaaaaacagtgcaagaagttgcaaatttgggatatatttgtgatccacatactgcagtagcgtatcgattattggatgatcagttatgttctgatgaatttggaatatgtttgggaactgctcatccagctaagttcaaggaattggtagaatgttttttagaggataaagtaagtttgttagtacccaatgctctgaaaaaacatatgatattaccagttctttcacataaaatatcggggagttttgctgaattaagggatttgatttatgatataaccgtaaaatctgatatctag

SEQ ID NO: 34972 - protein, 443 aa, Candidatus Blochmannia floridanus
MKLYNIKQREETVNFLHALIQGLGKNQGLFFPVDLPRFSISEIDNLLGMQFVERSAYILSKFIGSEFSQNCILNCVEKAFNFPVPLNFIKKNVAILELFHGPTLAFKDFGSRLMAQMLLITMETHRYEQEKPMVILTATSGDTGAAVAHAFYGLDNIHVIILYPRNKISILQEKLFCTLGENISTISVEGDFDICQDLVKKSFNDDLLKKMLYLNSANSINISRVLAQVCYYFEALAQIDYERRYHNNLIISVPSGNFGNLTAGLLAQSSGLPIKNFIAATNINDTVPRFLTSGLWNPLPTISTFSNAMDVSCPSNWSRIEELFRRENRSIFELQFGSVNDELIKKTVQEVANLGYICDPHTAVAYRLLDDQLCSDEFGICLGTAHPAKFKELVECFLEDKVSLLVPNALKKHMILPVLSHKISGSFAELRDLIYDITVKSDI

SEQ ID NO: 34973 - DNA, 1407 bp, Bordetella pertussis Tohama I
  CDS (1)..(1407): transl_table=11
atgaagtacatctcgacccgcggcggcatggccccgcagagtttctccgacatcctgctcgaaggcctggcgcccgacggcgggctggccatccccgagcagctgccgcaagtcgacgcggccacgctggagtcctggcgcgggctctcgtacgccgacctggccttcgaagtgctgtcgctgttcgccaccgacatcccggccgaggacctgcgcgggctgacgcgcgcagcctaccggcagggcgtgttcaagagcgaagacatcgtcccggtgcgcgagctggggcaggggttgcagctgctgggcctgtccgaggggcccacgctggccttcaaggacatggcgatgcagtttctcggccaggtcttcgagtacgtcctgacgcggcgcggcaccacgctgaacatcgtcggcgccacctccggcgataccgggtcggcggccgagtacgcgctgcgcggcaagcagggcgtggccgtgttcatgctgtcgccgcacggccgcatgagcgcattccagcgcgcccagatgtactcgctgcaggatgagaacattcacaatatcgcggtgcggggcgtgttcgaccaggcgcaggacatcgtcaagcagctggccggcgacctggcgttcaagacgcgctatcgcctgggcgcggtcaactcgatcaactgggcgcgcatcgccgcccaggtggtgtactacttccacggctggctgcgtgccgcgcccaagggtggcgaggtgtcgttcgcggtgccttcgggcaacttcggcaacatcctgtccgggcacatcgcgcgcggcatgggcgtgccgatccgccgcctggtgctggccaccaacgagaacaacgttctcgaggagttcttccgcaccggcggttaccgcccgcgcggtcccgagcacacctacgccacctccagcccgtcgatggacatctcgcgcgcctcgaacttcgagcgcttcgtgttcgacctggtcgggcgcgaccccggccgcgtggcgtcgctgtgggccgacctggcgcgcgacggcagcttcgacctgtcggcgctcaagccgcagttcgaaacccgctacgggttcgtggccggcgccagctcgcacgccgaccgcctgcagaccatacgcaataccttcgacgaaaccggcgtgctggtcgacccgcacacggccgatggcatcaaggtggcgcgccagttcgtcgagccgggcgtgcccatgctggtgctcgagacggccctgccggccaagttcgcggaaaccatcgaggcggcgctcgggcgcaccgtgccgccgccggctgacctggccgacctcgaatcgctgccccagcgcgtgacgctcatggactgcgacgcgcaggcggtgcgggccttcatcgaggcccacgccaaagtgtaa

SEQ ID NO: 34974 - protein, 468 aa, Bordetella pertussis Tohama I
MKYISTRGGMAPQSFSDILLEGLAPDGGLAIPEQLPQVDAATLESWRGLSYADLAFEVLSLFATDIPAEDLRGLTRAAYRQGVFKSEDIVPVRELGQGLQLLGLSEGPTLAFKDMAMQFLGQVFEYVLTRRGTTLNIVGATSGDTGSAAEYALRGKQGVAVFMLSPHGRMSAFQRAQMYSLQDENIHNIAVRGVFDQAQDIVKQLAGDLAFKTRYRLGAVNSINWARIAAQVVYYFHGWLRAAPKGGEVSFAVPSGNFGNILSGHIARGMGVPIRRLVLATNENNVLEEFFRTGGYRPRGPEHTYATSSPSMDISRASNFERFVFDLVGRDPGRVASLWADLARDGSFDLSALKPQFETRYGFVAGASSHADRLQTIRNTFDETGVLVDPHTADGIKVARQFVEPGVPMLVLETALPAKFAETIEAALGRTVPPPADLADLESLPQRVTLMDCDAQAVRAFIEAHAKV

SEQ ID NO: 34975 - DNA, 1407 bp, Bordetella parapertussis 12822
  CDS (1)..(1407): transl_table=11
atgaagtacatctcgacccgcggcggcatggccccgcagagtttctccgatatcctgctcgaaggcctggcgcccgacggcgggctggccatccccgagcagctgccgcaagtcgacgcggccacgctggagtcctggcgcgggctctcgtacgccgacctggccttcgaagtgctgtcgctgttcgccaccgacatcccggccgaggacctgcgcgggctgacgcgcgcagcctaccggcagggcgtgttcaagagcgaagacatcgtcccggtgcgcgagctggggcaggggttgcagctgctgggcctgtccgaggggcccacgctggccttcaaggacatggcgatgcagtttctcggccaggtcttcgagtacgtcctgacgcggcgcggcaccacgctgaacatcgtcggcgccacctccggcgataccgggtcggcggccgagtacgcgctgcgcggcaagcagggcgtggccgtgttcatgctgtcgccgcacggccgcatgagcgcattccagcgcgcccagatgtactcgttgcaggatgagaacatccacaatatcgcggtgcggggcgtgttcgaccaggcgcaggacatcgtcaagcagctggccggcgacctggcgttcaagacgcgctatcgcctgggcgcggtcaactcgatcaactgggcgcgcatcgccgcccaggtggtgtactacttccacggctggctgcgtgccgcgcccaagggtggcgaggtgtcgttcgcggtgccttcgggcaacttcggcaacatcctgtccgggcacatcgcgcgcggcatgggcgtgccgatccgccgcctggtgctggccaccaacgagaacaacgttctcgaggagttcttccgcaccggcgtttaccgcccgcgcggtcccgagcgcacctacgccacctccagcccgtcgatggacatctcgcgcgcctcgaacttcgagcgcttcgtgttcgacctggtcgggcgcgaccccggccgcgtggcgtcgctgtgggccgacctggcgcgcgacggcagcttcgacctgtcggcgctcaagccgcagttcgaaacccgctacgggttcgtggccggcgccagctcgcacgccgaccgcctgcagaccatacgcaataccttcgacgaaaccggcgtgctggtcgacccgcacacggccgatggcatcaaggtggcgcgccagttcgtcgagccgggcgtgcccatgctggtgctcgagacggccctgccggccaagttcgcggaaaccatcgaggcggcgctcgggcgcaccgtgccgccgccggctgacctggccgacctcgaatcgctgccccagcgcgtgacgctcatggactgcgacgcgcaggcggtgcgggccttcatcgaggcccacgccaaagtgtaa

SEQ ID NO: 34976 - protein, 468 aa, Bordetella parapertussis 12822
MKYISTRGGMAPQSFSDILLEGLAPDGGLAIPEQLPQVDAATLESWRGLSYADLAFEVLSLFATDIPAEDLRGLTRAAYRQGVFKSEDIVPVRELGQGLQLLGLSEGPTLAFKDMAMQFLGQVFEYVLTRRGTTLNIVGATSGDTGSAAEYALRGKQGVAVFMLSPHGRMSAFQRAQMYSLQDENIHNIAVRGVFDQAQDIVKQLAGDLAFKTRYRLGAVNSINWARIAAQVVYYFHGWLRAAPKGGEVSFAVPSGNFGNILSGHIARGMGVPIRRLVLATNENNVLEEFFRTGVYRPRGPERTYATSSPSMDISRASNFERFVFDLVGRDPGRVASLWADLARDGSFDLSALKPQFETRYGFVAGASSHADRLQTIRNTFDETGVLVDPHTADGIKVARQFVEPGVPMLVLETALPAKFAETIEAALGRTVPPPADLADLESLPQRVTLMDCDAQAVRAFIEAHAKV

SEQ ID NO: 34977 - DNA, 1407 bp, Bordetella bronchiseptica RB50
  CDS (1)..(1407): transl_table=11
atgaagtacatctcgacccgcggcggcatggccccgcagagtttctccgacatcctgctcgaaggcctggcgcccgacggcgggctggccatccccgagcagctgccgcaagtcgacgcggccacgctggagtcctggcgcgggctctcgtacgccgacctggccttcgaagtgctgtcgctgttcgccaccgacatcccggccgaggacctgcgcgggctgacgcgcgcagcctaccggcagggcgtgttcaagagcgaagacatcgtcccggtgcgcgagctggggcaggggctgcagctgctgggcctgtccgaggggcccacgctggccttcaaggacatggcgatgcagtttctcggccaggtcttcgagtacgtcctgacgcggcgcggcaccacgctgaacatcgtcggcgccacctccggcgataccgggtcggcggccgagtacgcgctgcgcggcaagcagggcgtggccgtgttcatgctgtcgccgcacggccgcatgagcgcattccagcgcgcccagatgtactcgctgcaggatgagaacatccacaatatcgcggtgcggggcgtgttcgaccaggcgcaggacatcgtcaagcagctggccggcgacctggcgttcaagacgcgctatcgcctgggcgcggtcaactcgatcaactgggcgcgcatcgccgcccaggtggtgtactacttccacggctggctgcgtgccgcgcccaagggtggcgaggtgtcgttcgcggtgccttcgggcaacttcggcaacatcctgtccgggcacatcgcgcgcggcatgggcgtgccgatccgccgcctggtgctggccaccaacgagaacaacgttctcgaggagttcttccgcaccggcgtttaccgcccgcgcggtcccgagcacacctacgccacctccagcccgtcgatggacatctcgcgcgcctcgaacttcgagcgcttcgtgttcgacctggtcgggcgcgaccccggccgcgtggcgtcgctgtgggccgacctggcgcgcgacggcagcttcgacctgtcggcgctcaagccgcagttcgaaacccgctacgggttcgtggccggcgccagctcgcacgccgaccgcctgcagaccatacgcaataccttcgacgaaaccggcgtgctggtcgacccgcacacggccgatggcatcaaggtggcgcgccagttcgtcgagccgggcgtgcccatgctggtgctcgagacggccctgccggccaagttcgcggaaaccatcgaggcggcgctcgggcgcaccgtgccgccgccggctgacctggccgacctcgaatcgctgccccagcgcgtgacgctcatggactgcgacgcgcaggcggtgcgggccttcatcgaggcccacgccaaagtgtaa

SEQ ID NO: 34978 - protein, 468 aa, Bordetella bronchiseptica RB50
MKYISTRGGMAPQSFSDILLEGLAPDGGLAIPEQLPQVDAATLESWRGLSYADLAFEVLSLFATDIPAEDLRGLTRAAYRQGVFKSEDIVPVRELGQGLQLLGLSEGPTLAFKDMAMQFLGQVFEYVLTRRGTTLNIVGATSGDTGSAAEYALRGKQGVAVFMLSPHGRMSAFQRAQMYSLQDENIHNIAVRGVFDQAQDIVKQLAGDLAFKTRYRLGAVNSINWARIAAQVVYYFHGWLRAAPKGGEVSFAVPSGNFGNILSGHIARGMGVPIRRLVLATNENNVLEEFFRTGVYRPRGPEHTYATSSPSMDISRASNFERFVFDLVGRDPGRVASLWADLARDGSFDLSALKPQFETRYGFVAGASSHADRLQTIRNTFDETGVLVDPHTADGIKVARQFVEPGVPMLVLETALPAKFAETIEAALGRTVPPPADLADLESLPQRVTLMDCDAQAVRAFIEAHAKV

SEQ ID NO: 34979 - DNA, 1410 bp, Chromobacterium violaceum ATCC 12472
  CDS (1)..(1410): transl_table=11
atgcgatatatcagtacccgcggcggcatggcgccgctgccgttttgcgaaaccgtgctgatgggcctggcgccggacggcggcctgctgttgccggagcgctatcccaggatcgaccgagccacgctggatgcctggcggcaactgggctacgccgagctggcgttcgagatcatccgcctgttcgccgacgacatcccggcggacgacctgaaaggcatcgtcgcgcgggcctaccgcgcggaaaccttcggcagcgaggccatcgcgccgatcaagcgcctgcatgacggcctggccatcctggagctgtccaacggtccgacgctggcgttcaaggacatggcgatgcagttcctcggccagctgttcgaatacgtgctggagaagcgcggcgagacgttgaacatcctgggcgccacctccggcgacaccggttccgccgccgaatacgcgatgcgcggcaagcgcggcatccaggtgttcatgctgagcccggacggcaagatgagcgccttccagcgcgcgcagatgtacagcctgcaggatgagaacatccacaacatcgccatccagggcatgttcgacgactgccaggacatcgtgaaggcggtgcagaacgaccacgccttcaaggcgaagcataagatcggcacggtcaattcgatcaactgggcccgggtcgtcgcccaggtggtgtactacttccacggctatttccgcgccacggcgagcaacgacgagagagtcagcttctgcgtgccgtccggcaacttcggcaacgtctgcgccggccacgtggcgcgccagatgggcctgcccatcgagcgcctgatcgtcgccaccaacgagaacgacgtgctggacgaattcttccgcaccggccgctacgcgccgcgcggcagcgagcgcacctatgtcacctccagcccgtcgatggacatctccaaggcctccaacttcgagcgcttcgttttcgatctggtcggccgcgacggggccgaggtcaagcggctgtgggccgaggtggacgccggcggcggcttccagctggatgctgacgccatgggccgggtgcgcgacgcgtttggcttcgtgtccggcaagagcgcgcacgccgaccgcattgcgaccatccgccaggtggacgctgaggacggcgtggtggtggacacccacaccgccgacggcatcaaggcggcgcgcgagctgcgccgcgaaggcgaaaccgtggtttgtctggaaaccgcgctgccggccaagttcgccgagaccatccgcgaggcgctggaccgcgatccgccgcggccggccggtttcgaggcgctggaatcgctgccgcagcgggtggtgacgctgccggcggacgccggcaaggtgaaggcgctgatcgagaagacgctgggctga

SEQ ID NO: 34980 - protein, 469 aa, Chromobacterium violaceum ATCC 12472
MRYISTRGGMAPLPFCETVLMGLAPDGGLLLPERYPRIDRATLDAWRQLGYAELAFEIIRLFADDIPADDLKGIVARAYRAETFGSEAIAPIKRLHDGLAILELSNGPTLAFKDMAMQFLGQLFEYVLEKRGETLNILGATSGDTGSAAEYAMRGKRGIQVFMLSPDGKMSAFQRAQMYSLQDENIHNIAIQGMFDDCQDIVKAVQNDHAFKAKHKIGTVNSINWARVVAQVVYYFHGYFRATASNDERVSFCVPSGNFGNVCAGHVARQMGLPIERLIVATNENDVLDEFFRTGRYAPRGSERTYVTSSPSMDISKASNFERFVFDLVGRDGAEVKRLWAEVDAGGGFQLDADAMGRVRDAFGFVSGKSAHADRIATIRQVDAEDGVVVDTHTADGIKAARELRREGETVVCLETALPAKFAETIREALDRDPPRPAGFEALESLPQRVVTLPADAGKVKALIEKTLG

SEQ ID NO: 34981 - DNA, 1449 bp, Wolinella succinogenes DSM 1740
  CDS (1)..(1449): transl_table=11
gtgctcatcgagaccagagggaacgattcccaaaagccactaaatgtcgaattcagccacgccatcctcaatcctgatgccagctttggcggactctacgcacctgaggcactccctattttagggcaagaggcgagaatgcgccttaaggatctctcctacgccaaactagccaaagagatctttgccctcttgggaattgagcttgaagaggagattcttcatgaggctctctcgctctatgaccattttgatgaccctgcccaccctgcgcccttggtaccgctaaagagagacttgagcgtcctagagctctaccatggacccacgcgtgcctttaaagatatggcgcttcagccctttggccgtatcctctcccgtctcgctcagcaaagaggagagcgctacctcatcctcgccgccaccagcggagatacaggccctgccacactagagagcttcgccaaccaaaaaaatatccaagtcgtctgcctctatccccaagggggcaccagcgatgttcagcgcctccagatgaccacacaagaggcggagaatctcaaagtgctgggcatccatggagactttgatgatgcccaagctgcgctcaaaagccttcttaaggatgaccattttagggcctctttgacccaaaaagggatttcgctctccgcggccaactccgtcaattttggccgaatcgcctttcagattatctaccacgcctacgcctctctaaggagcgattctcccattgatgttattgttcctagcggtaattttgggaacgctttgggcgctttttacgccaagcttatgggctttgggattggcaaaatcatgatcgctagcaacgccaacaacattctcactgagctcatcaccacaggaatctacgatattcgaggaaaaaccctcaaaaaaactcaatctcctgccatggatatcctcaaaagctccaatgtggagcgtgttctctttgcactcttgggtgcgcaaagaaccaaaaccctcatggagaatctcgaaaaagagggcttttatgccttaaacgcttcggaattagaaaagcttcaagagcactttgtagcgctcttttgtgaggatagcgaaggggagagaatcatccgtgaatacgccaaagcaggctaccttatggatccccacaccgccacaggaatcaaggcctacgaagacctagagagcgactctcaaaccctcaaggtgctctgctcgaccgcggagtggacgaagtttgcccccaccgtcgccaaagccctaggcaaagagggggtgcgtgatttagaggcactccactatgtgaaagaggcgctaggggtggagatccaccctgccatcaattctctctttgccaaaaaagagattcataccgaagtgatccaaaaagagaagatcaaggaacagattctcgcgtggctaggagcctag

SEQ ID NO: 34982 - protein, 482 aa, Wolinella succinogenes DSM 1740
MLIETRGNDSQKPLNVEFSHAILNPDASFGGLYAPEALPILGQEARMRLKDLSYAKLAKEIFALLGIELEEEILHEALSLYDHFDDPAHPAPLVPLKRDLSVLELYHGPTRAFKDMALQPFGRILSRLAQQRGERYLILAATSGDTGPATLESFANQKNIQVVCLYPQGGTSDVQRLQMTTQEAENLKVLGIHGDFDDAQAALKSLLKDDHFRASLTQKGISLSAANSVNFGRIAFQIIYHAYASLRSDSPIDVIVPSGNFGNALGAFYAKLMGFGIGKIMIASNANNILTELITTGIYDIRGKTLKKTQSPAMDILKSSNVERVLFALLGAQRTKTLMENLEKEGFYALNASELEKLQEHFVALFCEDSEGERIIREYAKAGYLMDPHTATGIKAYEDLESDSQTLKVLCSTAEWTKFAPTVAKALGKEGVRDLEALHYVKEALGVEIHPAINSLFAKKEIHTEVIQKEKIKEQILAWLGA

SEQ ID NO: 34983 - DNA, 1299 bp, Photorhabdus luminescens subsp. laumondii TTO1
  CDS (1)..(1299): transl_table=11
atgaaactgtataacttgaaagacaacagcgagcaggtgagttttgcacaagcagtcaaacagggattaggcaaacagcaagggcttttctttccgcaagatttacccgaattcagtcgtgaagaaattgaccacctattgaaactggattttgtcacccgcagcggttgcattctctccgcgtttattggcgatgaaattccgccagaacaactggcaacacgaattaagaacgcttttacttttccggcacctgttaccaacgtggaaaatgatgttgcaacattggaattattccacggcccgactctggcatttaaggattttggtggccgttttatggcgcaaatattggcacaagttgctggtgaacagccagtaactatcctgactgcgacttccggcgatacaggagcagcagtagcgcacgccttttatgggctaaataatgtacaggtggtgatcctctatccacagggcaaaatcagcccgttacaggagaaattgttctgtacattgggtggtaatattcacacggtggcgattgatggcgatttcgatgattgccaggcgttggttaaacaggcgtttgatgatcaggagttgaaacaggctctgtatctcaattcagctaactcaattaacatcagccgcttgttggcacaaatttgctattactttgaagcggttgctcagctaccggaagatcagcgtgaacaactggttatttctgtaccgagtgggaattttggtgatttaaccgcgggtttattggcaaaatcgatgggattgccggtaaaacgctttatcgctgccacgaatgttaacgatacagttcctcgttatctagaggatggaaaatggttgcctcatcagaccgttgccacgctttccaacgcaatggatgtgagccagccaaacaactggccacgtattgaagaactgttccaccgtaaatcctggccattgagcgaattgggatatggtgtagtcaatgatgacgtgactaaagaaacgattaaggaactggctaaacacggttatatctctgaacctcatgccgcggtggcttatcgtgtcttgcgtgatcaattacaagaaggtgaatacggattatttcttggtacggcgcatccagcgaaatttaaagagagtgtggagcagattctgggtgaggaattacccttgcccaaagctttggctgaacgggctgatctggagttgctatcccattacttaccggcagattttgctaagttgcgagctttcttgatggaaagagcacccaagtcattatga

SEQ ID NO: 34984 - protein, 432 aa, Photorhabdus luminescens subsp. laumondii TTO1
MKLYNLKDNSEQVSFAQAVKQGLGKQQGLFFPQDLPEFSREEIDHLLKLDFVTRSGCILSAFIGDEIPPEQLATRIKNAFTFPAPVTNVENDVATLELFHGPTLAFKDFGGRFMAQILAQVAGEQPVTILTATSGDTGAAVAHAFYGLNNVQVVILYPQGKISPLQEKLFCTLGGNIHTVAIDGDFDDCQALVKQAFDDQELKQALYLNSANSINISRLLAQICYYFEAVAQLPEDQREQLVISVPSGNFGDLTAGLLAKSMGLPVKRFIAATNVNDTVPRYLEDGKWLPHQTVATLSNAMDVSQPNNWPRIEELFHRKSWPLSELGYGVVNDDVTKETIKELAKHGYISEPHAAVAYRVLRDQLQEGEYGLFLGTAHPAKFKESVEQILGEELPLPKALAERADLELLSHYLPADFAKLRAFLMERAPKSL

SEQ ID NO: 34985 - DNA, 1281 bp, Vibrio vulnificus YJ016
  CDS (1)..(1281): transl_table=11
atgaagctttacaacataaaagaaaatgacgaacaagtttcctttggccaagccgtgcgccaagggttaggccgtaatcaggggctatttttcccagcagaattgccgaaatttgacgatatcgatgcattgcttgcgcaagattttatctcgcgcagcactgcgattctttccgcgttaattggtgatgagctagcagaagacaaagttaactcaatggtggatgcggcattccagttcccagcaccgattaaacaagtgaaagagggtgtctacgcgcttgaactgttccatggaccgacacttgccttcaaagacttcggtggccgctttatggctcagtcgttggctgcggtttctgatggtggaaaaatcactattctaacagcgacatcgggtgatacaggagccgcggttgcacacgctttttacggtatggaagacatcaatgtggtcattctttatccgaaaggcaaaatcagcccattgcaagaaaagctgttctgcacattaggcaaaaacattcacacggtagcgatcaatggtgactttgacgcgtgtcaggcgctggtgaaacaagcgtttgatgatgcagaactgcgtgaagagattggtctaaactctgcaaactcaatcaacattagccgtttgatggcgcaaatctgctactactttgaagcagcggcgcaaatgagtaagcaagagcgcgagaatctggtggtttcggtaccaagcggcaactttggtaaccttactgcgggtttgcttgctaaagctctggggttaccgattaagcgctttatcgctgcaacgaatgccaatgataccgtgcctcgttacctagaaaccggtaaatgggatccaaaaccgactgtcgcgacgacctcaaatgccatggacgtgagtcagcctaataactggccacgaattgaagagttgtgccgtgtgaaagagtggggtttggaaactttgggcaaaggtgctgtgtctgatgagcaaagtgcgcaatcggtgaaagatctctattcacttggttacctgtgtgaaccacatggtgcgattgcctatcgtgtgctggatcagcagctacaagaaggtgaaactggcttgttcctctgtaccgcacatccggcgaagtttaaggaagtggtcgatgacattcttggcagtgacatcgatttgccagcacctctagcaaaacatgccgtgatggagctgctctctgaagagttggatgcggattttacggctctgaaagaagtattgcgtcgcgtgcaataa

SEQ ID NO: 34986 - protein, 426 aa, Vibrio vulnificus YJ016
MKLYNIKENDEQVSFGQAVRQGLGRNQGLFFPAELPKFDDIDALLAQDFISRSTAILSALIGDELAEDKVNSMVDAAFQFPAPIKQVKEGVYALELFHGPTLAFKDFGGRFMAQSLAAVSDGGKITILTATSGDTGAAVAHAFYGMEDINVVILYPKGKISPLQEKLFCTLGKNIHTVAINGDFDACQALVKQAFDDAELREEIGLNSANSINISRLMAQICYYFEAAAQMSKQERENLVVSVPSGNFGNLTAGLLAKALGLPIKRFIAATNANDTVPRYLETGKWDPKPTVATTSNAMDVSQPNNWPRIEELCRVKEWGLETLGKGAVSDEQSAQSVKDLYSLGYLCEPHGAIAYRVLDQQLQEGETGLFLCTAHPAKFKEVVDDILGSDIDLPAPLAKHAVMELLSEELDADFTALKEVLRRVQ

SEQ ID NO: 34987 - DNA, 1449 bp, Corynebacterium diphtheriae NCTC 13129
  CDS (1)..(1449): transl_table=11
atgaaatatatttcaacgcgcgacgcatcatcaacacctgctcattttaccgatatcttgcttggtggacttgcccccgatggtggtctttacctgccagaacagtatccacaactgaccgaagagctgcttgagcagtggcgtacgttgttagaagacaaagggtatgcggcactcgctgctgaagtattaaagctatttatcgacgacatctccgcggccgatattgaaaaaatcaccgcccgtgcgtacaccacgcccaagttttctgatgaagacatcgttccagtgacaaaactggagaacaacatttatatcggtcatctttcagaaggcccaacggcggcatttaaagacatggcaatgcagttgctcggcgaacttttcgaatatgagctagggcgtcgcggcgaatccctgaatatcctcggtgcaacctccggtgacaccggatcgtctgcggaatacgccatgcgtggccgaaaggggatccgcgtttttatgctcacccctgcgggacgtatgaccccattccaacaggcacagatgttcggtcttgatgacccaaatatctttaatatcgcgctcgatggtgtattcgacgattgccaagatgtagttaaagcagtgtcgggggattcggaatttaaaaagaactaccgaatcggagcggtgaactccattaactgggcacgtcttgtagcacaagttgtgtattacatttcttcttggcttcgcgttaccgatagcaacgatcaaaaagtgagcttttgtgtaccaaccggcaacttcggtgacatctgcgcagggcatattgcaaaacagatgggtcttcctatcgatcgccttatcgttgcaacgaatgaaaatgatgtgctcgatgagtttttccgcaccggcgattaccgtgtacgcagctctgcagatacgtatgaaacgtcttctccgtccatggacatttcgcgtgcttctaactttgaacgctttgtatttgatcttctcggacgagatgcaggcagagtagctgatctatttggtgtacaagtcaagcagggtggattcagcttggctcaggacccagcattcgccgaggccgcgaatcgttacggatttgcctccggtaaatctacccatgctgatcgcgttgccacgattgcagactgctacgaaaatcgtggcatgatgatcgaccctcataccgcggacggtgtgaaagtagcacgagattgggcctgcgatattgattcgccaattgtctgccttgaaactgcgcttccagttaagttcgctgacactatctgcgaagcaacaggacgcgaacctgagatgccagagcgctttgccaacatcatggatgctcaacgtcgtgtaactgatcttcctaatgacgtatcagtggtcaaagacttcattgtgactagcatcgaggaaaccgaaaaaactcagtag

SEQ ID NO: 34988 - protein, 482 aa, Corynebacterium diphtheriae NCTC 13129
MKYISTRDASSTPAHFTDILLGGLAPDGGLYLPEQYPQLTEELLEQWRTLLEDKGYAALAAEVLKLFIDDISAADIEKITARAYTTPKFSDEDIVPVTKLENNIYIGHLSEGPTAAFKDMAMQLLGELFEYELGRRGESLNILGATSGDTGSSAEYAMRGRKGIRVFMLTPAGRMTPFQQAQMFGLDDPNIFNIALDGVFDDCQDVVKAVSGDSEFKKNYRIGAVNSINWARLVAQVVYYISSWLRVTDSNDQKVSFCVPTGNFGDICAGHIAKQMGLPIDRLIVATNENDVLDEFFRTGDYRVRSSADTYETSSPSMDISRASNFERFVFDLLGRDAGRVADLFGVQVKQGGFSLAQDPAFAEAANRYGFASGKSTHADRVATIADCYENRGMMIDPHTADGVKVARDWACDIDSPIVCLETALPVKFADTICEATGREPEMPERFANIMDAQRRVTDLPNDVSVVKDFIVTSIEETEKTQ

SEQ ID NO: 34989 - DNA, 1506 bp, Rhodopseudomonas palustris CGA009
  CDS (1)..(1506): transl_table=11
atggtgaggccgatttcacccgcgcgtgagactgaactcgatcaatatcaaaggcttgggcgttcggccgggcctttggaggcacccttgacgacctatgtttcgacccggggcgatgccccgcgcctcggcttttgcgacgtgatgctgaccgggctcgcccgtgacggcggactgtatattcccgaagtctggccgcagctcactcccgacaccatcaccagcctgttcggccggccgtattgggaggtcgccgtcgaggtgatccggccgttcgtggccggcgagatttccgatgccgagcttggccgcatggcgagcgacgcctatgccactttccgacacccggcggtggtgccgctgcgccagaccggctcgagccagttcgtgctcgagctgttccatggcccgacgctggcgttcaaggacgtcgcgatgcagctgctgtcgcggctgatggatcacgtgctggagaagcgcaagcagcgcaccacgatcgtggtggcgacttccggcgacaccggcggcgccgcggtcgaagccttcgccaacctgaacaatgtcgacctcgtcgtgctgtttccgcacggccggatctccgacgtgcagcggatgatgatgaccacgtcgggcgctccgaacgtgcatccgctggcgatcgagggccacttcgacgactgccaggcgatcgtgaaggggctgttcaatcatcataagttccgcgaccaggtggcgctgtccggcgtcaactcgatcaactgggcgcggatcgtggcgcaggtggtgtattacttcaccagcgcggtcgcgctcggcgcgccgaatcgcgtggtcgatttcaccgtgccgaccggcaatttcggcgacatcttcgccggttacgtcgccaagaagatgggcctgccggtgcgccggctgaagatcgccgccaacgtcaacgacatcctggcgcgtacgctgaagaccggcatttacgaagtgcgcgaggttcacgccaccacctcgccgtcgatggacatccaggtgtcgtcgaatttcgagcgactgctgttcgaggcctccggacgcgatgcctcgctgatccggtcgctgatgggctcgctggctcagtccggccgcttcgtgctgccggatgcggtgctcgccgcggtgcgcgaggagttcgacgccggccgcgccgacgaggcggaaaccgaatcggcgatccgtgccgcctggcgcgaggccggcgatctgatcgatccgcacactgcggtggcgctggcagtggccgatcgcgacaccacagattcgagcgtgccgaacatcgtgctgtcgaccgcccatgcggcgaagttcccggatgctgtggaagctgcttgcggtatccggccggagctgccggcctggctcgatgggctgatgagcaaaaccgaatcgatcaagatcatgccgcgcgatcaggtggcgatcgaacgtcacgtgctggcggtgagccgcgccgccaagcaaggagccgccggatga

SEQ ID NO: 34990 - protein, 501 aa, Rhodopseudomonas palustris CGA009
MVRPISPARETELDQYQRLGRSAGPLEAPLTTYVSTRGDAPRLGFCDVMLTGLARDGGLYIPEVWPQLTPDTITSLFGRPYWEVAVEVIRPFVAGEISDAELGRMASDAYATFRHPAVVPLRQTGSSQFVLELFHGPTLAFKDVAMQLLSRLMDHVLEKRKQRTTIVVATSGDTGGAAVEAFANLNNVDLVVLFPHGRISDVQRMMMTTSGAPNVHPLAIEGHFDDCQAIVKGLFNHHKFRDQVALSGVNSINWARIVAQVVYYFTSAVALGAPNRVVDFTVPTGNFGDIFAGYVAKKMGLPVRRLKIAANVNDILARTLKTGIYEVREVHATTSPSMDIQVSSNFERLLFEASGRDASLIRSLMGSLAQSGRFVLPDAVLAAVREEFDAGRADEAETESAIRAAWREAGDLIDPHTAVALAVADRDTTDSSVPNIVLSTAHAAKFPDAVEAACGIRPELPAWLDGLMSKTESIKIMPRDQVAIERHVLAVSRAAKQGAAG

SEQ ID NO: 34991 - DNA, 1386 bp, Geobacter sulfurreducens PCA
  CDS (1)..(1386): transl_table=11
atgcgctacatcagcaccagaggaaccattcagcccattcgcttcaaggacgcggtcatgatggggctcgccaccgatggggggcttcttctgccggaaacaataccggccatcgaccgggacacgctcgcggcatggaagacgttgccgttccaggaactcgccttccggatcatctcccgctacgccgacgacatcccggccgatgacctgcggagtctcattgagcgctcctatgcaacctttgatcatcccgacgtgacgccggtcgtggagcggggcggcctccacatcctcgaactcttccacggacccacgcttgcattcaaggacgtggctcttcagttcctgggcaacctcttcgaatatctgctgcaggagcggaacgaacggatgaacatcgtcggcgccacgtccggcgacacgggaagtgccgccatttacggcgtgcgggggaaggagaacatcaacatcttcatcctccatccccacggcaaaacctcgccggtccaggcgctacagatgaccacggtactcgatcccaacgtgcacaacattgccgtgcgcggcacctttgacgattgccagaacatcgtcaagagcctgttcaacgacctccccttcaaggaacgctacgctctcggcgccgtcaactccatcaactgggcccgggtactggcccaggtggtctattacttcctctcttacttccgcgtggcaaagaccattggcgacgaagttgtcttctcggttcccacgggcaacttcggcgatatttttgccggctacgtggccaagcgaatgggactgcccattgccagactgctcctggccaccaacgaaaacaacattctcgcccgcttcatcaatgacggagactattcgctgagtgccgtggtgcccactgtgtcgccgtccatggacatccagctggcttcaaacttcgaacgctatgtctactatctcttcggagaagaccctgccagggtccgcgaggcattcgccacgcttcccgcccggggccggatcgtcttctccgatgccgaaatggagcacgtgcgcaccgaattccttgcctgttcggttaaccagcaggagaccgtcgacaccatcgcctccttcaaccgtgaaaccggctacctccttgatccccacacggcagtgggtgtccgggctgcccggcaactggtgaccgacggcacgccggtcatctgccttgccactgctcacccggcgaagttcgccgatgccgtggtgcgcgcagtagggttcgaaccgccgcgtcctccatcgctcatgggaattgaagacctgccgagccggtgcgaggtgcttgacgcacgtatcgagcagatcaggaccttcatcgaggagaaggcccgctaa

SEQ ID NO: 34992 - protein, 461 aa, Geobacter sulfurreducens PCA
MRYISTRGTIQPIRFKDAVMMGLATDGGLLLPETIPAIDRDTLAAWKTLPFQELAFRIISRYADDIPADDLRSLIERSYATFDHPDVTPVVERGGLHILELFHGPTLAFKDVALQFLGNLFEYLLQERNERMNIVGATSGDTGSAAIYGVRGKENINIFILHPHGKTSPVQALQMTTVLDPNVHNIAVRGTFDDCQNIVKSLFNDLPFKERYALGAVNSINWARVLAQVVYYFLSYFRVAKTIGDEVVFSVPTGNFGDIFAGYVAKRMGLPIARLLLATNENNILARFINDGDYSLSAVVPTVSPSMDIQLASNFERYVYYLFGEDPARVREAFATLPARGRIVFSDAEMEHVRTEFLACSVNQQETVDTIASFNRETGYLLDPHTAVGVRAARQLVTDGTPVICLATAHPAKFADAVVRAVGFEPPRPPSLMGIEDLPSRCEVLDARIEQIRTFIEEKAR

SEQ ID NO: 34993 - DNA, 1419 bp, Treponema denticola ATCC 35405
  CDS (1)..(1419): transl_table=11
atgaaattttacgatatagccaataaaaatatactggtctcttttaaagaagctgtgctaagaggttttaactctgaaacggggggagtttttatgccggcggagctcggaaaaataagtccggcaatgatttatcgaaatcccccttcttcttttagggatatatgctttgaaattataaaaaacttttgcggcgatgaaattcctgaagacgatctaatgtctataatagctcaattttatcctcacaggctcccgataaacccgatagcgccgacaacctatgttttggagctttttcacgggcccacctgtaactataaggacataggatcaggctttttagcctatcttttagagtactttaataaagacgaagacggagatattaacctcattgtaccggcctccggcgaaagagcttgtgccattgcatcagccgtttcccaagtgaagagagttaatgcccttcttttataccccaaggactccttaacggaaatacaggaaaactttctttcttcaatgcctaaaaatgtatatccgatttgtgtggaaggatcctttgaagattgtgaaaatcttgtggataaagcactcaaagatgaagatttattgaaaaaactaaaacttgtttcaggaggagccttaaacatagcgccccttttacctcaagttgctttttttgtctatgcagccttaaccgtattataccgcagcgattacgataacaaaattgaaaatccttcaatcataacttcaataccgtcaggaagtttttcggcccttacggcagccctgattgcaaaaaaaatgggaaccccgatcaaagggcttatttcgaccgaaaacgaaaatcatgctctttcggattggctcacagccggagatttaaaaaaaagaacggcaataaaaaccaatacgccggctctggatattcccaatacaatcaactttaagcggatgcttcaaatttacgatgttgaagaacttagaagacttataattccttattggcttgacggtatgggaacaatatcttccgtaagaacatgtaatgaaagaacaggctatataatagatccttacggtgctatggcttggacagcctggcaggatgtctataatggggcactgaattcattaaagagaaaaacatcagaaaatgatgaggacccggggatacctttaaaatatgcaaatattgaaacatgggcatctgcaattcacagaagcagtatggtgggaatagttctacaaacctctcatcctgcaaagttccccgaaattatgaaaccggccattggcaggccgccgtctttacccgataaacttgaaagtttacaatatcggcttttaaaagcggttaatatcctgcccgattactcaatgtttaaagaatgggctttgtcccactaa

SEQ ID NO: 34994 - protein, 472 aa, Treponema denticola ATCC 35405
MKFYDIANKNILVSFKEAVLRGFNSETGGVFMPAELGKISPAMIYRNPPSSFRDICFEIIKNFCGDEIPEDDLMSIIAQFYPHRLPINPIAPTTYVLELFHGPTCNYKDIGSGFLAYLLEYFNKDEDGDINLIVPASGERACAIASAVSQVKRVNALLLYPKDSLTEIQENFLSSMPKNVYPICVEGSFEDCENLVDKALKDEDLLKKLKLVSGGALNIAPLLPQVAFFVYAALTVLYRSDYDNKIENPSIITSIPSGSFSALTAALIAKKMGTPIKGLISTENENHALSDWLTAGDLKKRTAIKTNTPALDIPNTINFKRMLQIYDVEELRRLIIPYWLDGMGTISSVRTCNERTGYIIDPYGAMAWTAWQDVYNGALNSLKRKTSENDEDPGIPLKYANIETWASAIHRSSMVGIVLQTSHPAKFPEIMKPAIGRPPSLPDKLESLQYRLLKAVNILPDYSMFKEWALSH

SEQ ID NO: 34995 - DNA, 1539 bp, Candida glabrata CBS 138
  CDS (1)..(1539)
atgtcatcctctcaagtgtatagatccactagatccgctgagcaagagtctaagtccttcgaggaagctgttattcaaggtctggctactgatggtggtcttttcgttccatctaccatcccaacagtctccaaggacacacttttcagcaagtggtctaagttgtctttccaagagttggcttttgaaattatgagactatacattgactctaaggaaattccagatgctgacttgaagtccttgattgaaagatcctactccactttccgctccgatgacgttaccccattggtaaagaacgttaccggcaatgaagagaacttgcatgttcttgaattattccatggtccaacatatgctttcaaagatgtcgctttgcaatttgtcggtaacttgtttgaatacttcctgcaaagaattaacaaggacttacctgaagaacaaagaaaaagattaactgtcgttggtgctacttctggtgacacaggttctgcagcaatctacggtctaagaggtaaaaaggatgtttctgtcttcatcctttacccaactggtagaatttctccaatccaagaagaacaaatgactactgttgaggacaagaacgtccaaactttgtccgtcgctggtacatttgataactgtcaagatatagttaaagccatctttggtgacaaggatttcaactccagacacaatgttggtgctgttaactccatcaactgggctagaattttggctcaaatgacctattacttctactcttacttcagagccacagatggcaaggaaggtaaggttaagtttgttgtgccaagtggtaatttcggtgatatattagctggttactttgctaagcaaatgggtttacctgttgaaaagctagttattgccactaatgaaaatgatattcttgacagatttttgaagaccggtacttacgaaagatctgccaatgttttggctacacactctccagctatggacatcttgatttcttccaactttgaaagattactgtggtaccttgctcgtgaatttttggctgaaaaggatgacttgaaggctggggagatcatcaacacttggtttacccaattgaagacagaaggtaaatttgttgttgataaatctatcatcgagggtgctctacaggattttgcatctgaaagagtctctaatgaggaaactattcaaactatcaagaaaatgtatgaaatttcccaaaatccaaagaagtatgtcttggatcctcatacagccgttggtgtttgtgccaccgaaagattgatcaagaaagataacgataaggagattcaatatgtttccctgtcaacagcccacccagccaagtttgccgaagctgttaaccaagctttgtcctcctttgatggctactcattcgaatctgacgttctgccagctgaattgaagagattgtctactctaccaaagaagataaagttggttgaaaaggccgatgtcactttggtaaagaacactattgaagaagaacttgccaagatgggtttgtaa

SEQ ID NO: 34996 - protein, 512 aa, Candida glabrata CBS 138
MSSSQVYRSTRSAEQESKSFEEAVIQGLATDGGLFVPSTIPTVSKDTLFSKWSKLSFQELAFEIMRLYIDSKEIPDADLKSLIERSYSTFRSDDVTPLVKNVTGNEENLHVLELFHGPTYAFKDVALQFVGNLFEYFLQRINKDLPEEQRKRLTVVGATSGDTGSAAIYGLRGKKDVSVFILYPTGRISPIQEEQMTTVEDKNVQTLSVAGTFDNCQDIVKAIFGDKDFNSRHNVGAVNSINWARILAQMTYYFYSYFRATDGKEGKVKFVVPSGNFGDILAGYFAKQMGLPVEKLVIATNENDILDRFLKTGTYERSANVLATHSPAMDILISSNFERLLWYLAREFLAEKDDLKAGEIINTWFTQLKTEGKFVVDKSIIEGALQDFASERVSNEETIQTIKKMYEISQNPKKYVLDPHTAVGVCATERLIKKDNDKEIQYVSLSTAHPAKFAEAVNQALSSFDGYSFESDVLPAELKRLSTLPKKIKLVEKADVTLVKNTIEEELAKMGL

SEQ ID NO: 34997 - DNA, 1533 bp, Kluyveromyces lactis NRRL Y-1140
  CDS (1)..(1533)
atgtcacaaagctatagatctacgaggtcatccgatcctgctaccaaaacttttgaggaagctattattcaaggtttagcttcggatggtggtttgtttatcccatccattattcctcaagtctctaaatcagagttgtttgataaatggtctaagttgtccttccaggatttagcttttgaaatcatgaaactttatgtttcttcagatgaaattccagaagccgacttaaaggatttgattactagatcttactctactttccgttctcatgatgttaccccgttagccaagaatgtcactggctctaatgaaaatcttcatgtcctagagcttttccatggaccaacttacgcatttaaagatgttgctttacaatttgtgggtaacctgtttgaatatttcttgcaaagacataacgatggattaccagccgaccaaagaaagaaaattacagtggtcggtgcaacttctggtgacactggttctgctgccatttatggtctaagaggtaagaaggatgttgctgttttcattctttacccaacaggtagaatctccccaattcaagaagaacaaatgaccaccgttcctgacaaaaacgtgcaaaccttatccgttaaaggcactttcgataactgtcaagacattgtcaaggctatctttggtgacaaggaattcaactctaaacacaatgttggagctgtgaactcgattaattgggctagaattttggctcaaatcacatattacttctattcctatttcaaagctactaccggtaaagaagaaaaagtgaagtttgttgttccatcaggaaatttcggtgatattctagctggttactatgctaagaagatgggtttacctgttgagaagctagttattgccactaatgaaaatgacattttggacagatttttgaagaatggtgtgtatgaaagatcggacgatgtcgctgctacactatctccagccatggatatcttaatttcttctaactttgaaagactactttggtacttggctcgtgaatatgtggcctctggagacgatttgaaagcaggtgaaactgttaacaactggttccaagaattgaaatccaagggtaagttcgatgttcccgcttccttgattgatggcgccaagaaagatttcgattccgaacgagtcagcaatgaagaaactacagctaccataaagcaagtttacgagcaatcggtcaatccaaagcattacatcatagatccacataccgccgtcggtatttgcgccaccaaaacgcaaatcacaaaggataatgataacactatcaattatatctctttatccactgcacacccagctaagtttgccgatgctgttaacgaggctctttccagctttgatggttacagttttgaaaaggatgttttaccagaagaactcaagaagctatctacattggggaaaaagctaaaattggtggaaaaggcggatattgaactggtcaaacaaaccatcgaagaagagttagtgaagatggaagtttaa

SEQ ID NO: 34998 - protein, 510 aa, Kluyveromyces lactis NRRL Y-1140
MSQSYRSTRSSDPATKTFEEAIIQGLASDGGLFIPSIIPQVSKSELFDKWSKLSFQDLAFEIMKLYVSSDEIPEADLKDLITRSYSTFRSHDVTPLAKNVTGSNENLHVLELFHGPTYAFKDVALQFVGNLFEYFLQRHNDGLPADQRKKITVVGATSGDTGSAAIYGLRGKKDVAVFILYPTGRISPIQEEQMTTVPDKNVQTLSVKGTFDNCQDIVKAIFGDKEFNSKHNVGAVNSINWARILAQITYYFYSYFKATTGKEEKVKFVVPSGNFGDILAGYYAKKMGLPVEKLVIATNENDILDRFLKNGVYERSDDVAATLSPAMDILISSNFERLLWYLAREYVASGDDLKAGETVNNWFQELKSKGKFDVPASLIDGAKKDFDSERVSNEETTATIKQVYEQSVNPKHYIIDPHTAVGICATKTQITKDNDNTINYISLSTAHPAKFADAVNEALSSFDGYSFEKDVLPEELKKLSTLGKKLKLVEKADIELVKQTIEEELVKMEV

SEQ ID NO: 34999 - DNA, 1563 bp, Debaryomyces hansenii CBS767
  CDS (1)..(1563)
atgtcgcaatcacagtcttatagatctactcgttcaacaggtacgcaatccctttcttttgaggatgttgttatgaccggtttagctaaagatgggggattattcattccatcggttattccaaaattaccttcaaactttgttagtgaatggaaagatttgagtttccaagaattagctttcaacattatgagattgtacatcgatgaaggggaaattccaaatgaagatttgaaaagcttgattcatgcttcttattccacgttcagatctaaggatgtcactccacttaaatctattgatgagaagaatggtttgtacttgttggaattattccacggtccaacatatgcgtttaaggatgttgcgttacaattcgttggtaacttgttcgaatatttcttgaaaagacgtaatgcgaatgctaagagcgtagaagacagagaaaccattactgttgttggtgcaacctcaggtgatacaggttctgctgccatttacggcttaagaggtaagaaggatgtttctgtcttcatcttatacccaaccggccgtatttctccaattcaagaagaacaaatgacaactgttgaagatgctaatgtgcacactttatcagttaagggaaccttcgatgattgtcaggatattgtcaagcagatatttggagatgaagaattcaatgacaaatatcatgttggggctgtgaattctatcaactgggctcgtattttggctcaaatgacttactatttctattcatatttccaattggtcaagcaattaggagatgattcatccaagatcagattcgtcgttccatctggtaactttggtgatatcttggccggttactacgcaaaggagatgggcttgcctgctgacagattaatcattgccactaatgagaatgatatcttggacagattcatgaaatcaggtcgttatgagaaatttgctgctcaatctggaactgctgaagttaaggcaacttattccccagcaatggatattttgatttcgtccaattttgaaagattattgtggtatttgattagagataacttaactagtaatgatgacaaaaaggcaggtgaaatattaaatgactggatgcaacaattgaagtcaactggctctgtcgtcgctcctgaatctgttgttaaggctgccagagttaacttcagttcagaaagagtcactgatgaagatactgcgtctaccattaaacaaatttaccataatcatcctgaaaagtatgttttggacccacatacatctgttggtgtcactacttcttatagatttatcgaaagagattctgctgatggtgtctcgaacgtcaaatatatttcgttatccactgctcatccagcaaaatttgctgaagttgtcaactcagcattaactggagttgatggctattcgtttgaaaaggacgttttacctgatgaattgaaggctttatcttctaaagaaaagagattaaaattaattgatgaagcttcattagaaaaaatcaaagctactattgtcgaggaattagctaaggaaccaaaatga

SEQ ID NO: 35000 - protein, 520 aa, Debaryomyces hansenii CBS767
MSQSQSYRSTRSTGTQSLSFEDVVMTGLAKDGGLFIPSVIPKLPSNFVSEWKDLSFQELAFNIMRLYIDEGEIPNEDLKSLIHASYSTFRSKDVTPLKSIDEKNGLYLLELFHGPTYAFKDVALQFVGNLFEYFLKRRNANAKSVEDRETITVVGATSGDTGSAAIYGLRGKKDVSVFILYPTGRISPIQEEQMTTVEDANVHTLSVKGTFDDCQDIVKQIFGDEEFNDKYHVGAVNSINWARILAQMTYYFYSYFQLVKQLGDDSSKIRFVVPSGNFGDILAGYYAKEMGLPADRLIIATNENDILDRFMKSGRYEKFAAQSGTAEVKATYSPAMDILISSNFERLLWYLIRDNLTSNDDKKAGEILNDWMQQLKSTGSVVAPESVVKAARVNFSSERVTDEDTASTIKQIYHNHPEKYVLDPHTSVGVTTSYRFIERDSADGVSNVKYISLSTAHPAKFAEVVNSALTGVDGYSFEKDVLPDELKALSSKEKRLKLIDEASLEKIKATIVEELAKEPK

SEQ ID NO: 35001 - DNA, 1518 bp, Yarrowia lipolytica CLIB122
  CDS (1)..(1518)
atgaccacctacttttccacgcgatcatccaatgagcccatttccttcgaggctgccgtcatgaagggtctggcccccgatggaggtctttacattcccacctccatccccaagctgccctccgacttcctcaccaagtgggccgatctgagctttgccgagttggccttcgagattctcagtctgtacattcccgagtctgagatctcgcgagccgacctgaaggagcttgtcacccggtcctactctactttccgatccgacgaggtcacccccgtggttgagctcagcaaggagaagcagctttatctgctggagctattccacggccccacctacgccttcaaggacgtggctctgcagtttgttggcaacctgtttgagtacttcctgacccgaaagaacgttggcaaggagggcaccgaccgagatactcttaccgtcgtgggagccacctctggtgacaccggctccgccgccatctacggtctgcgaggcaagaaggacgtttctgtcttcattctgtaccccaccggccgagtctcccccatccaggaggaccagatgacgactgtctctgacgccaacgtgcacactatctccgttgctggtacctttgacgactgccaggacattgttaaacaggtctttggtgatgccgagtttaacgccaagcaccacgtcggtgccgtcaactctatcaactgggcccgaatcctcgcccagatcacctactacttccactccttcttccaggtccagaagaagttcggcacctcctccgccatcaagtactctgtccccactggtaactttggagacattctcgctggcttttacgcccgacgaatgggtctgcccatccaggagctcaccatcgccactaactccaacgacattctcgaccgattcctcaagactggctcctactcgaaatccgacggagcttctgccgaggtccatgccaccctttcccccgccatggacatcctcgtctcctccaactttgagcgattcctttggtacgttgcccgagagaacgttgcttcttcggacgctgaggctggagccaccctcaacaagtggatgcagtctctcaagaccgacggtgtcatcactgtcgacgccaaggtccttggagccgcaaagtccgagttttcctccgagcgagtctccgacgagcagactctcgagaccattaaggatgtgtttaccaacatttccaagggctatattttggacccccactcctctgttggtgtcactgccgctctgcgaaagcttgagggaaccgactccgtgtacattgctctgtcaaccgctcaccccgccaagttctctgacgccgtcgaccaggccctcaagggtctcgagggctacaactttgagcgagatgttctccctcaggagttcaaggactttgctaacaaggacaagaagaagctgttcagcaaggccgacgtcaaggaggtcgaaagcatcattgaggaggagctggccaaggagaagaagcagtaa

SEQ ID NO: 35002 - protein, 505 aa, Yarrowia lipolytica CLIB122
MTTYFSTRSSNEPISFEAAVMKGLAPDGGLYIPTSIPKLPSDFLTKWADLSFAELAFEILSLYIPESEISRADLKELVTRSYSTFRSDEVTPVVELSKEKQLYLLELFHGPTYAFKDVALQFVGNLFEYFLTRKNVGKEGTDRDTLTVVGATSGDTGSAAIYGLRGKKDVSVFILYPTGRVSPIQEDQMTTVSDANVHTISVAGTFDDCQDIVKQVFGDAEFNAKHHVGAVNSINWARILAQITYYFHSFFQVQKKFGTSSAIKYSVPTGNFGDILAGFYARRMGLPIQELTIATNSNDILDRFLKTGSYSKSDGASAEVHATLSPAMDILVSSNFERFLWYVARENVASSDAEAGATLNKWMQSLKTDGVITVDAKVLGAAKSEFSSERVSDEQTLETIKDVFTNISKGYILDPHSSVGVTAALRKLEGTDSVYIALSTAHPAKFSDAVDQALKGLEGYNFERDVLPQEFKDFANKDKKKLFSKADVKEVESIIEEELAKEKKQ

SEQ ID NO: 35003 - DNA, 1554 bp, Aspergillus nidulans FGSC A4
  CDS (1)..(1554)
atgtcgcatacgctgtcccaaaagtacctcagtacgcggggtggttcctacgggttcggcttcgaggaagccgttctcaaaggactggcctcagatggcggcctcttcattcccgaggagatcccctccctgcccgccggatgggagacggagtggcgcgatctgagttttgaggaactcgcattcaacatcatgtccctctacatctcaccctccgaaataccctctgaagatctcagggatatcattaagcgctcgtactcgaccttccgccaccccgagcgtacacccattgtcgagcttgacgcaaagcagaacctctaccttttagaactgttccacggccctacattcgctttcaaggatgttgcgcttcaatttctcggaaacttgttcgagtactttctcattgtcggcgctacatcaggagataccggaagcgcagctatttacggtgttcgagggaagaaagacgtttctatcttcatgatgttccctaccggaaaggtgtcgcccatccagcaggcccagatgactaccgtccttgacgccaacgtacataacctcactgttgagggatcatttgatgattgccaggatatcgtcaaggctcttttcgccgatcctgatatcaactccacccacaacctcgccgctatcaactggtcgcgtgtcatggcgcaagtgacctactacttctactcctacttctctcttgtcaaaaacaccggctccgatgactcgaaggtccgctttgtcgttccttctggcaacttcggggacatcctcgccggttggttcgctaagcagatgggtcttcccacggagaagctcgtcatcgctacaaacgagaacgacattcttgatcgctttttccgctccaacggacaatacaccaaaaattctggcgagggcagcggcgtcaaggagacacatagcccggccatggatatcctagtcagcagcaactttgagcgcctcctctggtttctcgcccttcgaacaaacacctcctctgactccattgaggagcgccgcaagcaagcctctgaaaacgtcagccaatggctctcacagctcaaaacggaaggcggcttcaccgtcccgcccgccgtcattgaggccgccaaaaccgaatttgaaagcgagcgcgttagcaacgacgagacgatcgcccaaatccgttcaacatacaactcctccttcccgtctaacctcactcccggtagtgctacctcttccaagactggcggctacattcttgacccccactccgccgtgggtgttgcggcttcactgcgctccatccagcgcaaccccggcacgaaacacatttctctttccacagctcatcctgccaagtttgctagcgctgtagatctcgctcttcgcgccgaggacggctatgacttcaccgaggtcctgcctcaggagttcattggtctcgagcagcgtgagagcagagttacgcccgttcgtgctggtgctgggtgggaaggtgtccgtgagattgtcaaggctgaagttgagcaggagcttgagggaaagcggtag

SEQ ID NO: 35004 - protein, 517 aa, Aspergillus nidulans FGSC A4
MSHTLSQKYLSTRGGSYGFGFEEAVLKGLASDGGLFIPEEIPSLPAGWETEWRDLSFEELAFNIMSLYISPSEIPSEDLRDIIKRSYSTFRHPERTPIVELDAKQNLYLLELFHGPTFAFKDVALQFLGNLFEYFLIVGATSGDTGSAAIYGVRGKKDVSIFMMFPTGKVSPIQQAQMTTVLDANVHNLTVEGSFDDCQDIVKALFADPDINSTHNLAAINWSRVMAQVTYYFYSYFSLVKNTGSDDSKVRFVVPSGNFGDILAGWFAKQMGLPTEKLVIATNENDILDRFFRSNGQYTKNSGEGSGVKETHSPAMDILVSSNFERLLWFLALRTNTSSDSIEERRKQASENVSQWLSQLKTEGGFTVPPAVIEAAKTEFESERVSNDETIAQIRSTYNSSFPSNLTPGSATSSKTGGYILDPHSAVGVAASLRSIQRNPGTKHISLSTAHPAKFASAVDLALRAEDGYDFTEVLPQEFIGLEQRESRVTPVRAGAGWEGVREIVKAEVEQELEGKR

SEQ ID NO: 35005 - DNA, 1533 bp, Candida albicans SC5314
  CDS (1)..(1533): transl_table=12
atgccttcctcatcacaagtttatagatctactagatctagccaaccagaagaattatcctttgaagatgttgttatgactgggttagctcccgatggtggattgtatttaccatcagctatccctcaattacctaaggactttttaagtaaatggactgacttatcatttaatgaattggcatttgagatattaagattatatatcaatgagaatgaaatccctaatgccgatttgaaagatttgattaccagatcatactcaacattcagatcatcagaagtgactccattgaaaaaacttgatgacaatttatacattttggaattatttcatggtcctacttatgcattcaaagatgttgctttacaatttgtcggtaatctttttgaatatttcttaactagaagaaatgcacaaaaggatttgactaaacaaccaagagatatcattaccgttgttggtgccacctcaggtgatactggatcagctgccatttatgggttacgtggtaagaaagacgtatctgtatttatattatatcctaccggaagaatcagtccaatacaggaagaacaaatgaccactgttgaagatgaaaatgtccatactttatcagtcaatggtacctttgatgattgtcaagatattgtcaaactggtatttggagacaaagaatttaatgataaatatcatgttggggctgtcaactctatcaattgggccagaattttggcacaacaaacatattatttctattcttatttccaattacagaagcaagctaaaactactaataaagtcagatttgttgttccttcgggtaatttcggagatattttggctggttattatgcttacagaatgggattaccagttgacaaattgattattgccaccaacgaaaacgacatcttggacagatttataaagtcaggtgaatacgccaaggaacaagaagttggtgtcaaggcaacttattctccagcaatggatattttgatctcatcgaattttgaaagattgttatggtacttaatcagagacaacgctcctgaagttaacaagagtgacgaaaaagccggtcaattattgaatgattggatgaaacagttgaaagaacaaggcaaattcaaagtcccagctgaggtcattgatgcagcaagacaagtttttgattcacaaagagttgataatgacactaccgtacaaaccatcaaacaagtgtacgacaagtctgctgataaatatgtcattgatcctcacactgctgttggtgtcactacttcttattcatttattgctaaagatacagagccaattcaatacatttctctttccactgctcatccagccaaattctccgaggttgtcaataaggctcttgattcatttgatggttactcatttgacaaagatgtcttgcctgcagaattgaaagctttgagcagtaaagagaagagaattaaattgattgatgaagctagtgttgaaaaagtcaaacaagccattaaagatgaattgaaattttag

SEQ ID NO: 35006 - protein, 510 aa, Candida albicans SC5314
MPSSSQVYRSTRSSQPEELSFEDVVMTGLAPDGGLYLPSAIPQLPKDFLSKWTDLSFNELAFEILRLYINENEIPNADLKDLITRSYSTFRSSEVTPLKKLDDNLYILELFHGPTYAFKDVALQFVGNLFEYFLTRRNAQKDLTKQPRDIITVVGATSGDTGSAAIYGLRGKKDVSVFILYPTGRISPIQEEQMTTVEDENVHTLSVNGTFDDCQDIVKSVFGDKEFNDKYHVGAVNSINWARILAQQTYYFYSYFQLQKQAKTTNKVRFVVPSGNFGDILAGYYAYRMGLPVDKLIIATNENDILDRFIKSGEYAKEQEVGVKATYSPAMDILISSNFERLLWYLIRDNAPEVNKSDEKAGQLLNDWMKQLKEQGKFKVPAEVIDAARQVFDSQRVDNDTTVQTIKQVYDKSADKYVIDPHTAVGVTTSYSFIAKDTEPIQYISLSTAHPAKFSEVVNKALDSFDGYSFDKDVLPAELKALSSKEKRIKLIDEASVEKVKQAIKDELKF

SEQ ID NO: 35007 - DNA, 1872 bp, Ustilago maydis 521
  CDS (1)..(1872)
atgccgaaaaccgtgcacatcttcagatcgactccgcgaaccaaccaatcatctaaacgtgcaaggcaaagaaagctgcttcaattacactccactcaagttaacattgctttgcatcaaacatcgaccacagcctcagcctctccattttctccacacgcagatatgaagtacctcagtaccaggggcggttccgagcgcctcacgtttgaggaggccgttcttaccggtctcgctcccaacggaggtcttttcatccctcaagagattccacagctgcccgccaactggcagtctgaatgggccgacctttccttttccgagctttcgcatcgcgtcctctccctttacattcctcaagacccagcagaaggcggcattccttctgccgatctccagcaggtcatcaacaagtcgtacgccacgttccgacacaaggacatcacaccgctcgtacgattggatgacaaagaatggtgtctcgaactctggcatggccccacatttgcgttcaaggatattgcgcttcagcttctcggcaacctgtttgaatactttttgcagcgaagaaacaacggcaagccggctgagcagcgtgagaagctcaccatcgtaggtgctaccagtggtgacaccggtagtgctgctatccagggtgtacgatccaagcaagacatctcgatctttattcttttcccccatggccgtgtcagccccattcaggaagcgcagatgactactgtgctcgacgacaatgtccataacgtttccgtccaaggcacatttgacgactgccaggacgtcctcaaggcgctcctctctgacgccgaatttaacgccaagcaccgtttgggtgccgttaactcgatcaattgggcgcgtatccttgctcagatagtctactacttcgccgcatactttagcttccgcaagcagctcggtttgtctgcttcccagtctacacccaaggatctcgaatttgtcgttcccacgggcaactttggtgacattctcgctggctactatgccaagcgaatgggtctacccgtctcgcgactcgtcgtggctaccaacgagaacgatatcttgcaacgattctgggccaccggccgatacgaaaagtccagtgctgcttcatcctcctcggcggcttcctcggcacagaccgagccggcaaacggttcttccgatggtgctcagcagggcggtgttcgagccacgctttcgcccgccatggatgttctgatctcttccaactttgaacgtttgctctggtatgttgcttacgaatcgcaagctccctccaacgccgacgcctctgaacaagaaaagcaagaggccgcaggacaacaacttgcgtcgtggatgcagtcgctcaagactgaaggtcgcatcgccgttgacgaagcacagctagccatcgcccgccgtgattttgccgctgaacgagtttccgaccaagaaatccgcgagaccgtgttgcagtactttgtccgaaaacctactgctgcctaccctgctggttcgtacctcgtcgacccgcataccgctgttggattcaaagccgccgcgaatgcgtcgagcacctcgtccaacgcacaccagattgtactgtccactgcgcatcccgccaagttcgccgaggcggttacttcgagtttggagagtgcaggtgcagattttgatttcgagcgcgatgtcctgccaaaggaaatggttggtttgctggaaaaagaaaggagagtgattcatgtgaagccccagggcaaacccggtgtagaagggctggtaaacgcggtcaaagatgtggtcgaaaaacaggccgaagtggtcaaggctcgtgcgccatctgctaacactgctagtgtataa

SEQ ID NO: 35008 - protein, 623 aa, Ustilago maydis 521
MPKTVHIFRSTPRTNQSSKRARQRKLLQLHSTQVNIALHQTSTTASASPFSPHADMKYLSTRGGSERLTFEEAVLTGLAPNGGLFIPQEIPQLPANWQSEWADLSFSELSHRVLSLYIPQDPAEGGIPSADLQQVINKSYATFRHKDITPLVRLDDKEWCLELWHGPTFAFKDIALQLLGNLFEYFLQRRNNGKPAEQREKLTIVGATSGDTGSAAIQGVRSKQDISIFILFPHGRVSPIQEAQMTTVLDDNVHNVSVQGTFDDCQDVLKALLSDAEFNAKHRLGAVNSINWARILAQIVYYFAAYFSFRKQLGLSASQSTPKDLEFVVPTGNFGDILAGYYAKRMGLPVSRLVVATNENDILQRFWATGRYEKSSAASSSSAASSAQTEPANGSSDGAQQGGVRATLSPAMDVLISSNFERLLWYVAYESQAPSNADASEQEKQEAAGQQLASWMQSLKTEGRIAVDEAQLAIARRDFAAERVSDQEIRETVLQYFVRKPTAAYPAGSYLVDPHTAVGFKAAANASSTSSNAHQIVLSTAHPAKFAEAVTSSLESAGADFDFERDVLPKEMVGLLEKERRVIHVKPQGKPGVEGLVNAVKDVVEKQAEVVKARAPSANTASV

SEQ ID NO: 35009 - DNA, 1500 bp, Clostridium thermocellum ATCC 27405
  CDS (1)..(1500): transl_table=11
atgtattatgaaagtacacgagggggattaaaatctgtatcatctgctgaagctataaaaaggggtatagcgccggacggtggattgtttgtcccggagaataaagtaagttttaccggtagtgaaattagcgccatggctgatatgagttatcaggaaagggcgttatatatattaaagcactatcttacggattatagcgatgaagaaatagcggactgtgtttacaatgcctataccgatgaaaagttcgacgacaaaagaattgctcccttggttcagctgaatgaaaatgtcaatatcctggaattgtggcacggaccaacatgtgcattcaaagacatggcacttcaaatattgcctcatttccttgtaaaggcagtgagaaaaaccggcgaaaccggtgaaatcgtaattttggttgcaacttcaggagataccggaaaagctgctttggaaggttttaaggatgttgagggcacaagaataattgtgttctatccccaggatggcgtaagccaggttcagaaaatgcaaatggtcacccaggaaggaaaaaatgtttacaccataggagtggaaggaaattttgacgacgcacaaagcggagtaaaagcaatttttaccgatgaagaacttaagcagaaaatggacaaaggcaatttcaaattttcatcggcgaattccattaactgggggagacttgtacctcagatagtctattatttttcggcatatgctgatatgctgaagaacggtgaaataaaagagggagacaagattaactttgttgtccccacaggaaatttcggaaatattcttgcggctttctatgcaatgcaaatggggcttcctgtaaacaggctcatttgtgcgtccaatgacaataatgttttaaccgattttatcaatacaggagtatatgacaaaaacagggagtttaagaggaccatttcgccgtctatggacatattgatttcaagcaaccttgaaagactcctctttgaacttaccggacatgatcctttgccggtgaacaattggatgagcagtttgaaagaaaccggaaaatatactgttgacaatacaatgaagaaaaagatatcggaaatattctggggcggatattcaaacgaggctgaaactttaaagacgatagaggctatatacaaggaatacggatatgtcattgatacccatactgctgtaggtgttgatgtgtatgacaaatatgtaatttccaccggtgacgtgacaaagacggtcattgcgtcaacggcaagtcctttcaaatttaatgaaagtgtggtaaaagcagttttgggaaatgaagcgttaaaaggaaggacggaatttgaacttcttgaggttttggcaaaagagtgcaggcttaaaataccggaaggtttgaaagatcttgacaaaaagcctgtgcttcacaaacaggtttgcagtaaatttgatatgaaacagcaggttgaaagtattcttggtctgtaa

SEQ ID NO: 35010 - protein, 499 aa, Clostridium thermocellum ATCC 27405
MYYESTRGGLKSVSSAEAIKRGIAPDGGLFVPENKVSFTGSEISAMADMSYQERALYILKHYLTDYSDEEIADCVYNAYTDEKFDDKRIAPLVQLNENVNILELWHGPTCAFKDMALQILPHFLVKAVRKTGETGEIVILVATSGDTGKAALEGFKDVEGTRIIVFYPQDGVSQVQKMQMVTQEGKNVYTIGVEGNFDDAQSGVKAIFTDEELKQKMDKGNFKFSSANSINWGRLVPQIVYYFSAYADMLKNGEIKEGDKINFVVPTGNFGNILAAFYAMQMGLPVNRLICASNDNNVLTDFINTGVYDKNREFKRTISPSMDILISSNLERLLFELTGHDPLPVNNWMSSLKETGKYTVDNTMKKKISEIFWGGYSNEAETLKTIEAIYKEYGYVIDTHTAVGVDVYDKYVISTGDVTKTVIASTASPFKFNESVVKAVLGNEALKGRTEFELLEVLAKECRLKIPEGLKDLDKKPVLHKQVCSKFDMKQQVESILGL

SEQ ID NO: 35011 - DNA, 1482 bp, Clostridium difficile 630
  CDS (1)..(1482): transl_table=11
atgtattattcaagtacgagaggcaccgaagaaaaagtaactgcatcacaagcaataataaaaggaatatcaaatgatggtggtctttatgttccaagtgaatttcccaatgtaaaaaatgaacttataaatttagtaaatttaacgtattctcagatagcattttttgtacttagtaaatttttatgtgattttactgaagatgaaattaaaaattgtatagaaaatgcatatgatgaaaagtttgattgtagtagtatagctccattaaataaagtaaatgatacttatttcttagaactatatcacggtccaactttagcatttaaagatatggcacttactataatgcctcatcttcttaaaacatctataaagaaagataatttagagaaagatgttgtgattcttactgctacatctggagatacaggtaaagctgcacttgagggatttaaagatatagataaaataaagataattgtattcttcccagaagatggtgtaagcccagtacaaaaacttcaaatgaaaactcaaactggaaaaaatacatatgtagttggtataaaaggaaattttgatgatgcacaatcaggtgtaaagaagattttttctgataaagaatttaatcaaaaactattggataataattatatattatcttctgcaaattcaattaatataggaagacttcttccacaagttgcatactatttttattcatatatgaaattagttagcaatagtgatataaatttaaatgataaaataaattttgttgtcccaactggtaattttggtaatattctagctggatattatgccaaacaaatgggtcttccaataaacaaattgatatgtgcatcaaatgataataatgttctttatgatttctttaaaactggtgtatatgataaaaatagaacattgaaattaactacttctccttctatggatatattaatttcaagtaatttagaacgattactgtttgaaatatcaaatagaaatactgatattgtaaataagcttttatcagaccttagtgataaaggagtctacaaaataagtgatgatatggaaaaaaatttagcctcattctatggagaatattcaaatgaagaagaagttaaaagcacgataaacaatgtgtttaaaaattataattatttgatagatactcatactgctgttgcatacaattgttatgaaaaatataaaaaagaaacttctgataacacaaaaactgttattgtaagtactgcaagtccattcaagttttctgaagatgttctaaagtctatagattgtgattttaaagaccttgatgactttgctataattgatagattatcaagtatttctaaaatagatattccaaaacctattaaaaatcttaaaaatgcagaaatactacataaagatatttatgaaaaagatgaattaaaactagctataaaaaaattcttaaaggtatag

SEQ ID NO: 35012 - protein, 493 aa, Clostridium difficile 630
MYYSSTRGTEEKVTASQAIIKGISNDGGLYVPSEFPNVKNELINLVNLTYSQIAFFVLSKFLCDFTEDEIKNCIENAYDEKFDCSSIAPLNKVNDTYFLELYHGPTLAFKDMALTIMPHLLKTSIKKDNLEKDVVILTATSGDTGKAALEGFKDIDKIKIIVFFPEDGVSPVQKLQMKTQTGKNTYVVGIKGNFDDAQSGVKKIFSDKEFNQKLLDNNYILSSANSINIGRLLPQVAYYFYSYMKLVSNSDINLNDKINFVVPTGNFGNILAGYYAKQMGLPINKLICASNDNNVLYDFFKTGVYDKNRTLKLTTSPSMDILISSNLERLLFEISNRNTDIVNKLLSDLSDKGVYKISDDMEKNLASFYGEYSNEEEVKSTINNVFKNYNYLIDTHTAVAYNCYEKYKKETSDNTKTVIVSTASPFKFSEDVLKSIDCDFKDLDDFAIIDRLSSISKIDIPKPIKNLKNAEILHKDIYEKDELKLAIKKFLKV

SEQ ID NO: 35013 - DNA, 1398 bp, Bartonella henselae str. Houston-1
  CDS (1)..(1398): transl_table=11
atgcaatatatcagcacgagaggtgaggctcctgctttaggttttattgaaactatcatgactggactggctagtgatggtggactttatcttccagaaaaattcccccaattatcattcgatgcattacgagcgcttcgtggccaatcctatatgacaatcgctaaaactattctttggccctttgtgaataacgaaattgaatatacttcttttgaaaatatgatttctgaatcttatgctaccttccatcatcctgcaacctgtccgttactgcaaactggcccaaatgaatttattcttgaactttttcacggtcctactttggcatttaaagatgttgcaatgcagtttctttctcgactgatggattatgtgctcatcaaaaaaaataaatccgcaacaattattgctgctacatcaggtgatacaggtggtgccgcaatacaagcttttgctggaagagaatattcagacgtttttatcttgtttcctaaagggcgtatatcacccgttcagcagcggcaaatgacgaccagtcaaaaaacaaacgtgcatgccatagccattgaagggagttttgatgattgccaagcactggtgaaagcaatgtttaatgaccataatttccggcaaaaaaaagcactttcaggagttaattctataaattgggcgcgtattatggcgcaaattgtttattatttttcatccgcactttctttaggtgctcctgatagagctgtctcatttactgttcctactggaaattttggtgatatttttgcgggttatgttgctgcccgtatgggattacccattgcccaattggtcattgcaacaaatgataatgatatcctcgtgcgcacattgactaatggtacttatgaaacacagccgacaacccacacaacgtcaccctctatggatattcaagtctcttctaattttgaacgcttactgtttgaaagtggcgatcgtgatcctgtgtggattcgcaatgcgatggaaaacttgaaaaagtcaggatattttaatcttaatgaaaagcagctcaaaaatattcgttccctcttttctgcagggaaaagtagcatagctgaaacggcaaaaataattgacagtgtttataaggaaagcggctatctcgttgatccacatacagctgttgcgcttaaagtagcccgtgaaaacagacaaccacatattccaatgatcgtcctctctactgctcatcctgctaaatttcctgatgccatcaaaaatgcctgtggacttaatgctccatggccatctcgtctcaacgatttaatagaacgcgaagaacattttataggtcttgctaatgatgaaaaaatagtaaaagattacatttctttaaaatcgcgtgcatcttattaa

SEQ ID NO: 35014 - protein, 465 aa, Bartonella henselae str. Houston-1
MQYISTRGEAPALGFIETIMTGLASDGGLYLPEKFPQLSFDALRALRGQSYMTIAKTILWPFVNNEIEYTSFENMISESYATFHHPATCPLLQTGPNEFILELFHGPTLAFKDVAMQFLSRLMDYVLIKKNKSATIIAATSGDTGGAAIQAFAGREYSDVFILFPKGRISPVQQRQMTTSQKTNVHAIAIEGSFDDCQALVKAMFNDHNFRQKKALSGVNSINWARIMAQIVYYFSSALSLGAPDRAVSFTVPTGNFGDIFAGYVAARMGLPIAQLVIATNDNDILVRTLTNGTYETQPTTHTTSPSMDIQVSSNFERLLFESGDRDPVWIRNAMENLKKSGYFNLNEKQLKNIRSLFSAGKSSIAETAKIIDSVYKESGYLVDPHTAVALKVARENRQPHIPMIVLSTAHPAKFPDAIKNACGLNAPWPSRLNDLIEREEHFIGLANDEKIVKDYISLKSRASY

SEQ ID NO: 35015 - DNA, 1290 bp, Erwinia carotovora subsp. atroseptica SCRI1043
  CDS (1)..(1290): transl_table=11
atgaaactgtacaaccttaaagatcataacgagcaggtcagttttgctcaggctatcaagcaagggctcgggagccagcagggtctgttcttcccgctggagctgccagaatttgagcgtactgaaattgatgctttgctggatctggattttgtgacccgcagcagccgtattctgtccgcttatatcggcgatgaaattgcgacagaaaccgtgtttgagcgtgtaaaagcggcctttgcattcccagcacctatcgcgccagttgaggacgatgtcgcagcactggagttgttccacggcccgacgctggcctttaaagatttcggcggccgctttatggcgcaaatgctgacggaagtctctggcaacgaaaaaattaccattctgacggcaacctctggcgacaccggcgctgccgtggcgcatgccttttacggtctggaaaatgtccgcgtcgtgatcctgtatccgcagggcaagatcagcccgctgcaggaaaagctgttctgtacactgggcggcaacattcacaccatcgctatcgacagcgatttcgatgcctgtcaggcgttggtgaaaaaggcgtttgatgatgaagaactgaaaaaggcgattggcctgaactcagcgaactccattaacatcagccgtctgctggcgcaaatttgctactattttgaagccgttgcacaactgccacaggaagcccgtaaccaactggtggtttctgtgccaagcggtaacttcggcgatctgaccgccggtctgctggcgaaatcgctgggtctgccgatcaagcgtttcattgcggcgactaacgccaatgacaccgtgccgcgcttcctgagccagggtaattgggaaccgcataaaacggtggcaacgttatccaacgcgatggatgtgagccagccaaacaactggccgcgcgtggaggaattgttccgccgtaagaactggcagttgaaaacgctgggctttggtgcggtgagcgatgacaccacgaaagaaaccctgcttcagttggatgcgttaggctatgtctccgaaccgcatgctgcaattgcttaccgtctgctgcgcgatcagctgcaagctggtgagtttggcttgttcttgggtacggcgcacccggcgaaattcaaggaaagcgtagaagagattctgggcaaagaactggatctgccggaagcgctggctgaacgtgccgatctggatctgctgtcgcacaacttcccggatgatttcgcaccgttgcgtgagttcctgatgtccctgccagaataa

SEQ ID NO: 35016 - protein, 429 aa, Erwinia carotovora subsp. atroseptica SCRI1043
MKLYNLKDHNEQVSFAQAIKQGLGSQQGLFFPLELPEFERTEIDALLDLDFVTRSSRILSAYIGDEIATETVFERVKAAFAFPAPIAPVEDDVAALELFHGPTLAFKDFGGRFMAQMLTEVSGNEKITILTATSGDTGAAVAHAFYGLENVRVVILYPQGKISPLQEKLFCTLGGNIHTIAIDSDFDACQALVKKAFDDEELKKAIGLNSANSINISRLLAQICYYFEAVAQLPQEARNQLVVSVPSGNFGDLTAGLLAKSLGLPIKRFIAATNANDTVPRFLSQGNWEPHKTVATLSNAMDVSQPNNWPRVEELFRRKNWQLKTLGFGAVSDDTTKETLLQLDALGYVSEPHAAIAYRLLRDQLQAGEFGLFLGTAHPAKFKESVEEILGKELDLPEALAERADLDLLSHNFPDDFAPLREFLMSLPE

SEQ ID NO: 35017 - DNA, 1410 bp, Leifsonia xyli subsp. xyli str. CTCB07
  CDS (1)..(1410): transl_table=11
ttgcggtacatctccacacgcggtggcctgctcgggccgtattccgacaccctgatcgaagggctggccccggacggcggtctggtcgtccccgaagagctgccccggctcgacgccgaactgctggaacgatggcggcccctggactatgcggggctcgcgaaagaggtcatcgggctgttcgccacgaacatcccccgcgaggagctgtcccgcatctgccgggcggcctaccgtccggaggcgttcgcgtcgtcgcagatcgtgccgctgcgggagatcgacggcgggatgacgctggtcggcctgtccgaggggccgaccctggcgttcaaggacatggcgatgcggttcctcggcgagacgctggacgtcgtgctccgcgagtcggaccgcgtcctcaacgtgctcggcgccacatccggagacaccggctcggccgcagagcacgcactgcgcgggcgggagcgcttggccgtgttcatgctctcgccgctcgggcggatgagcgctttccagcgggcgcagatgtactcgctgctcgacgacaacgtccacaatgtcgtggtcgacggtgtcttcgacgactgccagaacctcgtgaagcggatagcggaagatctggagttcaaacgggtacacagcctcggcgcggtcaactcgatcaacttcgggcggatctcggcgcagatcgcctactacgtctgggcatggctgcgggcgacggacgcgcggggcccggcggaggtatccttcgccgtcccgtccgggaacttcggcaacatcctgtccgggcactacgcccgccggatgggactgcccgtgcgcaggctggtgctcgccaccaacgagaacaatgtgctggacgacttctttcgcacgggccgctaccggccgcgcagcgccgccgacacactgccgacctccagcccgtcgatggatgtctcgcgcgcctccaacctcgaacgcttcgtcttcgatctgatcggccgctcagccgagcgcacggcggccgcctggcgcgaactggaggccaccggcgagatcgacctctccgccgaacagcaccgtttcctccccgagttcgggatcgtcagcgggacgagcacccacgccgaccgcctggcgaccatccgggcggtcgccgagagctccggagtcaccatcgacccgcacacggccgacggtgtgaaggtggcccggccgctggtggagccgggggttccgatgctcgtcctcgagacggcgaaaccagaaaagttcccggagacgattgcggaggcgctgggtgtggcaccgaccccagacaccgcgacgcgtgccctgctgaacgcagcccagcgagtgaccgccctccccaatgacgagggacagctgcgggcgctcatcgcggagcgcgctttgcgctga

SEQ ID NO: 35018 - protein, 469 aa, Leifsonia xyli subsp. xyli str. CTCB07
MRYISTRGGLLGPYSDTLIEGLAPDGGLVVPEELPRLDAELLERWRPLDYAGLAKEVIGLFATNIPREELSRICRAAYRPEAFASSQIVPLREIDGGMTLVGLSEGPTLAFKDMAMRFLGETLDVVLRESDRVLNVLGATSGDTGSAAEHALRGRERLAVFMLSPLGRMSAFQRAQMYSLLDDNVHNVVVDGVFDDCQNLVKRIAEDLEFKRVHSLGAVNSINFGRISAQIAYYVWAWLRATDARGPAEVSFAVPSGNFGNILSGHYARRMGLPVRRLVLATNENNVLDDFFRTGRYRPRSAADTLPTSSPSMDVSRASNLERFVFDLIGRSAERTAAAWRELEATGEIDLSAEQHRFLPEFGIVSGTSTHADRLATIRAVAESSGVTIDPHTADGVKVARPLVEPGVPMLVLETAKPEKFPETIAEALGVAPTPDTATRALLNAAQRVTALPNDEGQLRALIAERALR

SEQ ID NO: 35019 - DNA, 1410 bp, Desulfotalea psychrophila LSv54
  CDS (1)..(1410): transl_table=11
atgcaatattttagtacacggggcgaaacagcacctgtttcatttacaaaggctgtaatgatgggccttgcagaagacggcggtcttctcctgccaaggacaatccccaggatcggcaacgagaccttatcatcctgggaaaacctgagctatgccgaactcgccttcgaggtaatgtctcgctttatcgacgatattcctgaaaacgacttaaaagccctcatcaatcgctcctatgcaagctttgaggcagaggatgtcgctcccctggtgcatcatggcgacctccatatccttgagctctttcacggacccaccctggcctttaaagatattgctcttcaatttttaggcaatctctttgagtacctgctggaaaaagacgacaaggtgctcaatataataggagcaacttccggcgacacaggaagtgcggcaatatatggagtaaggggcaaagaacgaattcgtatcttcatccttcatccccacaaccgagtcagccctgtccaggaaaagcagatgaccagcatcctggatgacaatgttttcaatattgccatcgaaggatcttttgacgatggtcaggctatcgttaaaaaaatatttggcgacctcgacctaaaaaaagaatactcccttggcgccatcaattccatcaactgggcccgggtacttgctcaggttgtatactatatctatagctacctgcatgtacgtacccacgaaaagatgccctccatggattttactgtgcccaccggaaattttggtgatatatttgcaggctatatcgccaagagaatgctccccgaaggcgccattcgccaacttgttctcgccaccaatcaaaacgacattcttaaccgttttgttggggccggcgactactccctcagcgatgtggccatgaccaccagtccttcaatggatatacaggcggcatcaaattttgaacgctatctctactacctcatggatagcgaagcaggaaaaaccaaagagctgatggaacaatttagccaggaaggcaagatcgatctctctgactatctcgaccaaatccgtagagacttctccagtgtcgctgtctccaacgaagaggtctctgaaacgatctccgacttctacaacaagtacgactatgtgctcgacccacatactgccgtcggcgtaaaagctgcaggcgacaagtacacagttggagtacccatggtctgtctctctacggcccatcctgcaaaattccctgatgcagtacatgatgctattgggcgtgacccggaagttcctccatccatcgacggcattctcgaaagagaatctcgttgccaggtgctggccgcagatgccaaggttattgttcaatatataaaagacaacgcaaaaaccgcacaaaaagagcaataa

SEQ ID NO: 35020 - protein, 469 aa, Desulfotalea psychrophila LSv54
MQYFSTRGETAPVSFTKAVMMGLAEDGGLLLPRTIPRIGNETLSSWENLSYAELAFEVMSRFIDDIPENDLKALINRSYASFEAEDVAPLVHHGDLHILELFHGPTLAFKDIALQFLGNLFEYLLEKDDKVLNIIGATSGDTGSAAIYGVRGKERIRIFILHPHNRVSPVQEKQMTSILDDNVFNIAIEGSFDDGQAIVKKIFGDLDLKKEYSLGAINSINWARVLAQVVYYIYSYLHVRTHEKMPSMDFTVPTGNFGDIFAGYIAKRMLPEGAIRQLVLATNQNDILNRFVGAGDYSLSDVAMTTSPSMDIQAASNFERYLYYLMDSEAGKTKELMEQFSQEGKIDLSDYLDQIRRDFSSVAVSNEEVSETISDFYNKYDYVLDPHTAVGVKAAGDKYTVGVPMVCLSTAHPAKFPDAVHDAIGRDPEVPPSIDGILERESRCQVLAADAKVIVQYIKDNAKTAQKEQ

SEQ ID NO: 35021 - DNA, 1290 bp, Yersinia pseudotuberculosis IP 32953
  CDS (1)..(1290): transl_table=11
atgaaactgtataaccttaaagatcataacgagcaggtcagcttcgcacaggcgatcaaacaaggcttgggcaaacagcaggggctatttttcccgttggagttgcccgagttcgaactgactgagatcgataaactgctggatctggattttgtgacccgtagtagccgcattctgtcggcttttattggtagtgaaattgcaccagatgtcttaaccaaacgtgtgcaggcagcttttgaattcccagcccctgttgcacaagttgaaaatgatatcgccgttctggagttgttccacggcccgaccttggcgtttaaagactttggcgcacgttttatggcacagatgctggccgaagttgctggcgatcaacccgtcactattttaacggcaacatcgggtgatactggtgcggcggtggctcatgcattctacgggctgaaaaatgttcgagtggttatcctttatccacgaggcaagattagtccgctgcaagaaaagctgttttgtactctgggcggtaatattcacacggtggcgattgatggcgattttgatgcttgtcaggcactggttaagcaagcttttgatgatgaagaactgaaaaccgcgctgagtttgaattccgctaactcaattaatatcagccggttactggcacaaatttgttactactttgaagctgtagcccagttaccacaagaggcgcgcaaccaactggttatctctgtaccaagcggtaactttggtgatttgactgccggtttgttggcaaaatctttagggctaccggtgaaacgctttattgctgccactaatgctaacgacaccgtgccacgctttttggttaacggccagtggcagccaaagccaactgtagccacgttatcgaatgccatggatgtcagtcagccaaataattggccacgtgtggaagagctatatcgtcgcaaaatctggcagttgaaggatttagggcatggtgcggttagcgataaaaccacaaaagatacgatgcgtgaattagctggtttggggtatatctctgagcctcacgcggcgattgcttaccgtgtattgcgtgatcagttgcaagatggtgaatttggcttgtttatcggaaccgcacatcccgcgaaattcaaagagagcgtagaggcaattctgggtcaggaattacctttaccaaaaccactggccgtgagagcgcaattaccgttgctatcccatgatttgcccgcagactttgcacaaatgcgggcatttttgatggcattgccgaagtaa

SEQ ID NO: 35022 - protein, 429 aa, Yersinia pseudotuberculosis IP 32953
MKLYNLKDHNEQVSFAQAIKQGLGKQQGLFFPLELPEFELTEIDKLLDLDFVTRSSRILSAFIGSEIAPDVLTKRVQAAFEFPAPVAQVENDIAVLELFHGPTLAFKDFGARFMAQMLAEVAGDQPVTILTATSGDTGAAVAHAFYGLKNVRVVILYPRGKISPLQEKLFCTLGGNIHTVAIDGDFDACQALVKQAFDDEELKTALSLNSANSINISRLLAQICYYFEAVAQLPQEARNQLVISVPSGNFGDLTAGLLAKSLGLPVKRFIAATNANDTVPRFLVNGQWQPKPTVATLSNAMDVSQPNNWPRVEELYRRKIWQLKDLGHGAVSDKTTKDTMRELAGLGYISEPHAAIAYRVLRDQLQDGEFGLFIGTAHPAKFKESVEAILGQELPLPKPLAVRAQLPLLSHDLPADFAQMRAFLMALPK

SEQ ID NO: 35023 - DNA, 1278 bp, Mannheimia succiniciproducens MBEL55E
  CDS (1)..(1278): transl_table=11
atgaatctatacaacattaaacacccggaagaacaagtaaattttgcccaggcggtacgccaggggttgggaaaagatcagggattattttttcctgaagtgattccggctttagataatattgacgaattattagccttgccgttagtggaacgcagtcaaaaaatcttaggcgctctaatcggagaagaaattccggcggaaaaactcaataccatggtgaaaaacgcgttcacttttccggctccggtggcaaaggtagaagagggcgtttatgcattggaattatttcatggcccgactttagcctttaaagatttcggcggccgttttatggcgcaggcgttagcgacagtgcgcggcgacggcaaaattaccatcttaaccgcgacttcgggcgataccggggcggcggttgctcatgcattttacggtttggaaaatattgatgtggtgattctttatccgcaaggtaaaatcagcccgttacaggaaaaattattctgcacattaggcggcaatatccgtaccgtcgcgattaatgcggattttgacgcttgccaggcgttggtaaaacaagcttttgatgatgaggaattgcgtcgggcgatcggtttaaattccgcaaattccattaatatcagccgtttactggctcaggtttgctattattttgaagcggcggcacaactttcgccttcagagcgcagcaatctggtggtttccgtaccaagcggtaacttcggtaatttaaccgccggattaatcgcgaaaaccttaggtttgccgattaagcgttttatcgcttccaccaatgccaatgatacggttccgcgttatctggcaaaggggaaatgggaacctaacgcaacggtggcaactttatctaacgccatggatgtcagccgcccgaataactggccgcgtgtcgaagaattgtttaaacgtaacggttgggctttatccgagttgcattcgggtgcggtttccgacgcacaaacggaagaaaccctacgcgatatgaatgcaaaaggttatctgtgcgaacctcacggcgccattgcttatcgcgtattgaaacaggacttgcaagcgggcgaaaccggtttgttcctgtgcacggcgcatccggcgaagtttaaagaatccgttgaacgcattcttaacacccaattaccgcttccgcaggcgcttgcaaaacatgcggaattaccattgctttccgatgtaatggaaaatgattttgccgcattgcgcgcttatttattgaaaaaataa

SEQ ID NO: 35024 - protein, 425 aa, Mannheimia succiniciproducens MBEL55E
MNLYNIKHPEEQVNFAQAVRQGLGKDQGLFFPEVIPALDNIDELLALPLVERSQKILGALIGEEIPAEKLNTMVKNAFTFPAPVAKVEEGVYALELFHGPTLAFKDFGGRFMAQALATVRGDGKITILTATSGDTGAAVAHAFYGLENIDVVILYPQGKISPLQEKLFCTLGGNIRTVAINADFDACQALVKQAFDDEELRRAIGLNSANSINISRLLAQVCYYFEAAAQLSPSERSNLVVSVPSGNFGNLTAGLIAKTLGLPIKRFIASTNANDTVPRYLAKGKWEPNATVATLSNAMDVSRPNNWPRVEELFKRNGWALSELHSGAVSDAQTEETLRDMNAKGYLCEPHGAIAYRVLKQDLQAGETGLFLCTAHPAKFKESVERILNTQLPLPQALAKHAELPLLSDVMENDFAALRAYLLKK

SEQ ID NO: 35025 - DNA, 1329 bp, Legionella pneumophila subsp. pneumophila str. Philadelphia 1
  CDS (1)..(1329): transl_table=11
ttgtctttgaaagtgacttactggttaataatatttcatcagaaggtgcaaaggctgcagatgaaaattagaataaagagtacgagaggacaatgtgtctccacaatagacgaagcgatactgtcaggcctggcaggggatggtgggttatttgtacctgacaggtttcccaatttaacaataaaaaaattttatgaatacggtaatttaatcgacttttctgttaatttactctcgccatttttttcagatagtaaaattgatgtaaataatgctttttttcaaaaattcctcaccttctcctttccgttacatcatctttttaagaaaagttatgtactggagttgtttcatggcccaaccctgtcttttaaagatttaggaactcaatttttcagtgaatgtttattgcatctgatagaaaacaagagcgccaaagttctggtcgcaacatctggtgatactggcgctgcgattgctcatgctttggatgggaaaagagatctggaaggaatcattttatttcctaaagataaacttactttcagacaacaatctcaaattacttgttggggagagaatattcgtgcattggctgttaatggcagttttgatcaatgtcaacagctggtgaagctggtatttgccaaaagagaacataaaggaatattgactacagccaatagcatgaatatagccagattattaccacagattattttctatgcttttaccagcattcaattggcattaagacataatcattctgttaattttatagttccaggcggaaacctggggaatgttacggcttgttattgggcaaaaatgctgggttttccggttgagcaaattttaatagctaataatattaatagtgcactgggcgaatttttgttaactggagcttatcaagccaaatcggttactaaaacattggcaacagcgatggatgtaggtgagccaagcaatttggaccgcttattcgttttatttaataattattctgaatgtaaaaaacagatgaatgcagaatctgttagtgatgagcaaattaagcaagctatcctacattgttacaataaatatcattatataatttgccctcataccgccacagcttatcatcgtctaagtacaatcaatcaggacaaaccctgggttattgtggcaccagggcacccggccaaatttgaagaggtattagaaccactattgaaaaaagaaattcctgtcccggaacagctgaaggtccttttaggcagaaaacaacattattcaatcatagagccaaactatcatgctttgtatcatttcttagttgaatga

SEQ ID NO: 35026 - protein, 442 aa, Legionella pneumophila subsp. pneumophila str. Philadelphia 1
MSLKVTYWLIIFHQKVQRLQMKIRIKSTRGQCVSTIDEAILSGLAGDGGLFVPDRFPNLTIKKFYEYGNLIDFSVNLLSPFFSDSKIDVNNAFFQKFLTFSFPLHHLFKKSYVLELFHGPTLSFKDLGTQFFSECLLHLIENKSAKVLVATSGDTGAAIAHALDGKRDLEGIILFPKDKLTFRQQSQITCWGENIRALAVNGSFDQCQQLVKLVFAKREHKGILTTANSMNIARLLPQIIFYAFTSIQLALRHNHSVNFIVPGGNLGNVTACYWAKMLGFPVEQILIANNINSALGEFLLTGAYQAKSVTKTLATAMDVGEPSNLDRLFVLFNNYSECKKQMNAESVSDEQIKQAILHCYNKYHYIICPHTATAYHRLSTINQDKPWVIVAPGHPAKFEEVLEPLLKKEIPVPEQLKVLLGRKQHYSIIEPNYHALYHFLVE

SEQ ID NO: 35027 - DNA, 1452 bp, Burkholderia pseudomallei K96243
  CDS (1)..(1452): transl_table=11
atgaattacatctccacgcgcggcgccggcatcggcgagcgtcacacgttctccgacatcctgctcggcggcctcgcgaaggacggcgggctctacctgccgagcgagtatccgcgggtgagcgcggacgagctcgcgcgctggcgcgcgctgccgtacgcggatctcgcgttcgagatcctcgcgaagttctgcgacgacatcccggccgacgacctgcgcgcgatcacgcgccgcacgtatacggccgacgtctatcgtcacacgcgccacggcggcaacgcggccgacatcacgccgctcacgacgctcggcgccgagaacggcgcgccggtctcgctgctcgaactgtcgaacggcccgacgctcgcgttcaaggacatggcgatgcagttgctcggcaacctgttcgagtacacgctcgccgcgcacggcgaaacgctgaacatcctcggcgcgacgtcgggcgatacgggcagcgcggccgaatacgcgatgcgcggcaagcggggcgtgcgcgtgttcatgctgtcgccgcaccggaagatgagtgcgttccagacggcccagatgtacagcctgcaggacccgaacatcttcaacctcgcggtgaagggcgtgttcgacgattgccaggacatcgtgaaggccgtgtcgaacgatcacgcgttcaaggcgcagcagaagatcggcacggtcaattcgatcaactgggcgcgtgtcgtcgcgcaggtcgtgtactacttcaagggctatttcgcggcgacgcgcacgaacgacgagcgcgtgtcgtttacggtgccgtcgggcaacttcggcaatgtctgcgcgggccacatcgcgcggatgatggggctgccgatcgagaagctcgtcgtcgcgaccaacgagaacgacgtgctcgacgaattcttccgcacgggtgcgtatcgcgtgcgcagcgccgagcacacgtaccacacgagcagcccgagcatggacatctcgaaggcgtcgaacttcgagcgcttcgtgttcgacctgctcggccgcgatccggcgcgcgtcgttcagctgtttcgcgacgtcgagcaaaagggtggcttcgatctcgcggcgagcggcgatttcgcgcgcgtcgccgagttcggcttcgtgtcgggccgcagcacgcacgcggaccggctcgcgacgatccgcgacgtgttcgagcgctatcgcacgacgatcgacacgcacacggccgacggcctgaaagtggcgcgcgagcatctgcagccgggcgtgccgatgatcgtgctcgagaccgcgcagccgatcaagttcggcgaaacgattcgcgaggcgctcgggcgggagccgtcgcggcccgccgcgttcgacgggctcgaggcgctgccgcagcgcttcgaggtggtcgacgcgagcgcgcagcaggtgaaggacttcatcgccgcgcacacgggcgcatga

SEQ ID NO: 35028 - protein, 483 aa, Burkholderia pseudomallei K96243
MNYISTRGAGIGERHTFSDILLGGLAKDGGLYLPSEYPRVSADELARWRALPYADLAFEILAKFCDDIPADDLRAITRRTYTADVYRHTRHGGNAADITPLTTLGAENGAPVSLLELSNGPTLAFKDMAMQLLGNLFEYTLAAHGETLNILGATSGDTGSAAEYAMRGKRGVRVFMLSPHRKMSAFQTAQMYSLQDPNIFNLAVKGVFDDCQDIVKAVSNDHAFKAQQKIGTVNSINWARVVAQVVYYFKGYFAATRTNDERVSFTVPSGNFGNVCAGHIARMMGLPIEKLVVATNENDVLDEFFRTGAYRVRSAEHTYHTSSPSMDISKASNFERFVFDLLGRDPARVVQLFRDVEQKGGFDLAASGDFARVAEFGFVSGRSTHADRLATIRDVFERYRTTIDTHTADGLKVAREHLQPGVPMIVLETAQPIKFGETIREALGREPSRPAAFDGLEALPQRFEVVDASAQQVKDFIAAHTGA

SEQ ID NO: 35029 - DNA, 1440 bp, Azoarcus sp. EbN1
  CDS (1)..(1440): transl_table=11
gtgaagtatctctccactcgcggccacgccgcgcgacccgagttctgcgacattctgctgggcggtcttgcgccggatggcgggctgtatctccccgaaagttatccgcagatctcgcgcgccgaactcgacgcttggcgctcgctgtcgtatgcggatctcgcgttcgcgatcctgtcgaagttcatcaccgacattcccgcagccgacctgaagacgatctgcgaccggacctacactgccgaggtttatcgctttgcgcgtccgggcgacgatgccgccgagatcacgccggtgcattggctcgaagccggcaagttcggtctgctggaattgtcgaacggcccgacgctggcgttcaaggacatggcgatgcagctgctcggcaacctgttcgagtacgtcctcgagcgccgtggcgagaccatcaacatcctcggtgcgacgtcgggcgataccggctcggcggccgaatacgcaatgcgcggcaagcacgccgtgcgcgtcttcatgctgtcgccgcacggcaagatgagcgcgttccagcgcgcgcagatgtattccctgcaggacgagaacatccacaacatcgccgtcaccggcatgttcgacgacgcgcaggacatcgtgaaagcggtgtcgaacgacgccgcgttcaaggcgaaatataagatcggtgcggtcaattcgatcaactgggcgcgcgtggcggcgcagatcgtctattacttcaaaggctatttcgccgcgacgaagtcgaacgacgaacaggtcgccttctgcgtgccgtcaggcaatttcggcaacatctgcgccggccatatcgcccgccagatggggctgccggtcgcgcggctgatcctcgcgacgaacgaaaacgacgtgctcgacgagttcttccgcaccggcgtctatcgtccgcgcaaggctgccgaaacccacgtcacgtcgagcccgtcgatggacatttccaaggcgtcgaatttcgagcgcttcgtgttcgatctcgtcgggcgcaaccccgagcgcgtcgctgaactctggaaggcggtcgatgcgggcggcgccttcgacctgtcggcgtctgccgatttcgcccgcatcggcgatttcgcgttcgtgtccggcggcagctcgcatgcggggcgcgtcgcgacgatccgcaaggtgttcgagcaatacggcacgatgatcgacacgcacaccgccgacggcgtcaaggtcgcgtgggactgcgccggcagcgtcccggcgggcgtgccgctgctggtgctcgaaaccgcattgccggcgaagttcgccgaaacgatccgcgaagcgctcgggcgcgagccggagcgtccggccgagctcgaaggcatcgagaaactgccgcagcgtgtcgaactcatggctccggacgtcgaggcagtcaagcgcttcattgccgaacgcgtgtag

SEQ ID NO: 35030 - protein, 479 aa, Azoarcus sp. EbN1
MKYLSTRGHAARPEFCDILLGGLAPDGGLYLPESYPQISRAELDAWRSLSYADLAFAILSKFITDIPAADLKTICDRTYTAEVYRFARPGDDAAEITPVHWLEAGKFGLLELSNGPTLAFKDMAMQLLGNLFEYVLERRGETINILGATSGDTGSAAEYAMRGKHAVRVFMLSPHGKMSAFQRAQMYSLQDENIHNIAVTGMFDDAQDIVKAVSNDAAFKAKYKIGAVNSINWARVAAQIVYYFKGYFAATKSNDEQVAFCVPSGNFGNICAGHIARQMGLPVARLILATNENDVLDEFFRTGVYRPRKAAETHVTSSPSMDISKASNFERFVFDLVGRNPERVAELWKAVDAGGAFDLSASADFARIGDFAFVSGGSSHAGRVATIRKVFEQYGTMIDTHTADGVKVAWDCAGSVPAGVPLLVLETALPAKFAETIREALGREPERPAELEGIEKLPQRVELMAPDVEAVKRFIAERV

SEQ ID NO: 35031 - DNA, 1392 bp, Silicibacter pomeroyi DSS-3
  CDS (1)..(1392): transl_table=11
atgaaatacatctcgacccgcgggcaggcgcccgagcttaccttcgaagaggcgatgctgaccggtctggcccgcgacggtggcctttacctgcccgccgagatcccggtgatgggccaggacgagatcgccgcgctggcgggcctgccctatgaagagatcgcctttcgcgtgatgtggccctatgtaagcggctcctttggcgaggacgagttcaggggcatcatcgcccgcgcttaccaaggctttggccatgccgcccgggcgccgctgaaacagctcaacgagaaccacttcctgctggagctgttccacgggccgacgctggccttcaaggatttcgcgatgcagctgatcggccagctgtttcaggcggcgcttgcgcggcgcggcgagacggtgaccatcgtcggcgccacctcgggcgataccggctcggccgcgatcgaggcgttccgcgggctggatgcggtcaatgtcttcatcctgttcccgcatggccgggtcagcgaagtgcagcgacgccagatgaccacgcccgccgacagcaacgtgcacgcgctggcggtggatggcgatttcgacgactgccaggcgcgggtcaaggacatgttcaacgacttcgccttccgtgacggggtgcggctggctggcgtcaactcgatcaattttgcgcgcgtgctggcgcaggtggtctattatttctcggcggccaccagcctgggcgcgccgcatcgcaaggtcagcttcaccgtgcccacgggcaatttcggcgacatctttgcgggctatatcgccaagcgtatggggctgccgatcgagcagctggtggtggccaccaaccagaacgacatcctgcaccgctgcctgtcgggcgagggctatttcaaaggggaaaccatcccctcgatcagcccgtcgatggatatccaggtcagctccaacttcgaacgcgcgctttattacgcctatggccaggacggcgcggcggtgtcgcagctgatggacgagctgcaacagggcgggttccatgtcagccagggggcgatgcaggccctgcgcgacagtttcacctcgggccgcgcctcggaagaggagacgctggccaccatcaaggcgacgctggccgccagcggcgagctgttgtgcccgcattcggcggtgggggtgaaggtcgccgaagaggcccgcagggccgatgaggcgccgatgatcaccctggccaccgcgcatccggcgaaattccccgccgcggtggaacaggccagcggcgtgtttccgccccttcccccgcgcatgtcggatctatatgaacgtccggaacgggtgacccggatcgccaacgatctggccgccctccaggatcatatcagaaggcatatccctgcgtga

SEQ ID NO: 35032 - protein, 463 aa, Silicibacter pomeroyi DSS-3
MKYISTRGQAPELTFEEAMLTGLARDGGLYLPAEIPVMGQDEIAALAGLPYEEIAFRVMWPYVSGSFGEDEFRGIIARAYQGFGHAARAPLKQLNENHFLLELFHGPTLAFKDFAMQLIGQLFQAALARRGETVTIVGATSGDTGSAAIEAFRGLDAVNVFILFPHGRVSEVQRRQMTTPADSNVHALAVDGDFDDCQARVKDMFNDFAFRDGVRLAGVNSINFARVLAQVVYYFSAATSLGAPHRKVSFTVPTGNFGDIFAGYIAKRMGLPIEQLVVATNQNDILHRCLSGEGYFKGETIPSISPSMDIQVSSNFERALYYAYGQDGAAVSQLMDELQQGGFHVSQGAMQALRDSFTSGRASEEETLATIKATLAASGELLCPHSAVGVKVAEEARRADEAPMITLATAHPAKFPAAVEQASGVFPPLPPRMSDLYERPERVTRIANDLAALQDHIRRHIPA

SEQ ID NO: 35033 - DNA, 1410 bp, Neisseria gonorrhoeae FA 1090
  CDS (1)..(1410): transl_table=11
atgagatacatcagcacgcgcggcgaaaccgcacacaaaccgttcagcgaagttttattgatggggcttgcacccgacggcggactgatgctgccggaacattatccgcaaatcgggcgcgaaaccttggacaaatggcgcggtttggcttatcccgaattggcgtttgaaatcatgtgcctgttcgttaccgatattccggaggacgatttgcgcgacattctgaaccgtacttacacggaagcggcgttcggtactaaggaaatcacccccgtccgcacgctttcagacggcatcaaaatccaagccttgtccaacggcccgacgctggcgttcaaagatatggcgatgcagtttttgggcaatgcgtttgaatatgttttaaacaaagaaggcaaaaaactcaatatcttgggcgcaaccagcggcgatacgggttcggctgcggaatatgccttgcgcggcaaaaaaggcgtgaacgtatttatgttgtcgcccgacggtaaaatgagcgcgttccaacgcgcgcagatgtacagcctgcaagacgggaatatccacaatatcgccgtgaaggggatgtttgacgactgccaggacattgtgaaggcagtgcagaacgatgccgcgttcaaggaaaaataccatatcggtacggtcaattcgatcaactgggggcgcatcgtcgcgcaagtggtttattactttgcaggctatttcaatgccacttcaagcaatgacgaaaccgtcagcttttgcgtaccgagcggcaacttcggcaacgtttgcgcgggacacatcgccaaacaaatgggcctgcctgtccgctgcctgattgtcgcgaccaatgaaaacgatgtgctggacgagtttttcaaaaccggcgcataccgcccgcgcaacagcgcgcatacttatgtaacctccagcccgtctatggacatttccaaagcgtccaacttcgagcgtttcgtgttcgacctgatggatcgcgatcctcaggaaatcaatacgctgtgggcggaagtcgcggcaggcaaaggctttgacctgcggtttgccttggacaaagtcggcggcaaatacggctttacctccggcaaatctacccacgccgaccgcctcgccaccatcagacaggtttacgagcaagacaaagaactcatcgacccgcatactgccaacggcgtaaaagtcgcccgcgaagtgcgcgaagcgggggaaacggtggtttgtttggaaaccgcgttggcggcgaaattcgatgcgaccatacgcgaagccgtcggcgatgtcgccattccgcgccccgccgcgctggaaggtttggaaaacctgccgcagcgcgtgcaaaccgtgccgaacagtgcggatgcggtaaaaggcatcatcgaacaaacccttgcctga

SEQ ID NO: 35034 - protein, 469 aa, Neisseria gonorrhoeae FA 1090
MRYISTRGETAHKPFSEVLLMGLAPDGGLMLPEHYPQIGRETLDKWRGLAYPELAFEIMCLFVTDIPEDDLRDILNRTYTEAAFGTKEITPVRTLSDGIKIQALSNGPTLAFKDMAMQFLGNAFEYVLNKEGKKLNILGATSGDTGSAAEYALRGKKGVNVFMLSPDGKMSAFQRAQMYSLQDGNIHNIAVKGMFDDCQDIVKAVQNDAAFKEKYHIGTVNSINWGRIVAQVVYYFAGYFNATSSNDETVSFCVPSGNFGNVCAGHIAKQMGLPVRCLIVATNENDVLDEFFKTGAYRPRNSAHTYVTSSPSMDISKASNFERFVFDLMDRDPQEINTLWAEVAAGKGFDLRFALDKVGGKYGFTSGKSTHADRLATIRQVYEQDKELIDPHTANGVKVAREVREAGETVVCLETALAAKFDATIREAVGDVAIPRPAALEGLENLPQRVQTVPNSADAVKGIIEQTLA

SEQ ID NO: 35035 - DNA, 1302 bp, Bacteroides fragilis NCTC 9343
  CDS (1)..(1302): transl_table=11
atgaaatattatagtactaacaaacaagctccgcttgcttcgcttgaagaagcggtagtcaaaggacttgcttctgataaggggctattcatgcccatgaccatcaagcccttgcctcaagagttttatgacgagatagagaatctttctttccgggaaatcgcttaccgggtggcagatgctttctttggagaagatgttccggcggaaacgctgaaagagatcgtttatgatacgttgaattttgatgtcccgttggtgccggtgaaggagaacatctattccctggagcttttccacggtcctacattggcttttaaagatgtaggtggacggtttatggcccgtttgttgggatacttcatccggaaagaggggcggaaacaggtgaatgtgctcgttgccacttccggagataccggtagtgcggtagccaatggctttttgggggtagagggtattcatgtgtatgtgctctatccgaagggaaaagtcagcgagatacaggaaaaacagttcactacgctggggcggaatattacagccctggaggtggacggaacgtttgatgactgccaggcgctggtgaaagcagcctttatggatcaggaactgaacgaacagttgttgctgacctcggctaactctatcaacgtggcacgtttcctgccgcaggcattctattatttttatgcctatgcgcaattgaagaaggccggccgggcagagaatgtcgtcatctgtgtgccgagcggaaactttggtaacattactgcaggcttgttcggcaaaaagatgggcttgcccgtccgccgttttatcgccgccaacaataagaatgatattttctatcaatatttgcagacaggacagtacaatccccgtccgtccgttgccaccattgccaatgcgatggatgtgggtgatccgagcaactttgcccgtgtgctcgacctgtatggcggttcgcatgcagccatcgctgccgagatatccggaacgacgtacaccgacgagcagattcgtgaaagcgtgaaagcgtgctggcagcagacgggttatctgctcgatcctcatggagcatgcggttaccgtgcattggaggaaggcttgcagccgggtgagacaggcgtattcctcgaaacggcccatccggccaaattcctgcaaacggtggagagcatcattggtaccgaggtcgaaatacctgctaagctccgggcttttatgaaaggcgaaaagaaaagtttgccgatgacgaaggagtttgctgatttcaagagctatctgctgggcaagtag

SEQ ID NO: 35036 - protein, 433 aa, Bacteroides fragilis NCTC 9343
MKYYSTNKQAPLASLEEAVVKGLASDKGLFMPMTIKPLPQEFYDEIENLSFREIAYRVADAFFGEDVPAETLKEIVYDTLNFDVPLVPVKENIYSLELFHGPTLAFKDVGGRFMARLLGYFIRKEGRKQVNVLVATSGDTGSAVANGFLGVEGIHVYVLYPKGKVSEIQEKQFTTLGRNITALEVDGTFDDCQALVKAAFMDQELNEQLLLTSANSINVARFLPQAFYYFYAYAQLKKAGRAENVVICVPSGNFGNITAGLFGKKMGLPVRRFIAANNKNDIFYQYLQTGQYNPRPSVATIANAMDVGDPSNFARVLDLYGGSHAAIAAEISGTTYTDEQIRESVKACWQQTGYLLDPHGACGYRALEEGLQPGETGVFLETAHPAKFLQTVESIIGTEVEIPAKLRAFMKGEKKSLPMTKEFADFKSYLLGK

SEQ ID NO: 35037 - DNA, 1410 bp, Pseudomonas syringae pv. syringae B728a
  CDS (1)..(1410): transl_table=11
atgcgctatatcagtactcgcgggcaagcgcctgcattgaatttcgaagacgtgctgttgactggtctggccagcgatggtggcctctatgtgccggaaaacctgccgcgcttcacgcaggaagagatcgcttcctgggcaggtctgccttatcacgaactcgccttccgggtgatgcgccccttcgtggcgggcagcattccggatgccgacttcaaaaagattctcgaagagacctacggcgtgtttgcccacagtgctgttgcgccgctgcgccagctgcatggcaacgagtgggtactcgaactgttccatggcccgacgctggcgttcaaggacttcgcactgcaactgctcggccgcctgcttgactatattctggccaagcgtggccagcgtgtcgtgatcatcggtgcaacctcgggcgacaccggttctgcggccatcgaaggctgccgtcgctgcgacaacgtcgacatcttcatcctgcacccgaacaaccgggtgtccgatgtacaacgtcggcagatgaccactatcttcggtgacaacatccataacatcgcagtcgaaggcaacttcgacgactgccaggaaatggtcaaggccagcttcgctgaccagagcttcttgaagggcacaccgttggtcgcggtcaactcgatcaactgggcgcggatcatggctcagatcgtctactacttccacgcgtcgctgcagttgggcggacctgcgcgttcggtatcgttctcggtaccgaccggtaatttcggcgatatctttgccggttatctggcgcgcaatatgggcctgccgatcaatcagttgatcgttgccaccaaccgcaacgacatcctgcaccgcttcatgagcggcaatcagtacgtcaaggaaaccctgcacgccacgctgtcgccttccatggacatcatggtgtcgtccaacttcgagcgcctgctgttcgacatgcacggtcgcaacggcgctgccattgccgagttgatgagcacgttccgccagggtggcggtttcagcgtcgaggaagagcgctggaccgagacccgcaaactgttcgattcgctggcagtcagtgacgaggacacctgcacgaccatcgccgaagtgttcgccagcactggcgagttgctcgacccgcataccgctatcggggtgaaggctgcgcgtgaatgccgacgcagtctggacacgccgatggtgattctgggcaccgcgcatccggtcaagtttccggaagcggttgagaaagccggtgtaggaaaagcgcttgaactacctgcacatttgtctgatttgttcgagcgcgacgagcgctgtacggttctgccaaatgacctgaaagccatacaggcgtttgtcagccagcacggcaatcgcggcaaaccgctctga

SEQ ID NO: 35038 - protein, 469 aa, Pseudomonas syringae pv. syringae B728a
MRYISTRGQAPALNFEDVLLTGLASDGGLYVPENLPRFTQEEIASWAGLPYHELAFRVMRPFVAGSIPDADFKKILEETYGVFAHSAVAPLRQLHGNEWVLELFHGPTLAFKDFALQLLGRLLDYILAKRGQRVVIIGATSGDTGSAAIEGCRRCDNVDIFILHPNNRVSDVQRRQMTTIFGDNIHNIAVEGNFDDCQEMVKASFADQSFLKGTPLVAVNSINWARIMAQIVYYFHASLQLGGPARSVSFSVPTGNFGDIFAGYLARNMGLPINQLIVATNRNDILHRFMSGNQYVKETLHATLSPSMDIMVSSNFERLLFDMHGRNGAAIAELMSTFRQGGGFSVEEERWTETRKLFDSLAVSDEDTCTTIAEVFASTGELLDPHTAIGVKAARECRRSLDTPMVILGTAHPVKFPEAVEKAGVGKALELPAHLSDLFERDERCTVLPNDLKAIQAFVSQHGNRGKPL

SEQ ID NO: 35039 - DNA, 1278 bp, Haemophilus influenzae 86-028NP
  CDS (1)..(1278): transl_table=11
atgaatttatacaatatcaaacacccagaagaacaagtcactttttctcaggctgttcgtcaaggtcttgggtgggatcaaggtctattctttccagaagttattcctaaacttaataacattaatgaattacttgaattgcctcttgttgagcgtagtcaaaaaattctaggtgcattaattgatggcgagttaccacaagcaacgttagatgcaatggtaaaaaatgcgtttactttcactgcaccgttagaaaaagtggaagataatatttatgcacttgaattatttcacggtccaacgctagcatttaaagattttggtgggcgttttatggcacaggcacttgctgcggtacgtggcgatggcaaaattactattttaacggcaacctcaggcgatactggagccgctgtagcacatgcgttttatggattagaaaatattaatgtagttatcctttatccaaaaggcaaaattagcccattacaagaaaagctattctgtactttaggtgggaatattcgtactgttgcgattaacgctgatttcgatgcgtgtcaggctttggttaagcaagcctttgatgatgttgaattgcgccaagctatcgggctgaactctgcaaattctattaatatcagccgtttattagctcaagtttgttattactttgaggctgtcgcacaattgccaaaagaaaaacgtgataatgtcgtggtttctgtgccaagtggtaattttggtaacttaacggcgggattaattgcaaaaaccttaggcttgccgataaaacgctttgtcgcctcaacaaacgcaaatgatactgtgccacgttatttgaaatcgggtaattgggatcctaaaacgacagttgcaaccctttctaatgcaatggatgtaagtcgcccaaacaattggccgagagtggaagaattgtttaaacgaaatggttgggatttaactgatttaggttcggggatgctaagtgatagcgaaacagaagataccttaaaagcgatgcagtcgaaaggttatttatgtgaacctcacggtgcgatagcttatcaggtgttgaaagagcaacttaaagcgagtgaaacaggaatcttcttgtgtacggcgcatcctgcgaaatttaaagaatccgtagaacgtattcttggtattcagcttccattacctgaaacactggataaacataatcagctaccattgctttcagatgaaatggataatgattttgcacaactacgggcttacttattgaagtcataa

SEQ ID NO: 35040 - protein, 425 aa, Haemophilus influenzae 86-028NP
MNLYNIKHPEEQVTFSQAVRQGLGWDQGLFFPEVIPKLNNINELLELPLVERSQKILGALIDGELPQATLDAMVKNAFTFTAPLEKVEDNIYALELFHGPTLAFKDFGGRFMAQALAAVRGDGKITILTATSGDTGAAVAHAFYGLENINVVILYPKGKISPLQEKLFCTLGGNIRTVAINADFDACQALVKQAFDDVELRQAIGLNSANSINISRLLAQVCYYFEAVAQLPKEKRDNVVVSVPSGNFGNLTAGLIAKTLGLPIKRFVASTNANDTVPRYLKSGNWDPKTTVATLSNAMDVSRPNNWPRVEELFKRNGWDLTDLGSGMLSDSETEDTLKAMQSKGYLCEPHGAIAYQVLKEQLKASETGIFLCTAHPAKFKESVERILGIQLPLPETLDKHNQLPLLSDEMDNDFAQLRAYLLKS

SEQ ID NO: 35041 - DNA, 1410 bp, Pseudomonas fluorescens Pf-5
  CDS (1)..(1410): transl_table=11
atgcgctatatcagtactcgtggccaggcaccggccctgaatttcgaagatgtgctgctggcaggtctggccagcgacggcggtctctatgtgccagagaacctgccgcgtttcactcaggaagaaatcgcttcctgggctggcctgccgtatcacgagctggcgttccgggtcatgcgcccgttcgtcaccggcagcattccggacgccgatttcaagaagatccttgaagaaacctacggcgccttctcccacaacgccattgcgccgctgcgccagctcaacggcaacgagtgggtgctggagctgttccatggcccgaccctggcattcaaggacttcgccctgcaactgctgggtcgcctgctggactacgtgctggagaagcgcggcgagcgcgtggtgatcatcggtgccacctccggtgacaccggctcggcggccatcgaaggctgcaagcgttgcgacaacgtcgacatcttcatcctgcatccgcacaaccgtgtatcggaagtgcagcgccggcagatgaccaccatcctcggcgagaacatccacaacatcgccatcgaaggcaacttcgacgactgccaggaaatggtcaaggccagcttcgccgaccagggcttcctcaagggcactcgcctggtggcggtgaactcgatcaactgggcgcggatcatggcccagatcgtctactacttccacgcggccctgcagttgggcggcccggcacgttccatcgcgttctcggtgcccaccggcaacttcggcgacatcttcgccggctacctggcgcgcaacatgggcctgccgatcagccaactgatcgtcgccaccaaccgcaacgacatcctgcaccgcttcatgagcggcaatcagtacgtcaaggaaaccctgcacgcgaccctgtcgccgtccatggacatcatggtctcgtcgaacttcgagcgcctgctgttcgacctgcacggtcgcaacggcgcggccctggcggccttgatggacagcttcaagcagggcggcggtttcagcgtcgaacaggatcgctggaccgaagcgcgcaagctgttcgactccctggcggtgaacgacgagcagacctgcgaaaccatcgccgaagtcttcgcccagaccggcgaagtgctggacccgcacaccgcgatcggggtcaaggccgcccgtgaatgccggcgcagcctggatacacccatggtggtcctgggcaccgcgcacccggtcaagttcccggatgcggtggaaaaggccggtgtcggcaaggctctggagctgccggcgcacctgtccgacctgttccagcgtgaagagcgctgcacggtcctggccaacgacctgaaagcggtgcaggcttttgtcagccagcacggcaatcgtggcaagccgctctga

SEQ ID NO: 35042 - protein, 469 aa, Pseudomonas fluorescens Pf-5
MRYISTRGQAPALNFEDVLLAGLASDGGLYVPENLPRFTQEEIASWAGLPYHELAFRVMRPFVTGSIPDADFKKILEETYGAFSHNAIAPLRQLNGNEWVLELFHGPTLAFKDFALQLLGRLLDYVLEKRGERVVIIGATSGDTGSAAIEGCKRCDNVDIFILHPHNRVSEVQRRQMTTILGENIHNIAIEGNFDDCQEMVKASFADQGFLKGTRLVAVNSINWARIMAQIVYYFHAALQLGGPARSIAFSVPTGNFGDIFAGYLARNMGLPISQLIVATNRNDILHRFMSGNQYVKETLHATLSPSMDIMVSSNFERLLFDLHGRNGAALAALMDSFKQGGGFSVEQDRWTEARKLFDSLAVNDEQTCETIAEVFAQTGEVLDPHTAIGVKAARECRRSLDTPMVVLGTAHPVKFPDAVEKAGVGKALELPAHLSDLFQREERCTVLANDLKAVQAFVSQHGNRGKPL

SEQ ID NO: 35043 - DNA, 1377 bp, Pseudomonas fluorescens Pf-5
  CDS (1)..(1377): transl_table=11
atgcgttatgtgagtacccgcagtaccgccgagcaggtggatttcgaaagcgtggtgttatccggcgtggccgccgatggcgggctgtacgtgcctgccgagctgccacgcttcagcccccaggagatcgccaattggtcgaccctggattaccccgaactggccttccgggtgctcagcccctttgtgggcgactgcctgcccgaggcggacttcaaggccttgctcagccgcgcctacagcggctttggccaccgcgcggtggcgcccctgcgacagatcgaccgcaatgaatgggtgctggaactgttccatgggcccacaggctcggccaaggattttgccgcgcggttgcaggcgcaactggtgggctatttcctccagcgccggcagcgccacggggtgctggtgggggccagcaacggcgataccgcgctggcggctatcgacgccttcaaggactgcccgcagacccaggtgctggtgttctatccgcagcacggcgtgcccgagcagcaagggcagcagttgcaggcggcacacaaccccgggctgtggcgctttgccgtgcagggcagcttcgacgactgccagaccctggtggcccgcctgctgcgccaatggcccctggccgagcgcgaggtgatcggcttcaactccagcaattgggtcggggtcatggcccagctggtgctgtatttccatgccgtgctgcaactggggggcggccagcggcccatcggtttcagcgtgccggcggccagcttcgccgaggtctatgccggctatatcgtgcagaagatgggcctgcccatcacccagatgattgtcgccaccaaccgcaacgacgccctgcaccagctgttcctgaagaaccgctattgtcgcgccgaggccagccagagcctgtcgccggccatggacctgtcgctgttcgccaacctggagcgctttgtctgggagctctatggccaggacccgcatgcggtggcgggcctgatgcagcgctttgaaggcagtggcgagatgaccctgggcaacgagttctggctgcaggcgcggatgatcatcgactcctactcggtgagcgatgaagagaccggcaaggagatcagcagcctctatcgggacaccggctacatcatcgacccccatgctgccatcggtgtcctggcggcgcgcctgtaccgccgcagcctggtggcgcccatggtcaccctgggggagatcgcgccggccaagtcggctcggttgctgggctcgctgggtattcccgggctggcaccgcagccactcgcggcgccttccacggcgcagtggcaggcactggcagcggatgattttgccgccgtactgcactgcctgaaggcactgtga

SEQ ID NO: 35044 - protein, 458 aa, Pseudomonas fluorescens Pf-5
MRYVSTRSTAEQVDFESVVLSGVAADGGLYVPAELPRFSPQEIANWSTLDYPELAFRVLSPFVGDCLPEADFKALLSRAYSGFGHRAVAPLRQIDRNEWVLELFHGPTGSAKDFAARLQAQLVGYFLQRRQRHGVLVGASNGDTALAAIDAFKDCPQTQVLVFYPQHGVPEQQGQQLQAAHNPGLWRFAVQGSFDDCQTLVARLLRQWPLAEREVIGFNSSNWVGVMAQLVLYFHAVLQLGGGQRPIGFSVPAASFAEVYAGYIVQKMGLPITQMIVATNRNDALHQLFLKNRYCRAEASQSLSPAMDLSLFANLERFVWELYGQDPHAVAGLMQRFEGSGEMTLGNEFWLQARMIIDSYSVSDEETGKEISSLYRDTGYIIDPHAAIGVLAARLYRRSLVAPMVTLGEIAPAKSARLLGSLGIPGLAPQPLAAPSTAQWQALAADDFAAVLHCLKAL

SEQ ID NO: 35045 - DNA, 1422 bp, Psychrobacter arcticus 273-4
  CDS (1)..(1422): transl_table=11
atgaaatatatcagtacccgtggtcagacagcaccgatggattttagtgatgtgttattaatgggtcttgcaccggacggtggtttgatgttgcctgagcactatccaaacattgatagtgcgacgcttactgagtggcgcgcgcttagctacccacagcttgcaatggcgattatgcagcgctttgcgactgatattcctgccgctgatttacaagatattattgagcgcacttataccgctgatatatttggctctgatgagattgtccctgtccgcaagcttgaagatgatttatacgttttaggcttatcaaatggtccaacgttggcattcaaagacgttgccatgcagttcttaggcaatgcttttgaatatgtacttaaaagaaaagacgcgtgcatcaccattatcggagcgaccagtggcgatacgggtagtgcagcagaatatgcactgcgcggtaaagaaaacatcgaagtgtttatgctgtcaccacatggcaaaatgagtgaatttcagcgcgcacaaatgtatagtttaaccgatgataatattcataatattgccattgatggcatgtttgatgattgccaagatattgtcaaagcactacaacaagatgcagagttcaaagcggcttataacttaggcacagtcaattctattaattggggtcgtatcctagcgcagattgtttattactttaaagcctactttgcggtgactacgagcaacgatgaaaaggttagttttagcgtgccatcaggcaactttggtaatatctgcgctggtcatattgcccgtgaaatggggttgcctgttgagcgtttaattgtcgcgaccaatgaaaacgatgtcttaaacgacttctttaatcaaggtgcctatcagccgcgaccgactgccaaaacttatatcacctcaagcccctcaatggatatttccaaagcgtccaactttgagcgttttgtctatctcttactagataaagacagcgcccgtgttcatgaattgtttgaaggggtgaaatctggccaaggttttgatttgtctgatttgatgcaagcagtcaatagtcgttatggttttgccgctggtaaatctacccatagtgaccgcttacaaaccattaaaacactttatgagcaatatggtgagctggtcgatccgcataccgctgatggtattaaagttgccaaagaattgcagcaagagggtgaggtgattatttgcgctgagactgcacttccagtgaaatttgcggatactatcgttgaggccattggtcaaatagagattgcacgcccagcccataccgaaggcttagagagtttgcctcaacatgtggtggtgcttgataatgacgctgaattagtcgctgaacaaatccgtcaacaggttacaccaaatcctacatag

SEQ ID NO: 35046 - protein, 473 aa, Psychrobacter arcticus 273-4
MKYISTRGQTAPMDFSDVLLMGLAPDGGLMLPEHYPNIDSATLTEWRALSYPQLAMAIMQRFATDIPAADLQDIIERTYTADIFGSDEIVPVRKLEDDLYVLGLSNGPTLAFKDVAMQFLGNAFEYVLKRKDACITIIGATSGDTGSAAEYALRGKENIEVFMLSPHGKMSEFQRAQMYSLTDDNIHNIAIDGMFDDCQDIVKALQQDAEFKAAYNLGTVNSINWGRILAQIVYYFKAYFAVTTSNDEKVSFSVPSGNFGNICAGHIAREMGLPVERLIVATNENDVLNDFFNQGAYQPRPTAKTYITSSPSMDISKASNFERFVYLLLDKDSARVHELFEGVKSGQGFDLSDLMQAVNSRYGFAAGKSTHSDRLQTIKTLYEQYGELVDPHTADGIKVAKELQQEGEVIICAETALPVKFADTIVEAIGQIEIARPAHTEGLESLPQHVVVLDNDAELVAEQIRQQVTPNPT

SEQ ID NO: 35047 - DNA, 1305 bp, Colwellia psychrerythraea 34H
  CDS (1)..(1305): transl_table=11
gtgaaatattataatttaaaagaaaatgatgagcaggtaactttcgctcaagcagttaaacaaggtttaggtaaaaatcagggcttatttttccctaccgatatgccaaaacttgataatatcgaagagctgctagcactgcctttggtagagcgtagtgttaaaatattagcaccatttgttgaaggtgacttaacaaaaagtgaattaactgacattgttaccgatgcttttaatttccctgctttattacagccgattagcccagaccgtgccattttagaattattccacgggccaacgttagcttttaaagattttggtgcccgctttatggccaagtgtttacaagtatttgttgctaaagatgctaaagcaagtggtgagacaaaacctttgaccattttaaccgctacgtctggtgataccggtgcggctgttgctcatgcttttcacggtattgataacattcgtgttgtcatcatgtatccgaaaggaaaaattagcttactacaagaaaaaatgtttaccacgctaggtggaaatattgaaacattagcagtggatggtgattttgatgattgccaaacattagtaaagcagtcttttgatgataaagaattggcaaatactatcggtttgaattcggcaaactcaataaacatcagtcgattattggcacaagtatgttattactttgaagcagtagcacaattatcacgcgcaaagagtgatttaagtagcattgtattctctatccctagtggtaattttggtaacctaaccgctggtttatttgccaaagcaatgggcttgccaattaaacgctttattgccgcaactaacgctaatgatacggtgccacgttacttagaaacaggtgagtggacacccaatgtaaccgtcgctactatttcaaatgcaatggatgtgagtaacccgaataactggccgcgcgttgagcatatgctcaagagtggtattgttgaacaaggttgtgtcagctcagtatctattgatgaagaacaaacccaatcaaccgttattcaacttcgtaagttaggttacatcagtgaaccacatgctgctgttgcttataaagcgctacaatatagtgctgtagaaggggagtttggtgtctttttaggaacagctcatcctgcgaaatttaaagaagttgttgaaagcattcttggtcaaccgttaggtttaccaaaagagcttgcggattgtgctggtgagcctatcttgtcgcaagatcttgctgcaaacttcagtgatttacgtagttatcttttaagttag

SEQ ID NO: 35048 - protein, 434 aa, Colwellia psychrerythraea 34H
MKYYNLKENDEQVTFAQAVKQGLGKNQGLFFPTDMPKLDNIEELLALPLVERSVKILAPFVEGDLTKSELTDIVTDAFNFPALLQPISPDRAILELFHGPTLAFKDFGARFMAKCLQVFVAKDAKASGETKPLTILTATSGDTGAAVAHAFHGIDNIRVVIMYPKGKISLLQEKMFTTLGGNIETLAVDGDFDDCQTLVKQSFDDKELANTIGLNSANSINISRLLAQVCYYFEAVAQLSRAKSDLSSIVFSIPSGNFGNLTAGLFAKAMGLPIKRFIAATNANDTVPRYLETGEWTPNVTVATISNAMDVSNPNNWPRVEHMLKSGIVEQGCVSSVSIDEEQTQSTVIQLRKLGYISEPHAAVAYKALQYSAVEGEFGVFLGTAHPAKFKEVVESILGQPLGLPKELADCAGEPILSQDLAANFSDLRSYLLS

SEQ ID NO: 35049 - DNA, 1452 bp, Pseudomonas syringae pv. phaseolicola 1448A
  CDS (1)..(1452): transl_table=11
ttgaagcttaaggctttcagctcaaaccaaaggtttgatcccatgcgctatatcagtactcgcggccaggcgccggccctgaacttcgaagacgtgctgttgactggtctggccagcgacggcggtctgtatgtgccggaaaacctgccacgcttcactcaggaagagatcgcctcctgggccggtctgccgtatcacgaactggcctttcgggtgatgcgcccctttgtggctggcagcatcccggatgccgatttcaaaaaaattcttgaagagacctacggtgtcttcgcccacagtgcagtggcaccgttgcgtcagttgaatggcaacgagtgggtacttgagctgttccacggtcctaccctggcgttcaaggactttgcgctgcaattgctcggccgcctgctggactacgtgctggccaagcgtggcgagcgtgtggtgatcatcggcgctacctcgggtgacaccggctctgcagccatcgaaggctgccgtcgctgtgacaacgtcgacatcttcattctgcacccgaacaatcgggtatcggatgtccagcgccggcagatgaccaccatctttggcgacaacatccacaacattgcagtagaaggcaacttcgacgactgccaggaaatggtcaaggccagcttcgccgatcagggcttcctcaagggcacgcgtctggtcgccgtcaactcgatcaactgggcgcgaatcatggcccagatcgtctactacttccatgcatcgctgcagttgggcggtcccgcgcgctcggtatcgttctcggttccgaccggtaacttcggcgatatctttgccggttacctggcacgcaacatggggctgccggtcaatcaactgatcgtcgccaccaaccgcaacgacattctgcaccgtttcatgagcggcaatcagtacgtcaaggaaaccctgcacgctacgttgtcgccttccatggacatcatggtgtcgtcgaacttcgaacgcctgttgttcgatatgcacggtcgcaacggttctgccattgccgagttgatgagcacgttcaggcagggcggcggtttcagtgtcgaagaagagcgctggaccgaaacccgcaaactgttcgattcgctggcagtcagcgacgaggacacctgtacgaccattgctgaagtgtttgccagcaccggcgaactgcttgatccgcataccgctatcggggtgaaggctgctcgcgaatgccgtcgcagcctggacacgccgatggtgattctgggtacggcgcatccggtcaagtttccggaggcagtggagaaggccggtgtaggaaaagcgcttgagctacctgcacatttgtctgatttgttcgagcgtgacgagcgctgcactgtgctgccaaatgacctgaaagccatacaggcatttgtcagccagcatggcaatcgcggcaaaccactctaa

SEQ ID NO: 35050 - protein, 483 aa, Pseudomonas syringae pv. phaseolicola 1448A
MKLKAFSSNQRFDPMRYISTRGQAPALNFEDVLLTGLASDGGLYVPENLPRFTQEEIASWAGLPYHELAFRVMRPFVAGSIPDADFKKILEETYGVFAHSAVAPLRQLNGNEWVLELFHGPTLAFKDFALQLLGRLLDYVLAKRGERVVIIGATSGDTGSAAIEGCRRCDNVDIFILHPNNRVSDVQRRQMTTIFGDNIHNIAVEGNFDDCQEMVKASFADQGFLKGTRLVAVNSINWARIMAQIVYYFHASLQLGGPARSVSFSVPTGNFGDIFAGYLARNMGLPVNQLIVATNRNDILHRFMSGNQYVKETLHATLSPSMDIMVSSNFERLLFDMHGRNGSAIAELMSTFRQGGGFSVEEERWTETRKLFDSLAVSDEDTCTTIAEVFASTGELLDPHTAIGVKAARECRRSLDTPMVILGTAHPVKFPEAVEKAGVGKALELPAHLSDLFERDERCTVLPNDLKAIQAFVSQHGNRGKPL

SEQ ID NO: 35051 - DNA, 1428 bp, Dechloromonas aromatica RCB
  CDS (1)..(1428): transl_table=11
atgcgctatctctcgacccgcggtcacgccgcgccccaggctttctgcgacattctccttggtggcctggccccggatggtggtctctacctcccggaaagctacccgcagatcagccgagccgaacttgatgcctggcgccaactgtcgtatgccgatctggcttatgagatcctgtccaagttcatcaccgatattccggcagccgatctgaaggcgctggtcgccaagacctacactgccaaggtttattgccatacccgcaacgggggggatgctgcccagatcacgccgctgaccaagctggaagacggcctctacactcaggaactgtccaacggcccgacgctggccttcaaggatatggccatgcagttgctcggcaacctgtttgagtacgtgctcgacaagcgtggtgagtcgatcaacatccttggcgcgacttccggcgacaccggttcggcggccgagtacgccatgcgcggcaagcacaacgtcaaggtcttcatgctctcgccggatggcaagatgagcgccttccagcgcgcccagatgtattcgctgcaggatgccaacatcttcaacattgccgtcaccggcatgttcgacgacgcgcaggatatcgtgaaggctgtctcgaatgacgctgcgttcaaggccaagtacaagattggcgccgtcaattcgatcaattgggcacgggtcgctgcacagattgtctattacttccaaggctacttcctggctacccggtcgaacgacgagcaggtcgctttcgccgtgccgtcgggtaatttcggcaatatctgcgccggccacatcgctcgccagatgggcttgccaatcgcccgtctcgttttggccaccaatgaaaacgacgtgctcgacgagtttttccgcaccggtgtctatcgtccgcgtacctcggctgaaaccagcattacttccagcccgtcgatggatatttccaaggcctccaatttcgagcgctttgtgttcgacctggtcggccgtgatccggctgtcgtcaaggagttgtgggccaaagtggacaaggggcaggctttcgatctgtcggcaacggccttctggaaaaacatgccgaaattcgggtttgtgtctggcaagagcacgcacatcgaccgcatcaacacgatccgttttgcgcaaggccgctataacgtgatgctcgacacccataccgccgatggcctgaaggtggcgcttgagcatcgtctgccgaatgtgccgatgattgttctggaaactgctcagccggccaagttcgaggaaacgattcgtgaggcactgggcaccgagccggttcgtccagctgatctggcgggtatcgagaacctgccacagcgcgtcgtggtcatggcgccggatgtggaggccatcaagcagttcctcgtcgagcgagtgtga

SEQ ID NO: 35052 - protein, 475 aa, Dechloromonas aromatica RCB
MRYLSTRGHAAPQAFCDILLGGLAPDGGLYLPESYPQISRAELDAWRQLSYADLAYEILSKFITDIPAADLKALVAKTYTAKVYCHTRNGGDAAQITPLTKLEDGLYTQELSNGPTLAFKDMAMQLLGNLFEYVLDKRGESINILGATSGDTGSAAEYAMRGKHNVKVFMLSPDGKMSAFQRAQMYSLQDANIFNIAVTGMFDDAQDIVKAVSNDAAFKAKYKIGAVNSINWARVAAQIVYYFQGYFLATRSNDEQVAFAVPSGNFGNICAGHIARQMGLPIARLVLATNENDVLDEFFRTGVYRPRTSAETSITSSPSMDISKASNFERFVFDLVGRDPAVVKELWAKVDKGQAFDLSATAFWKNMPKFGFVSGKSTHIDRINTIRFAQGRYNVMLDTHTADGLKVALEHRLPNVPMIVLETAQPAKFEETIREALGTEPVRPADLAGIENLPQRVVVMAPDVEAIKQFLVERV

SEQ ID NO: 35053 - DNA, 1449 bp, Ralstonia eutropha JMP134
  CDS (1)..(1449): transl_table=11
atgaaataccagtcgacccgcggccacgaagtgccgcaatcgttctctgaaatcctgctgggcggcctggcgccggacggcggcctgtacctgcccgtgcagtacccacaggtcaccgccgacgagctggaggcctggcgcaagctgtcgtacgccgacctggcgttcgagatcctgagcaagttctgcgacgatatcccggccgaggacctgcgcgcgctgacgcgcaagacctataccgccgaggtgtactgcaacgcgcgcgccggcgataacaccgccgacatcacgccgctgcgcacgctgggcgaggaaggcggcacgaagctgcaactgctgggcctgtccaacggcccgacgctggccttcaaggacatggccatgcaactgctcggcaatatgttcgagtacgcgctgggccgtgccgggctggagctcaacatcctgggcgccacgtccggcgataccggcagcgctgccgaatacgcgatgcgcggcaagcgcggcatccgcgtgttcatgctgagcccgcaccgcaagatgagcgcgttccagaccgcgcagatgttcagcctgcaagatccgaacatcttcaacctggcggtggaaggtgtgttcgatgattgccaggacatcgtcaaggcggtctcgaacgacctcgaatacaaggcccgccagcgtatcggtacggtcaattcgatcaactgggcgcgtgtggtggcccaggtcgtgtactacttcaagggctggctgctcgcgaccacgggcccaggccagaaggtgtcgttctgcgtgccgtcgggcaacttcggcaacgtctgcgccggccatatcgcgcgcatgatgggtttgccgatcgacaagctcgtggttgccaccaacgagaacgacgtactcgacgagttcttccgcacaggcgcctaccgtgtgcgcaagtcggccgagacttaccatacgtcgagcccgagcatggatatctcgaaggcgtcgaacttcgaacgcttcatcttcgacctgctcggccaggacgccggcaagctggccgcgctgttccgcgatgtggacgagaagggcggcttcgacctgtcggggacgcccgagtacgagcgcatccgcggcgagtttggctttgtctcgggccgcagcacgcacggggaccgcgtggcgacgatccgcgacatgtcggcgcgctatggcatcacgatcgatacccataccgcggatggcatcaaggtggcgcgtgagcatctcagcgccgacgtgccgatggtagtgctggaaaccgcgctgccggccaagtttgccgacaccatccgtgaagcgctgggccacgagcccgagcgcccggcggcgttcgaaggcatcgagaagctgccgcagcgcttcgaggtgatggccaacgacgccagccaggtcaaggcctttatcgctggtcacaccggcctgtaa

SEQ ID NO: 35054 - protein, 482 aa, Ralstonia eutropha JMP134
MKYQSTRGHEVPQSFSEILLGGLAPDGGLYLPVQYPQVTADELEAWRKLSYADLAFEILSKFCDDIPAEDLRALTRKTYTAEVYCNARAGDNTADITPLRTLGEEGGTKLQLLGLSNGPTLAFKDMAMQLLGNMFEYALGRAGLELNILGATSGDTGSAAEYAMRGKRGIRVFMLSPHRKMSAFQTAQMFSLQDPNIFNLAVEGVFDDCQDIVKAVSNDLEYKARQRIGTVNSINWARVVAQVVYYFKGWLLATTGPGQKVSFCVPSGNFGNVCAGHIARMMGLPIDKLVVATNENDVLDEFFRTGAYRVRKSAETYHTSSPSMDISKASNFERFIFDLLGQDAGKLAALFRDVDEKGGFDLSGTPEYERIRGEFGFVSGRSTHGDRVATIRDMSARYGITIDTHTADGIKVAREHLSADVPMVVLETALPAKFADTIREALGHEPERPAAFEGIEKLPQRFEVMANDASQVKAFIAGHTGL

SEQ ID NO: 35055 - DNA, 1443 bp, Thiobacillus denitrificans ATCC 25259
  CDS (1)..(1443): transl_table=11
atgaactacctcagcacgcggggcctcgcgccgcaactccgcttttccgacatcctgctcggcgggctggccgacgacggcggcctctacgtgcccgaggcgtacccgcgtttcacggcggccgagctcgaggcgatgcgggcgatgaactaccgcgaactcgcgttcgcggtgctgtcgcgactcgtcgacgacattccggcggacgacctgcgcgcgctgatcgacaagacctataccgccgacgtctaccgctatgtcggccgcggcgagaatgctgccgacatcacgccgctcaagacgctggagcccggtctgcacgtgctcgcgctgtcgaacggcccgacgctcgcgttcaaggacatggcgatgcagctcctcggcaacctgttcgagtacgtgctcggcaagaccgggggcgaactcaacatcgtcggcgcgacctcgggcgacacgggttcggcggccgaatacgccatgcgcggcaagaagggcgtgcgcgtcttcatgctgtcgccggagcatggcatgacgcgcttccagcaggcgcagatgtacgcgctgcgcgacgacaacatccacaacctcgtgattcgcggcgtcttcgaccaatgccaggacatggtcaaggccgtggcgaacgacctgccgttcaaggcgaaataccatatcggcgcggtcaactcgatcaactgggcgcgcgtcgcggcgcagagcgtctactacttcaaggcgtatttcgcggcgacccacagcaacacgcaaagcgtttcgttctcggtgccgtcgggcaatttcggcaacgtctatgccgggcacgtcgcgcgccagatgggcctgccgatcaacaagctgatcgtcgcgaccaacgagaacgacgtgctcgacgaattcttcaagaccggcgtctaccgtccgcgcccggagacaaaacacacgtcgagcccctcgatggatatttccaaggcatcgaatttcgaacgcttcgtcttcgacctgagcggccgcgacgtcgcgaaggtgcgcgacctctggcgcgcggtcgagtcgggcggcagcttcgatctcaagacccacgccgcgccgggcggcggcagcttgttcgagcgcatcgccgatttcggcatggtctcgggttcgagcaaccatgccaaccgcatcgacacgatccgtacggtctacgaggtctacggcacgatgatcgatccacacacggccgacggcctcaaggtcgggctcgagcaccgcgagccgggcgtgccgctcgtgtgcatggaaacggcgcagcccgccaagttcgaggacgcgattcgcgaagcgctcggcatcgacccggtccgtccggccgagctcgccgacctcgaaacccagccgcagaagaagcacgtcatggacgccgacgtcgatgcggtcaagcgcttcctcgtcgaacacgccggctga

SEQ ID NO: 35056 - protein, 480 aa, Thiobacillus denitrificans ATCC 25259
MNYLSTRGLAPQLRFSDILLGGLADDGGLYVPEAYPRFTAAELEAMRAMNYRELAFAVLSRLVDDIPADDLRALIDKTYTADVYRYVGRGENAADITPLKTLEPGLHVLALSNGPTLAFKDMAMQLLGNLFEYVLGKTGGELNIVGATSGDTGSAAEYAMRGKKGVRVFMLSPEHGMTRFQQAQMYALRDDNIHNLVIRGVFDQCQDMVKAVANDLPFKAKYHIGAVNSINWARVAAQSVYYFKAYFAATHSNTQSVSFSVPSGNFGNVYAGHVARQMGLPINKLIVATNENDVLDEFFKTGVYRPRPETKHTSSPSMDISKASNFERFVFDLSGRDVAKVRDLWRAVESGGSFDLKTHAAPGGGSLFERIADFGMVSGSSNHANRIDTIRTVYEVYGTMIDPHTADGLKVGLEHREPGVPLVCMETAQPAKFEDAIREALGIDPVRPAELADLETQPQKKHVMDADVDAVKRFLVEHAG

SEQ ID NO: 35057 - DNA, 1491 bp, Streptococcus agalactiae A909
  CDS (1)..(1491): transl_table=11
atggcaatagtatatcaatcaacacgtgatgctagtaataaagtgacagctagtcaagcgattctaaagggattagctgacgatggaggactctttactcccatcacatttccaaaagttgatttagatttcactaaacttaaggatgcttcctaccaagaagtggctaaactcgttttgtcagctttttttgatgattttactgaacaagaattggattactgtattagtcaagcttatgatactaaatttgatacaactgaaatagccccgttagtaaaggttggagaccggtatcaccttgaattatttcacggtcctacaattgcatttaaagatatggctttatccattcttccttatttgctaacaacagcagccaaaaaacaaggggtcgataataaaatcgttattttaacagcaacatcaggtgacactggcaaggcagcgatggcaggttttgcagatgttccaggaactgagattattgtcttttatcctaaaaatggtgttagttatatccaagaattgcagatgataacacaagccgggcaaaatacccatgttgttgcgattgaaggaaattttgatgatgcacagacttcggttaaagaaatgttcaataattccattcttcgatcaaaattatcacagcagcatatgcagttatcatcagccaattcaatgaacatcggtcgccttgttcctcaaattgtttactatatatatgcatatgctcaattagttaagtcaaaggaaatctcaattggtcaaccaattaattttagtgtacctacaggaaattttggtaatattttagcagcatattatgctagtcaaattggattacctgttaccaaactcatttgtgcctcaaatgataataacgttctaacagatttttttaagacacaaacctacgataaaaatcgagaatttaaagtgacatcaagtccctctatggatattttggtctcctctaatctagaacgattaatctttcaccttttaggcgatgatgcagaaacgactaaaaaattaatggaagatttagtgactactggggagtatgccttagaggctaggcaagcaaatattttagagagctttgtagcgggatttgcgacagaacaatttgttgaattagacatcaaacgtttatttgaccagtatcagtatatagaggatccgcatacagctgtagcatcagctgtttaccaagcttatcagacagaaactaaagatcaaactccaacagtaattgtgtcaacagcaagtccttataagttcccgtgtgttgttacaaaggctattacaaataaagaagagatacaggatttcgctgctatttcaatcttaaacgatttgtcaggtgtttctttacctagggcggttacagatctacaaaaggccgaagtaatccatagaacggtagtacctacctcaaatatgcgagaaacgcttgaagagtgtctaggtttgaaacaataa

SEQ ID NO: 35058 - protein, 496 aa, Streptococcus agalactiae A909
MAIVYQSTRDASNKVTASQAILKGLADDGGLFTPITFPKVDLDFTKLKDASYQEVAKLVLSAFFDDFTEQELDYCISQAYDTKFDTTEIAPLVKVGDRYHLELFHGPTIAFKDMALSILPYLLTTAAKKQGVDNKIVILTATSGDTGKAAMAGFADVPGTEIIVFYPKNGVSYIQELQMITQAGQNTHVVAIEGNFDDAQTSVKEMFNNSILRSKLSQQHMQLSSANSMNIGRLVPQIVYYIYAYAQLVKSKEISIGQPINFSVPTGNFGNILAAYYASQIGLPVTKLICASNDNNVLTDFFKTQTYDKNREFKVTSSPSMDILVSSNLERLIFHLLGDDAETTKKLMEDLVTTGEYALEARQANILESFVAGFATEQFVELDIKRLFDQYQYIEDPHTAVASAVYQAYQTETKDQTPTVIVSTASPYKFPCVVTKAITNKEEIQDFAAISILNDLSGVSLPRAVTDLQKAEVIHRTVVPTSNMRETLEECLGLKQ

SEQ ID NO: 35059 - DNA, 1410 bp, Pseudomonas fluorescens PfO-1
  CDS (1)..(1410): transl_table=11
atgcgttacatcagtacccgcggccaggcaccggccctgaatttcgaagacgtcctgctggccggtcttgccaccgacggcggtctgtacgtcccggaaaacctgccacgcttcacccaggaagaaatcgcttcctgggccggcctgccgtatcacgagctggctttccgcgtcatgcgcccgttcgtcaccggcagcattccggacgccgatttcaaaaagattcttgaagaaacctacggtgtgttcgcccacaacgccgttgcgccgctgcgtcagctgaacggcaacgaatgggtgctggagctgttccacggcccgaccctggcgttcaaggacttcgccctgcaactgctcggtcgcttgctcgactacgtgctggaaaagcgcggcgagcgcgtggtgatcgtcggcgccacttcgggtgacaccggttcggccgccatcgaaggctgcaagcactgcgaaaacgtcgacatcttcatcctgcacccgcacaaccgtgtgtccgacgtgcagcgtcggcagatgaccaccatcctcggtgagaacatccacaacatcgccatcgaaggcaacttcgatgactgccaggaaatggtcaaggccagcttcgccgaccagagtttcctcaagggcactcgcctggttgcagtcaactctatcaactgggcgcggatcatggcccagatcgtttactacttccacgccgccctgcaattgggcggcccggcgcgttcggtgtcgttctcggtgccgaccggcaacttcggcgacatcttcgccggttacctggcgcgcaatatgggcctgccgatcaaccagttgatcgtcgccaccaaccgcaacgacatcctgcaccgcttcatgagcggcaaccagtacgtcaaggaaaccctgcacgctacgctgtcgccgtcgatggacatcatggtctcgtcgaacttcgaacgcctgctgttcgacctgcacggtcgcaacggcgcggcgattgccggcctgatggattcgttcaagcagggcggcggtttcagcgtcgaccaggaacgctggaccgaagcacgcaagctgttcgattctctggccgtggacgatgcgcaaacctgcgaaaccatcgccgaagtctacgagcagaccggtgaagtgctggatccgcacaccgccatcggcgtgaaagccgctcgcgaatgccgtcgcagcctggatatcccgatggtgattctgggcacggcgcatccggtcaagttcccggacgcggtggagaaagccggtgtaggaaaagctctcgaactacctgcacatctttctgatttgtttgagagagaagagcgctgcactgtgctgccgaatgagctcaaagccgtgcaggcctttgtcagtcagcatggcaaccgcggcaagcctctttaa

SEQ ID NO: 35060 - protein, 469 aa, Pseudomonas fluorescens PfO-1
MRYISTRGQAPALNFEDVLLAGLATDGGLYVPENLPRFTQEEIASWAGLPYHELAFRVMRPFVTGSIPDADFKKILEETYGVFAHNAVAPLRQLNGNEWVLELFHGPTLAFKDFALQLLGRLLDYVLEKRGERVVIVGATSGDTGSAAIEGCKHCENVDIFILHPHNRVSDVQRRQMTTILGENIHNIAIEGNFDDCQEMVKASFADQSFLKGTRLVAVNSINWARIMAQIVYYFHAALQLGGPARSVSFSVPTGNFGDIFAGYLARNMGLPINQLIVATNRNDILHRFMSGNQYVKETLHATLSPSMDIMVSSNFERLLFDLHGRNGAAIAGLMDSFKQGGGFSVDQERWTEARKLFDSLAVDDAQTCETIAEVYEQTGEVLDPHTAIGVKAARECRRSLDIPMVILGTAHPVKFPDAVEKAGVGKALELPAHLSDLFEREERCTVLPNELKAVQAFVSQHGNRGKPL

SEQ ID NO: 35061 - DNA, 1386 bp, Rhodobacter sphaeroides 2.4.1
  CDS (1)..(1386): transl_table=11
atgcagtatatctcgactcgcggcacggctccggttctcggcttcggcgaggccatgctgacgggccttgcccgggacggcggtctctatgtgcccgagtcggtgcccgccctgtcggagtccgagatcgcggcgctggcgggcctgtcctacgaggaggtggccttccgcatcatgcggcccttcgtgggagagaccttcggcgacgacgagttccgcggcctgatcgccgccgcctacgagggcttcggccatgccgcccgcgcgccgctggtgcaactcggcccgaaccacttcctgctcgagctgttccacgggcccacgctcgccttcaaggacttcgccatgcagctgatcggccagctgttccaggcggcgctggcgaagaacgggcaacggatcaccatcgtcggcgccacctcgggcgacaccggctcggccgcgatcgaggccttccgcggcctctcgaacgtcgatgtctttatcctcttcccgcacggccgcgtgtccgaggtgcagcgacgccagatgacgacgccgtccgagccgaacgttcacgccctcgcggtggacggcgacttcgacgattgccaggcccggctgaaggacatgttcaacgacttcgccttccgcgatgcggtggggctggctggcgtcaattcgatcaactgggcgcgggtgctggcgcaggtcgtctattacttcacctcggccgtggcgctcggcgcgccgcaccgcgaggtgagcttcacggtgcccaccggcaatttcggcgacatcttcgcgggctacatcgcgcggcgcatggggctgcccatcgcccgcctcgtggtggccaccaaccagaacgacatcctgcaccgtgcgctctcgacgggcgcctacgagaccgagggcgtcacgccgtcgatcagcccctcgatggacatccaggtctcctcgaacttcgagcgggccttgttcgatgcctatggccgcgacggggcggcggtggcagccctcatggccgagctgaaggagggcggcttccgcatctccgaaaatgcgctggggacgctgcgcgcgaccttcgcctcgggccgcgcctccgaggaagagacgctggccacgatccgcgccacccatgcggcgacgggcgagcttctctgcccccattcggccgtgggcgtgaaggtggccgaggaggcgctcggccccgagccgatgatcacgctcgccaccgcccatccggccaagttccccgatgcggtcgaggcggccactggcctgcgcccgccgctgcctgcccgcatggccgatctcttcgaccgacccgagcgggtgacgcgcgttcccaacgacctgtccgccctcgaaaccctcatccgcgaaaggaccgggcgttga

SEQ ID NO: 35062 - protein, 461 aa, Rhodobacter sphaeroides 2.4.1
MQYISTRGTAPVLGFGEAMLTGLARDGGLYVPESVPALSESEIAALAGLSYEEVAFRIMRPFVGETFGDDEFRGLIAAAYEGFGHAARAPLVQLGPNHFLLELFHGPTLAFKDFAMQLIGQLFQAALAKNGQRITIVGATSGDTGSAAIEAFRGLSNVDVFILFPHGRVSEVQRRQMTTPSEPNVHALAVDGDFDDCQARLKDMFNDFAFRDAVGLAGVNSINWARVLAQVVYYFTSAVALGAPHREVSFTVPTGNFGDIFAGYIARRMGLPIARLVVATNQNDILHRALSTGAYETEGVTPSISPSMDIQVSSNFERALFDAYGRDGAAVAALMAELKEGGFRISENALGTLRATFASGRASEEETLATIRATHAATGELLCPHSAVGVKVAEEALGPEPMITLATAHPAKFPDAVEAATGLRPPLPARMADLFDRPERVTRVPNDLSALETLIRERTGR

SEQ ID NO: 35063 - DNA, 1452 bp, Burkholderia sp. 383
  CDS (1)..(1452): transl_table=11
atgaattacatctccacgcgcggcgccggcatcggcgagcgccacacgttctccgacatcctgctcggcggtctcgcgaaggacggcgggctctacctgccggccgagtatccgacggtgtccgccgacgagctcgcacgctggcgctcgctgtcgtacgcggatctggcgttcgagatcctgtcgaagttctgcgacgacgtgccggccgacgacctgcgcgcgatcacgcgtcgcacgtacacggccgacgtgtaccgcaacacgcgccatggcgagaacgcgtccgacatcacgccgctgaagacgctcggcaccgagaacggcgcgccgatctcgctgctcgaactgtcgaacggcccgacgctcgcgttcaaggacatggcgatgcagctgctcggcaacctgttcgagtacacgctcgcaaagcacgggcagacgctgaacattctcggcgcgacgtccggcgacaccggcagcgcggccgaatacgcgatgcgcggcaaggccggcgtgcgcgtgttcatgctgtcgccgcacaagaagatgagcgcgttccagacggcccagatgttcagcctgcaggatccgaacatcttcaacctcgcggtcgaaggcgtgttcgacgactgccaggacatcgtgaaggccgtgtcgaacgatcacgcgttcaaggcgcagcagaagatcggcacggtcaactcgatcaactgggcgcgcgtcgtcgcgcaggtcgtgtactacttcaagggctacttcgcagcgacgcagtccaacgacgaacgcgtgtcgttcacggtgccgtcgggcaacttcggcaacgtctgcgcaggccacatcgcgcggatgatggggctgccgatcgcaaagctggtggtcgcgaccaacgagaacgacgtgctcgacgagttcttccgcacgggcgcgtatcgcgtgcgcagcgccgagaacacctatcacacgagcagcccgagcatggacatttcgaaggcgtcgaacttcgagcgcttcgtgttcgacctgctcggccgcgatccggcacgcgtgatgcagctgttccgcgacgtcgaggagaagggcggcttcgatctcgcggcgagcggcgatttctcgcgcgtcgccgagttcggtttcgtgtcgggcagcagcagccacacggaccgcatcgcgacgatccgtgacgtgttctcgcgctacgacacgatgatcgatacgcatacggccgacggcgtgaaggtcgcgcgcgagcatctcgacgcgggtgtgccgatggtcgtgctcgagacggcgcagccgatcaagttcggcgagacgattcgcgaagcactcgatcgcgaagccgagcgtccggctgcattcgacgggctcgaggcgctgccgcagcgtttcgaggtcgtgaacgccgatgcgcagcaggtgaaggacttcatcgccgcccatacgggcgcatga

SEQ ID NO: 35064 - protein, 483 aa, Burkholderia sp. 383
MNYISTRGAGIGERHTFSDILLGGLAKDGGLYLPAEYPTVSADELARWRSLSYADLAFEILSKFCDDVPADDLRAITRRTYTADVYRNTRHGENASDITPLKTLGTENGAPISLLELSNGPTLAFKDMAMQLLGNLFEYTLAKHGQTLNILGATSGDTGSAAEYAMRGKAGVRVFMLSPHKKMSAFQTAQMFSLQDPNIFNLAVEGVFDDCQDIVKAVSNDHAFKAQQKIGTVNSINWARVVAQVVYYFKGYFAATQSNDERVSFTVPSGNFGNVCAGHIARMMGLPIAKLVVATNENDVLDEFFRTGAYRVRSAENTYHTSSPSMDISKASNFERFVFDLLGRDPARVMQLFRDVEEKGGFDLAASGDFSRVAEFGFVSGSSSHTDRIATIRDVFSRYDTMIDTHTADGVKVAREHLDAGVPMVVLETAQPIKFGETIREALDREAERPAAFDGLEALPQRFEVVNADAQQVKDFIAAHTGA

SEQ ID NO: 35065 - DNA, 1386 bp, Geobacter metallireducens GS-15
  CDS (1)..(1386): transl_table=11
atgaactatatcagtacccggggtgccatcgcccccatcggattcaaggacgcggtcatgatgggactcgccaccgacggcgggcttctgctgccggagaccatcccggcccttggccgcaacacgctcgaatcgtggcaaagcctctcctaccaggatctggcgttcaacgtgatatccctcttcgccgatgacattcccgcgcaggacctcaaggatctcatcgaccgctcctacgccaccttctcccatccggagattacaccggtggtggaaaaggacggtgtgtacatcctggaactcttccacgggccgacccttgccttcaaagacgtggcgctgcagctcctcggcaacctcttcgagtacctgctgaaggagcgcggggaaaagatgaacatcgtcggcgccacctcgggcgacaccggcagtgccgccatctacggcgtccggggaaaggacaagatcaacatcttcatcctccatccccacggcaagacctcgccggtgcaggccctgcagatgaccacggtgctcgatccgaacgtgcacaacatcgccgcgcgggggacctttgacgactgccagaacatcgtgaagagcctcttcagcgatctccccttcaaggaaaagtactccttgggcgccgtcaactccatcaactgggcccgggtcctggcccaggtggtctactacttctacgcctacttccgggttgccgcgctcttcggccaggaggtggtcttctcggttccgaccggcaatttcggcgatattttcgccggctacgtggcaaagcggatgggtctgccgatcagacggttgatcctggccaccaacgagaacaatatcctctcccggttcatcaacgggggtgactattccctcggagacgtggtggcgaccgtatccccgtccatggatatccagctggcctccaacttcgagcggtatgtctactacctcttcggcgagaaccccgcccgggtccgcgaggcgttcgccgccctccccacgaaggggcggatcgacttcaccgaggccgaaatggagaaggtgcgggatgagttcctctcccgctcggtgaacgaggatgagaccatcgcgaccatcgccgcctttcaccgggagaccggctacatcctcgacccccacacggcggtcggcgtcaaggcggccctggaactggtgcaggacggcactcccgccgtctgcctcgccacggctcacccggccaagttcgccgaggcggtggtccgtgccgtgggtttcgagccttcccgaccgacctccctggaaggaatcgaagcccttccgagccgatgcgacgtgctcgatgcggaccgcgacgccataaaggcattcatcgagaaaaaggccctgtag

SEQ ID NO: 35066 - protein, 461 aa, Geobacter metallireducens GS-15
MNYISTRGAIAPIGFKDAVMMGLATDGGLLLPETIPALGRNTLESWQSLSYQDLAFNVISLFADDIPAQDLKDLIDRSYATFSHPEITPVVEKDGVYILELFHGPTLAFKDVALQLLGNLFEYLLKERGEKMNIVGATSGDTGSAAIYGVRGKDKINIFILHPHGKTSPVQALQMTTVLDPNVHNIAARGTFDDCQNIVKSLFSDLPFKEKYSLGAVNSINWARVLAQVVYYFYAYFRVAALFGQEVVFSVPTGNFGDIFAGYVAKRMGLPIRRLILATNENNILSRFINGGDYSLGDVVATVSPSMDIQLASNFERYVYYLFGENPARVREAFAALPTKGRIDFTEAEMEKVRDEFLSRSVNEDETIATIAAFHRETGYILDPHTAVGVKAALELVQDGTPAVCLATAHPAKFAEAVVRAVGFEPSRPTSLEGIEALPSRCDVLDADRDAIKAFIEKKAL

SEQ ID NO: 35067 - DNA, 1413 bp, Rhodospirillum rubrum ATCC 11170
  CDS (1)..(1413): transl_table=11
gtgagatatgtaagcacacggggtcaggccccggtcctgtcctttgatgatgtcctgctggccgggctggccagtgacggggggctttatgtcccgcagacctggcccagtttctccgaagacgatatccgggacatgcgcgcgctgacctatcaggagttggcggtgcgggtgatgggccccttcatgggcgccgccgtcaccgatgacgaattgaccgaggtggtcgaacaggcctatgccggcttttcccatcccgccgtcgccccgctggtgcagatcggcgcccacgactgggtgatggagctgttccacggtccgaccctggccttcaaggattacgccctgcaggtcgtcggcggcctgttcgacctgatcctcacccggcgcggcagccgcatcaccgttgtcggcgcgaccagtggcgatacgggcagcgccgccatcgaggcctgccgcgaccgcgaggcggtcgatgtcatcatcttgctgcccaagggccgggtctcggaggtccagcgccgccagatgacgacggtgaccagctccaacgtccatgccatcgaggtcgaaggcaccttcgatgattgtcaggccctggtgaaggcgctgttcaacgaccccgccttccgctccgaggtcaatctggcggcggtcaattccatcaactgggcgcggatcatggcccagacggtttattacttctgggccgccctgcagcttggcgcgcccgaccgctcgcttggcttcagcgtgcccaccggcaatttcggcaatgtgctggcgggctattgcgccaagcgcatgggcctgccgatcgaccgtctggtggtcggctccaacagcaacgacatcctgacccgcttcctggaaaccggcaccatgcagtcgcgcggcgtggttcagacccacagcccgtcgatggacatccaggtgtcgagcaactttgagcgcctgctgttcgaggtggtcgaccgcgacagcgccgaggtcgagcggctgatggcccaattcgccctgaccggcggctatacccttgatagcgcccttcatcaggagcttcttgggctgttccgcggcttccgggttgataacgacgccaccttgcgcgccatcgccgaactttacgccgccaccggcatgatccttgatccccatagcgtcatcggcgtcatcgccgggcgcgaagccggccaccgcgacaccggcactccgatggtcgccctggccaccgcccatccggccaaattcgccgatgtggttgaacaagccaccggccagcgcccggccctgcccggcgcgctttccgaccttttgacccgacccgaacgccgggccgaggtcgccaacgaccccgaggcggtgaaagcgctggtgcgcagcctctcgcgggtccctggagcatccgcatga

SEQ ID NO: 35068 - protein, 470 aa, Rhodospirillum rubrum ATCC 11170
MRYVSTRGQAPVLSFDDVLLAGLASDGGLYVPQTWPSFSEDDIRDMRALTYQELAVRVMGPFMGAAVTDDELTEVVEQAYAGFSHPAVAPLVQIGAHDWVMELFHGPTLAFKDYALQVVGGLFDLILTRRGSRITVVGATSGDTGSAAIEACRDREAVDVIILLPKGRVSEVQRRQMTTVTSSNVHAIEVEGTFDDCQALVKALFNDPAFRSEVNLAAVNSINWARIMAQTVYYFWAALQLGAPDRSLGFSVPTGNFGNVLAGYCAKRMGLPIDRLVVGSNSNDILTRFLETGTMQSRGVVQTHSPSMDIQVSSNFERLLFEVVDRDSAEVERLMAQFALTGGYTLDSALHQELLGLFRGFRVDNDATLRAIAELYAATGMILDPHSVIGVIAGREAGHRDTGTPMVALATAHPAKFADVVEQATGQRPALPGALSDLLTRPERRAEVANDPEAVKALVRSLSRVPGASA

SEQ ID NO: 35069 - DNA, 1452 bp, Burkholderia thailandensis E264
  CDS (1)..(1452): transl_table=11
atgaattacatctccacgcgcggcgccggcatcggcgagcgccatacgttctccgacatcctgctcggcggcctcgcgaaggacggcgggctctatctgccgagcgagtatccgcaggtgagcgcggacgagctcgcgcgctggcgcacgctgccgtacgcggatctcgcgttcgagatcctgtcgaagttctgcgacgacatcgccgccgccgacctgcgcgcgatcacgcgccgcacgtacacggccgacgtgtaccgccacgcgcgccgcggcgggaacgcggccgacatcacgccgctcacgacgctcggcaccgagaacggcgcgcccgtctcgctgctcgagctgtcgaacggcccgacgctcgcgttcaaggacatggcgatgcagttgctcggcaatctgttcgagtacacgctcgccaagcacggcgaaacgctgaacatcctcggcgcgacgtcgggcgacacgggcagcgcggccgaatacgcgatgcgcggcaaagagggcgtgcgcgtgttcatgctgtcgccgcacaagaagatgagcgcgttccagaccgcgcagatgtacagcctgcaggacccgaacatcttcaacctcgcggtgaacggcgtgttcgacgactgccaggacatcgtgaaggccgtgtcgaacgatcacgcgttcaaggcgcagcagaagatcggcaccgtcaattcgatcaactgggcgcgcgtcgtcgcgcaggtcgtctactacttcaagggctacttcgcggcgacgcggtcgaatgacgagcgcgtgtcgttcacggtgccgtcgggcaatttcggcaacgtctgcgcgggccacatcgcgcgcatgatggggctgccgatcgagaagctcgtcgtcgcgacgaacgagaacgacgtgctcgacgagtttttccgcacgggcgcgtaccgcgtgcgcagcgcccaggacacgtatcacacgagcagcccgagcatggacatctcgaaggcgtcgaacttcgagcgcttcgtgttcgatctgctcggccgcgatccggcgcgtgtcgtccagctgtttcgcgatgtcgagcaaaagggcggcttcgatctcgcggcgagcggcgatttcgcgcgcgtcgccgagttcggcttcgtgtcgggccgcagcacgcacgcggaccggatcgcgacgatccgcgacgtgttcgagcgctaccgcacgatgatcgacacgcatacggccgacggcctgaaggtcgcgcgcgagcatctgcggccgggcgtgccgatggtcgtgctcgagaccgcgcagccgatcaagttcggcgaatcgattcgcgaggcgctcgggcaggagccgtcgcggcctgccgcgttcgacgggctcgaggcgctgccgcagcgcttcgaggtcgtcgacgcgaacgcgcagcaagtgaaggacttcatcgccgcgcatacgggcgcgtga

SEQ ID NO: 35070 - protein, 483 aa, Burkholderia thailandensis E264
MNYISTRGAGIGERHTFSDILLGGLAKDGGLYLPSEYPQVSADELARWRTLPYADLAFEILSKFCDDIAAADLRAITRRTYTADVYRHARRGGNAADITPLTTLGTENGAPVSLLELSNGPTLAFKDMAMQLLGNLFEYTLAKHGETLNILGATSGDTGSAAEYAMRGKEGVRVFMLSPHKKMSAFQTAQMYSLQDPNIFNLAVNGVFDDCQDIVKAVSNDHAFKAQQKIGTVNSINWARVVAQVVYYFKGYFAATRSNDERVSFTVPSGNFGNVCAGHIARMMGLPIEKLVVATNENDVLDEFFRTGAYRVRSAQDTYHTSSPSMDISKASNFERFVFDLLGRDPARVVQLFRDVEQKGGFDLAASGDFARVAEFGFVSGRSTHADRIATIRDVFERYRTMIDTHTADGLKVAREHLRPGVPMVVLETAQPIKFGESIREALGQEPSRPAAFDGLEALPQRFEVVDANAQQVKDFIAAHTGA

SEQ ID NO: 35071 - DNA, 1452 bp, Syntrophus aciditrophicus SB
  CDS (1)..(1452): transl_table=11
ttgaaggtggaattcagcgttccacgccgtcgggaaaagttgcaccgtatgggggaattcatgagagagagaatcctgtattacagcacgaattgttacctcgataatgttgaaggaatggagccgttcaaggatcgagtttccttccgggaagccctgcttctggggcaggctccggatgaaggactgttcatgcccgagagcattccccaactgtccctcgacgagatcctgaatctgaaaggcaggccctatacggcggccgctctgctggtggcggaggcttatctcggggcggatctgcctctggaaactctgaaggcggtgattgaatcttcctataattatgaagttcccctggaacgcgttgtggaccgtcggtatgttctccgactcgaccggggaccgacggcttccttcaaggatttcgcggcccggatgatggcccgcctgatgagtcattttcgcgatccgggaaagcgcctcaatgtcctggtggccacttcgggggatacaggcagtgccgtgggggaagcctttaagggcgttgccggaattgacgtctatatcctgtatccccgggaagaggtgagtggccggcagaaaaagcagttggacaccatcggcggcaatgtccggaccctgtccgtggaaggaaagttcgatgactgccaggatctcgtcaaacaggcctttgccgatcccgccctggcgggattgaatctgacctccgccaattccatcaatttcggccggattctaccccagatgatttattatgtttatgcctatgcccagcttgccgaaaggggggaagagatcgtcttttccgtgccgtctggaaacttcggagacgccctgggatgtgaatacgcacggcgcatgggcctgcccgtcgcccaactggtgatgcccaccaacgagaacgacgagtttccccgttttctgaaaaccggccgttacgaaaagatatcgccttctcttgcctgtctgtcgaatgccatgaacgtcggccatccgagcaatctggcccggttttttgacttatacggggggacagtggaccggacaggtcgtgtgcacaagatgccggatctggaagagatgaggaacaatatcttctccgtttctgtctccgatgaggaaacccggcggacgatccgaagggcttacgattcgtacggactgattctggaaccacatggagctgtgggctggcggggtcttgaactctatctggaacagaccgggaggaaagtgctctgtgtatccctggaaacggctcatccggcaaaattccccgaagaaatcgtttcgctgctgggcatcagtcccgagttgccggcaagcatgcgggatatcgactcgcgaaccggcgaacccctgccgatgacaggcgattacaatgtatttcgtaaatttttggaaaaaacgttaaaggccatggattga

SEQ ID NO: 35072 - protein, 483 aa, Syntrophus aciditrophicus SB
MKVEFSVPRRREKLHRMGEFMRERILYYSTNCYLDNVEGMEPFKDRVSFREALLLGQAPDEGLFMPESIPQLSLDEILNLKGRPYTAAALLVAEAYLGADLPLETLKAVIESSYNYEVPLERVVDRRYVLRLDRGPTASFKDFAARMMARLMSHFRDPGKRLNVLVATSGDTGSAVGEAFKGVAGIDVYILYPREEVSGRQKKQLDTIGGNVRTLSVEGKFDDCQDLVKQAFADPALAGLNLTSANSINFGRILPQMIYYVYAYAQLAERGEEIVFSVPSGNFGDALGCEYARRMGLPVAQLVMPTNENDEFPRFLKTGRYEKISPSLACLSNAMNVGHPSNLARFFDLYGGTVDRTGRVHKMPDLEEMRNNIFSVSVSDEETRRTIRRAYDSYGLILEPHGAVGWRGLELYLEQTGRKVLCVSLETAHPAKFPEEIVSLLGISPELPASMRDIDSRTGEPLPMTGDYNVFRKFLEKTLKAMD

SEQ ID NO: 35073 - DNA, 1422 bp, Novosphingobium aromaticivorans DSM 12444
  CDS (1)..(1422): transl_table=11
atgaagtacgtcagcacccgggggcaggcaccctcgctcgatttccagggcgtcacgctcgcaggcctcgcttcggatggcgggctctacgtgcccgagagctggccgcagttctcgcacgacgagatcgccgcgatggccgggctgccctatgccaggctggcgcagaagatcatgcagccctacgtcggcgattgcctgacgccggagcgcctgctggagctgtgcgaacaagcctatggccgtttcgcgcacgctgccgtgacgccgctcaagcagctcgacgagacgcagtgggtgctcgaactgttccatgggccgacgctggctttcaaggacgtcgcgctccagttgcttggcctgctgttcgaggaattccttgcgcgtccgagagaggatgggggcgacgagcacatcaccatcgtcggggcgacttcgggtgacaccgggtctgccgccatcgatgcggtggcgggtcgcgccaaggtcgatatcttcatgctccacccgcatggccgggtatccgatgtgcagcgccgccagatgaccacggtcatcgcgcccaacgtccacaacatcgccatcgacggcagcttcgacgatgcccaggcgatggtgaagcgcatgttcaacgacagcgcgatgaccggccgcttcggcatcgccgccgtcaactcgatcaactgggcgcgcctgatggcgcaggtggtctactacttctacgccgcgctccagcttggcgcgccgcaccgcaaggttgccttctcggtgccgaccggcaacttcggggatgtcttcgcaggctacgtcgcggcgaagatgggccttccgatcgagcggctgatcgtggccaccaacgtcaacgacatcctccaccgcgcgctttcggcaggcgattattcggccagcaccgtaacgccgaccgccgcgccatcgatggacatccaggtttcctcgaacttcgagcgcctgctgttcgacggctgcggtcgcgacgcatcggcgcttgccgcgcagatgaagcatttcgaagtgaccaaggcgatgcagctcacgaatgcgcagcgcgaatcggcggccgcgctgttcagctccgctcgcgccgatgcgggcgacatggccaatgccatgcgctgggcgttcgaggcgacgggcgaagtgctcgacccgcacaccgcgattggccttcacgcggcacgcgcggccgaaggcatccctgcgggcgttccgatcgtgacgctggcgacggcccatccggcaaagttcgtcgacgcggtcgagcgcgccaccggcgttcgcccgggcctgcccgcccgcgtgggcgacctgttcgagcgcgaagagcgctgcgaccgcctgcccggcaactacgaagcggttgccgcctacgtcgccgagcgcgcgactccgaagcatggctga

SEQ ID NO: 35074 - protein, 473 aa, Novosphingobium aromaticivorans DSM 12444
MKYVSTRGQAPSLDFQGVTLAGLASDGGLYVPESWPQFSHDEIAAMAGLPYARLAQKIMQPYVGDCLTPERLLELCEQAYGRFAHAAVTPLKQLDETQWVLELFHGPTLAFKDVALQLLGLLFEEFLARPREDGGDEHITIVGATSGDTGSAAIDAVAGRAKVDIFMLHPHGRVSDVQRRQMTTVIAPNVHNIAIDGSFDDAQAMVKRMFNDSAMTGRFGIAAVNSINWARLMAQVVYYFYAALQLGAPHRKVAFSVPTGNFGDVFAGYVAAKMGLPIERLIVATNVNDILHRALSAGDYSASTVTPTAAPSMDIQVSSNFERLLFDGCGRDASALAAQMKHFEVTKAMQLTNAQRESAAALFSSARADAGDMANAMRWAFEATGEVLDPHTAIGLHAARAAEGIPAGVPIVTLATAHPAKFVDAVERATGVRPGLPARVGDLFEREERCDRLPGNYEAVAAYVAERATPKHG

SEQ ID NO: 35075 - DNA, 1293 bp, Francisella tularensis subsp. holarctica
  CDS (1)..(1293): transl_table=11
atgaattttattagtactagagataaaaatattaaagtttcactaagtgaagcgatgcagtctggattagctcttgatggaggattatttgtcccagagagatttcctacagttaattggcagagttttgctaaagatatcagttacgcgaagtttgctgctaatactctaagagaattctttaaaggagatcagctagaagactctttagataaaatttgtaataatgcttttacttttgaggctcctgtaagaagattagataaaaccacatcagttttagagctttttcatggtccaactttatcttttaaagatttcggtgcgagatttttagcaaactgtttaagctctatcgatagtgagaagccatttactattttagtggcaacttctggagatacaggttcagcagtagctgcagcttttcatggtaagagcaatatccgtgttatagtgatgtttcctaaaggtaaaatctctaaaagacaagaaaagcagataacttgttggggagataatatccaagcagttgaagttgaagttgaaggagtttttgatgactgtcaaagtctagtcaaagaagcttttaagacaccttggtggacagagaggactaagttaaatacatcaaatagtattaatatcggtagattactatcacaatcaacttattatgcttatacatcgtggcaacattatttgcagaccggagagaaagcaaactatatagttccatctggcaatattggtaatataactgctgctttttgggcaaagcaaatgggctttccaataggtgaaatatcgatgagtttaaatgctaatgatactgttgttgactatctagagactggtaagtttaatcctaaggcaagtgttgaaacgctagcaaatgctatggatgttggtaaccctagtaattttgaaagattgttatacttgttgggtaattatgaaaatttcaaagctaatgttaaggctatatgtgtttctgactttgaaattatagaagaaataaaacaagtgtatcgtcaatatcatgaagttgtttgtccacacacagcaacaggttttgtagcaaaaaatcagttagatagcaataaagattatataatcgtagcaactgcacatcctgctaagtttgaaagtgtaattgagcctatattagatatacaagtgccgcctacaccggcgttacaaaagctactagacaaagagcaaaataaagtagttataaataagtctatggatgagctgtgcgaggtttatacaaaagcttttgaagcttag

SEQ ID NO: 35076 - protein, 430 aa, Francisella tularensis subsp. holarctica
MNFISTRDKNIKVSLSEAMQSGLALDGGLFVPERFPTVNWQSFAKDISYAKFAANTLREFFKGDQLEDSLDKICNNAFTFEAPVRRLDKTTSVLELFHGPTLSFKDFGARFLANCLSSIDSEKPFTILVATSGDTGSAVAAAFHGKSNIRVIVMFPKGKISKRQEKQITCWGDNIQAVEVEVEGVFDDCQSLVKEAFKTPWWTERTKLNTSNSINIGRLLSQSTYYAYTSWQHYLQTGEKANYIVPSGNIGNITAAFWAKQMGFPIGEISMSLNANDTVVDYLETGKFNPKASVETLANAMDVGNPSNFERLLYLLGNYENFKANVKAICVSDFEIIEEIKQVYRQYHEVVCPHTATGFVAKNQLDSNKDYIIVATAHPAKFESVIEPILDIQVPPTPALQKLLDKEQNKVVINKSMDELCEVYTKAFEA

SEQ ID NO: 35077 - DNA, 1485 bp, Desulfitobacterium hafniense Y51
  CDS (1)..(1485): transl_table=11
atgttgtacgaaagcacgagagggaatttccctgatcaaactggaaaagaagcgattgccttgggcatggttccggtaggggggttatttgttccgaaagaacttccgcaaattcactgggaggaagttcgcggcatttcctatccagaactggcccaattgatttttaaacgctatctacccgattttccggaggagaaatgtgttgagacttcaaaaatatacacggatggagttttcgattcggataatccggctcccctggtgaatgtgggagatatgggaatactggagctatggcatggtcctactgccgccttcaaagatatggccttgcaggctttgccccatcttttgggagaaagcatgcaggttctcactcacaccgacaaggtgctgattttggtcgctacgtcaggagatacgggaaaggccgccctggagggatttaaaaatgttgagggtacagagatcatggtcttttatcctgaacatggagtgagcactgttcaggagcagcaaatgaccacaactgatggggtcaacactaaagtagttcccgtcgtcggtaatttcgatcagtgtcagtccgctgtgaaagagatttttggcaatcctgacttaagagaaaaatttaaagaacagggcattgccttttcttcggcaaactctattaactggggaaggcttttgccgcaaatcatctattactattgggcttatttacaaggggtggaatcgcaacgaattcgtcccggagaaaaaatgaatgtggtggtacccacagggaacttcggcaacattcttgccgcttattatgccaaggaaatgggattgcctattcatcaactcatttgtgcctccaatgagaataatgtgctgacagatttcttcagccaaggagtgtataaccgcaagcgtccttttttcgtgacctcttctccttcgatggatattttaatatccagtaattttgagcgcttcctttacgaagtttccgggagggatgggtcaaaggtaggaaagtggtatgacgacctgcaggcccttggcgaatttactgtggattcggatactttagccaaggccaggaaagcagtcattgccggatgggccggtgaggcggatgtgctggcggtcatacaatccgtatataaagagcatgcctatgttctggatccccatacagccgtagcggtgaaagtatatcaagattatcttcgggaatcaggagacaacacctttaccatgatcgcctcaacagccagtccctttaaatttgccaaaaccgtcttagagggcattgatgcagatgccttagaagatgatgaatgggcgaatttgcggaagctgagggagattaccggctggagcatacccaaaggtctccaggggttagaggataaagagactttcggtttggagccggtacaacctgaggagattccggaactcatccagaaggtttatatacccaatagatag

SEQ ID NO: 35078 - protein, 494 aa, Desulfitobacterium hafniense Y51
MLYESTRGNFPDQTGKEAIALGMVPVGGLFVPKELPQIHWEEVRGISYPELAQLIFKRYLPDFPEEKCVETSKIYTDGVFDSDNPAPLVNVGDMGILELWHGPTAAFKDMALQALPHLLGESMQVLTHTDKVLILVATSGDTGKAALEGFKNVEGTEIMVFYPEHGVSTVQEQQMTTTDGVNTKVVPVVGNFDQCQSAVKEIFGNPDLREKFKEQGIAFSSANSINWGRLLPQIIYYYWAYLQGVESQRIRPGEKMNVVVPTGNFGNILAAYYAKEMGLPIHQLICASNENNVLTDFFSQGVYNRKRPFFVTSSPSMDILISSNFERFLYEVSGRDGSKVGKWYDDLQALGEFTVDSDTLAKARKAVIAGWAGEADVLAVIQSVYKEHAYVLDPHTAVAVKVYQDYLRESGDNTFTMIASTASPFKFAKTVLEGIDADALEDDEWANLRKLREITGWSIPKGLQGLEDKETFGLEPVQPEEIPELIQKVYIPNR

SEQ ID NO: 35079 - DNA, 1398 bp, Saccharophagus degradans 2-40
  CDS (1)..(1398): transl_table=11
gtgaaatatataagtacccgaggggatgccccagctctaagttttgaagacgttgtgttaaccggcttggctaacgatggcggtttatacttgcctgaaacgctacctaaatttagtgccgaagaaattgccagttggcgcggtttggattatcgcgagttggctttcaaaattatttccccgtttgttgatggcgaaataccggatgccgatttaaaaaagctaatcgaaagtgcttactctaagtttcgtcacgatgcgattgcaccactagtacaaactggccataacgaatttattttagagttgttccaagggccgacgttagcgtttaaagatttcgcgttgcagtttttagggcacttgtttgattacgtgcttaaaaagcgcaatcaaaaagttgtggttatgggggcaacctctggcgacaccggttcggctgctattgaagggtgtcgtgattgcgaaaatatcgacatctttattttgcacccaaacaagcgcgtgtccgatgtacagcgtcgtcagatgactacagtgcttaccgataatgtgcacaacattgcattagaaggtaattttgacgattgccaaaatatggttaaagcgagctttgccgatcaatcgtttttacctgatggccgccagcttgtagcggtaaactctattaactgggcgcgtattatggctcagattgtttactatttttacgccggtttggcgttgggctcgccagctcgccctgtgtccttctctgtgccaacgggtaacttcggtgatatttttgcaggctatttagctaagcaaatgggcttacctatcgatcagctgattattgcaactaacagtaatgatattttgcatcgctgtattagcaataacgaccacagcaaacagcctttggtacattcaatttcgccaagtatggatattatggtatccagcaacttcgaacgtatgctgtttgatttgtacgaccgcgacggtgcggcgattaaacaattgatggaagactttaagtctggtgaaatgtctttggctgaaggcccattaagtaaggcgcgagaattgttcagcagctatcgtttagacgataaagaaacagttgatgtcattcgcgaagtatttgaaaacactgaatacttgttagaccctcacactgcaattggtgtgcaggccgcgcgtaaacagcgcaagtctaaagatgtgcccatggtatgtcttgcaactgctcacccagctaagttccctgaagccgtgcgtcaagcgggccaagcggctgaccctgcgttgccattgcatatgcgtgatttatttgatcgtgaagagcgctacacagttttagagaacgatttagcaaaagtgcacgcgcatatggcggcaaatataaacgcttaa

SEQ ID NO: 35080 - protein, 465 aa, Saccharophagus degradans 2-40
MKYISTRGDAPALSFEDVVLTGLANDGGLYLPETLPKFSAEEIASWRGLDYRELAFKIISPFVDGEIPDADLKKLIESAYSKFRHDAIAPLVQTGHNEFILELFQGPTLAFKDFALQFLGHLFDYVLKKRNQKVVVMGATSGDTGSAAIEGCRDCENIDIFILHPNKRVSDVQRRQMTTVLTDNVHNIALEGNFDDCQNMVKASFADQSFLPDGRQLVAVNSINWARIMAQIVYYFYAGLALGSPARPVSFSVPTGNFGDIFAGYLAKQMGLPIDQLIIATNSNDILHRCISNNDHSKQPLVHSISPSMDIMVSSNFERMLFDLYDRDGAAIKQLMEDFKSGEMSLAEGPLSKARELFSSYRLDDKETVDVIREVFENTEYLLDPHTAIGVQAARKQRKSKDVPMVCLATAHPAKFPEAVRQAGQAADPALPLHMRDLFDREERYTVLENDLAKVHAHMAANINA

SEQ ID NO: 35081 - DNA, 1428 bp, Methylobacillus flagellatus KT
  CDS (1)..(1428): transl_table=11
atgagatatatttccacccgcgggcaatcgcccgcacagtcgtttactgaaatcctgcttggcggcctggcgcccgatggcggcctctatttgcccgagcaatatccgcaattcagccaggacgagctgaatgcgatgcgcggcatgcattaccgcgacctggcgttcaccatcctctcgcgcctgatcgatgatattcctgctgctgacctgcgcgccattatcgacaagacctatcgtgcggatgtctatgcctatgcgcgcgctggacagaatgccgaggacatcactcccacgctcaagctggaggacgacctctacctgctgtccttgtccaatggcccgaccctggcattcaaggacatggcgatgcagttgcttggcaacctgttcgaatatgtgctggcgcagaaaggcgagacgatcaatatcctcggcgcaacttccggagacaccggttctgctgcggaatacgccatgcgcggcaagcagggtgtcaaggtgttcatgctctcgccttaccagaagatgagccgtttccagactgcgcagatgttcagcctgcaggatgacaatattttcaatatcgcggtcaagggcgtgttcgacgattgccaggacatcgtcaaggccgtgtccaatgaccatgccttcaaggcaaagaacaagatcggcgcagtaaactccatcaactgggcgcgtgtggcggcccaggtggtgtattacttcaagggttactttgccgtcaccgcggacaatgcgcagcgggtcagcttcgccgtgccttccggcaacttcggcaacgtctgtgccgggcatatcgcccgcatgatgggcttgccgattgccaagctggtagtggcgaccaacgaaaacgatgtgctggacgaattcttcaagaccggtgtctatcgtccgcgcggttctgccaatacttaccacacctccagtccttccatggatatttccaaggcatccaatttcgagcgcttcgtcttcgatctggtgggccgtgatgcggccaaggtgcgtgagctgtggggcaaggtagatgcgggtggcagcgtcgacctcaatgaaggcggttggtttgccaaggtggcggattacggctttgtctccggcagcagcaaccacgccaaccgcatgcagaccatcagggtgacccatgagcgctatggcgtcaccatcgatacccataccgccgatggtctcaaggtggcgttggagcagcgcgaggcgggcattccgatgctggtacttgaaaccgcgttgccggccaaattcgaggatgcgattgtcgaggcgctgggccagaagcccgaacgcccgcacagcctggagggcttggaagccctgccgcagcgctttgaggtgatggaggccgatgtggccgctatcaagcagttcattgtcgagcatgtttga

SEQ ID NO: 35082 - protein, 475 aa, Methylobacillus flagellatus KT
MRYISTRGQSPAQSFTEILLGGLAPDGGLYLPEQYPQFSQDELNAMRGMHYRDLAFTILSRLIDDIPAADLRAIIDKTYRADVYAYARAGQNAEDITPTLKLEDDLYLLSLSNGPTLAFKDMAMQLLGNLFEYVLAQKGETINILGATSGDTGSAAEYAMRGKQGVKVFMLSPYQKMSRFQTAQMFSLQDDNIFNIAVKGVFDDCQDIVKAVSNDHAFKAKNKIGAVNSINWARVAAQVVYYFKGYFAVTADNAQRVSFAVPSGNFGNVCAGHIARMMGLPIAKLVVATNENDVLDEFFKTGVYRPRGSANTYHTSSPSMDISKASNFERFVFDLVGRDAAKVRELWGKVDAGGSVDLNEGGWFAKVADYGFVSGSSNHANRMQTIRVTHERYGVTIDTHTADGLKVALEQREAGIPMLVLETALPAKFEDAIVEALGQKPERPHSLEGLEALPQRFEVMEADVAAIKQFIVEHV

SEQ ID NO: 35083 - DNA, 1452 bp, Burkholderia xenovorans LB400
  CDS (1)..(1452): transl_table=11
atgaactacctctccacgcgcggcgccggagccggcgagcaccataccttttccgacatcctgctgggcggtctcgcgaaagacggcggcctgtacctgcccgccgaatatccgcgcatcaccggcgacgaactgacgcgctggcgcacgctgccgtacgcggacctggccttcgagatcctgtcccgattcagcgacgacattcccgccgaagacctgcgcgcgctcacacgcaaaacgtacaccgcggccacctactgcaacgtgcgcgacgacgaaagcgccgcgcagatcacgccgctgaagacgctcggcgtcgagaacggcgcgccgctgtcgctgctggaactctcgaacggaccgacgctcgcattcaaggacatggcgatgcagttgatcggcaacctgttcgaatacacgctggcaaagcacggtcaaacgctgaacattctcggcgcgacctcgggcgacaccggcagcgccgcggaatacgcgatgcgcggcaagaaaggcatcagcgtgttcatgctctcgccgcacaggaagatgagcgcgttccagaccgcgcagatgtacagcctgcaggatccgaacatcttcaacatcgcggtggaaggcgtgttcgacgacgcgcaggacatcgtcaaggccgtctcgaacgatcacgcattcaaggcgaagtacaggatcggcacggtcaactcgatcaactgggcgcgcgtcgtcgcgcaggtcgtgtattacttcaagggctactttgcggccacgaagtcgaacgacgagcgcgtgtcgttcacggtgccgtcgggcaacttcggcaacgtgtgcgcgggtcacatcgcgcgcatgatgggtttgccgatcgaaaagctggtcgtggcgacgaacgaaaacgacgtgctcgacgagtttttccgcaccggtatttaccgcgtgcgcaaggcggccgagacgtatcacaccagcagcccgagcatggacatttcgaaggcttcgaacttcgagcgtttcgtgttcgatctgctcggccgcgatccggcgcgcgtgctgcaactgttccgcgacgtcgaagagaagggcggtttcgacctcgccgcgagcggggactttgcgcgcgtgcagcaattcggtttcgtgtcgggccgcagcagccacgaatcgcgcgtggagaccatccgcgacgtgttcgagcgttacgacacgatgatcgacacgcacacggccgacggactgaaggtcgcgcgcgaatatctgcagccgggcattccgatgatcgtgctggagaccgcgcaaccgatcaaattcggcgagacgatccgcgaagcgctgctgcgcgaaccggagcggccggcggctttctcgggcctcgaatccctgccgcagcgcttcgaagtgctgcccgcggacgttcagcgcgtgaaggactttatcgcggcgaacgtggacgcgtaa

SEQ ID NO: 35084 - protein, 483 aa, Burkholderia xenovorans LB400
MNYLSTRGAGAGEHHTFSDILLGGLAKDGGLYLPAEYPRITGDELTRWRTLPYADLAFEILSRFSDDIPAEDLRALTRKTYTAATYCNVRDDESAAQITPLKTLGVENGAPLSLLELSNGPTLAFKDMAMQLIGNLFEYTLAKHGQTLNILGATSGDTGSAAEYAMRGKKGISVFMLSPHRKMSAFQTAQMYSLQDPNIFNIAVEGVFDDAQDIVKAVSNDHAFKAKYRIGTVNSINWARVVAQVVYYFKGYFAATKSNDERVSFTVPSGNFGNVCAGHIARMMGLPIEKLVVATNENDVLDEFFRTGIYRVRKAAETYHTSSPSMDISKASNFERFVFDLLGRDPARVLQLFRDVEEKGGFDLAASGDFARVQQFGFVSGRSSHESRVETIRDVFERYDTMIDTHTADGLKVAREYLQPGIPMIVLETAQPIKFGETIREALLREPERPAAFSGLESLPQRFEVLPADVQRVKDFIAANVDA

SEQ ID NO: 35085 - DNA, 1344 bp, Methanococcoides burtonii DSM 6242
  CDS (1)..(1344): transl_table=11
atgaaactctatagtaccaatctcaaagcagacgaagtatctttcgaaactgctcttattacaggtcttgctccggataaaggcctttatatgcccaaagatctccctcatttctcagaggaagagcttagttccctaaaagatgaaccatatcccgagatagcctttaggctgctcagcaggatccttgaaggtgagatcgatgaagcatcattgaaagagataacatatgatgcttacgattacgatgttcctctcgaggaagtggatgagaacacttatataatgagacttgaccgtggtcccactgcttcattcaaggactttgctgctcgcatgatggcaaggctgatgcagttctatctcaaaaaagagaacaagaacctgacaattctaacggctacttccggagataccggcagtgctgtagctcatgcattctacgatcttgacaacataaaggtgatcgttctattccctgagactgaagtatcagaacgtcagagaaagcagatgacgaccctggatggcaacatctctgccattgcaatggatgggaagttcgatgactgtcaggcattggtcaaacaggcttttgcagatcctgaccttaagcatctgaacctttcatcagcaaattctatcaacattggcagacttatcccccagtcgatctactatttctatgcttaccttaagcttagagagttcccggaagagatcatctattccattccttctggaaatttcggtaacatgatgggatgtgtgctcgcaaagagaatgggagtgccaatcaagaagatacttgcttctgtgaatgagaacgatgaggtgcctgtttttttcaacacaggtgagtactccaagatcgaaccttcaaaaaactgtatctcaaatgcaatgaatgtcggtcatccaagcaatcttgccagattggtgacaatatatggtggtgagatggatgagaccggccacataactaagatgcctgatatggatgttctcaataatgatatcttctctacatcagttaccgacgaagaaacaacggctattgtaaaggaattctatgaggattatggtattttcattgaaccccatggagcagtcggaataaagggacttctggattacagggcagcttctaatgacgatacactggctgtaacactcgagaccgctcacccggcaaagttccctaaagaagtgatgtctgcaataggtgtcgatcctgaaccaccccagacactcaaggatgtcgagtcaagagaggaatttatggaatctatgggagctgactatgagcagttcaagaattacctgaaggaaaagcttgactaa

SEQ ID NO: 35086 - protein, 447 aa, Methanococcoides burtonii DSM 6242
MKLYSTNLKADEVSFETALITGLAPDKGLYMPKDLPHFSEEELSSLKDEPYPEIAFRLLSRILEGEIDEASLKEITYDAYDYDVPLEEVDENTYIMRLDRGPTASFKDFAARMMARLMQFYLKKENKNLTILTATSGDTGSAVAHAFYDLDNIKVIVLFPETEVSERQRKQMTTLDGNISAIAMDGKFDDCQALVKQAFADPDLKHLNLSSANSINIGRLIPQSIYYFYAYLKLREFPEEIIYSIPSGNFGNMMGCVLAKRMGVPIKKILASVNENDEVPVFFNTGEYSKIEPSKNCISNAMNVGHPSNLARLVTIYGGEMDETGHITKMPDMDVLNNDIFSTSVTDEETTAIVKEFYEDYGIFIEPHGAVGIKGLLDYRAASNDDTLAVTLETAHPAKFPKEVMSAIGVDPEPPQTLKDVESREEFMESMGADYEQFKNYLKEKLD

SEQ ID NO: 35087 - DNA, 1446 bp, Ralstonia metallidurans CH34
  CDS (1)..(1446): transl_table=11
atgaattaccagtcgacgcgcggccatgacgtgccgcaatcgttctccgagatcctgctcggtggcctggcgcccgatggcggcttgtatctgcccaagcagtacccgcagatcacggccgaggaactcgaagcctggcgcaagctcccgtacgccgacctggcgttcgaggtgctgtcgcgcttctgtgacgacatccccgccgaggacctgcgcgcgctgacgcgcaagacctacacggctgacgtgtactgcaacgcgcgagccggcgacaacactgccgacattacgccgttgcgtacactgggcgaagagggcggcacgaagctgcaactgctgggcctgtccaacggcccgacgctggccttcaaggacatggcgatgcagttgctgggcaacctgttcgagtacgcgctcaagcgcgcgggtctgaagctgaacatccttggcgcgacttccggcgataccggtagcgcggccgagtacgcgatgcgcggcaaggaaggcattcgcgtgttcatgctgagcccgcaccgcaagatgagcgcgttccagaccgcccagatgttcagcctgcaggacccgaacatcttcaatatcgcgatcgaaggtgtgttcgacgacgctcaggacatcgtcaaggccgtctcgaacgatcatgcgttcaaggcgcgccagcgcattggcacggtcaactcgatcaactgggcccgcgtggtcgcccaggtggtctactacttcaagggctggctgctggcgaccagcggtccgggacagaaggtgtcgttctgcgtgccgtcgggcaacttcggcaacgtctgcgccggccacatcgcgcgcatgatgggcctgccgatcgacaagctcgtggtggccaccaacgagaacgacgtgctggacgagttcttccgcaccggcacgtatcgcgtgcggacctcggcccagacgtaccacacgtcgagcccgagcatggacatctcgaaggcatcgaacttcgagcgtttcgtgttcgatctgctgggccaggacgccgacaagctggtggcgctgttcagcgacgtcgacaccaagggtggcttcgatctggcgggcacgccggaattcgcgcgcatcggccagtttggctttgtttccggccgcagctcgcaccaggaccgtctggcgacgatccgcgacgtgaaccagcgctatggcgtgacgatcgacacccataccgccgatggcgtgaaggtggcgcgcgagtacctgcagccgggcgtgccgatggtggtgctggaaaccgcgctgccggccaagttcgccgacacaatccacgaggctttgggccatgagccggaacgtccggctgcgttcgacggtatcgagaagctgccgcaacgcttcgaggtgatgccggccgacgcggacagcgtgaaggcgtatatcgcccagcacaccggtttgtga

SEQ ID NO: 35088 - protein, 481 aa, Ralstonia metallidurans CH34
MNYQSTRGHDVPQSFSEILLGGLAPDGGLYLPKQYPQITAEELEAWRKLPYADLAFEVLSRFCDDIPAEDLRALTRKTYTADVYCNARAGDNTADITPLRTLGEEGGTKLQLLGLSNGPTLAFKDMAMQLLGNLFEYALKRAGLKLNILGATSGDTGSAAEYAMRGKEGIRVFMLSPHRKMSAFQTAQMFSLQDPNIFNIAIEGVFDDAQDIVKAVSNDHAFKARQRIGTVNSINWARVVAQVVYYFKGWLLATSGPGQKVSFCVPSGNFGNVCAGHIARMMGLPIDKLVVATNENDVLDEFFRTGTYRVRTSAQTYHTSSPSMDISKASNFERFVFDLLGQDADKLVALFSDVDTKGGFDLAGTPEFARIGQFGFVSGRSSHQDRLATIRDVNQRYGVTIDTHTADGVKVAREYLQPGVPMVVLETALPAKFADTIHEALGHEPERPAAFDGIEKLPQRFEVMPADADSVKAYIAQHTGL

SEQ ID NO: 35089 - DNA, 1392 bp, Silicibacter sp. TM1040
  CDS (1)..(1392): transl_table=11
atgaaatatatctccacccgcggccaagcgcccgaactcaccttcgaagaagccatgctgaccgggcttgcgcgcgacggcgggctttatgttccggcagaaatcccgacgctctcggcagaggaaatcgcaggctttgccgggctgccttatgaggaggtcgcgtttcgcgtgatgtggccctatgtgtcggggtctttctccgaagaggaattcaagggcatcatcgcgcgcgcctatgccgggtttgagcacgccgctcgcgcgccgctgaaacagatggcgccgaaccacttcctgttggagctctttcacggcccgacgttggcgttcaaggatttcgccatgcagctcatcggtcagctgtttcaggtcgcgctcaaacgccggggcgacagcgtgaccatcgtgggtgccacttctggcgacaccgggtccgcggcgatcgaggcgtttcgcggtctggacgcggtcaacgtctttatcatgtatccccatggccgcgtctccgaggtgcagcgccgccagatgaccacaccgcaggacgccaatgtgcatgccctcgcggtggatggagactttgacgactgccaggctgcggtcaaagacatgttcaacgattttgacttccgcgattcggtgcatctggcgggcgtgaactcgatcaactttgcccgcgttttggcgcaggtggtctattacttcaccgctgccgtggccttgggcgcaccgcaccgcaaagtgtccttcaccgtgccgaccggtaactttggcgacatctttgcgggctttatcgcgcgccagatggggctgccgatcgatcagctggtggtcgccaccaaccagaacgacatcctgcaccgctgcctctcgggcgagggctatttcaaaggcgagaccatcccgtcgatttcgccttctatggatattcaggtctcttcgaacttcgagcgggccttgttctatgcctacgatcaggacggcgcggctgtggcgcagctgatggacgaactgaagaccggtggtggttttaacgtgagccagggggccatgcaggcgttgagcgaaatctacagctcaggccgcgcttccgaggaggagacttccgccacgatcaaatccgaactcgcggcctcaggagagctgctttgcccacatggggcagttggggtgaaggtcgccaatgaacacctcaaggatggggtgccgatggtcacgctggccacggcgcatcccgcaaaattcccggccgcggtcgaggcggcctcggaggtgcatccgcctcttccccctcgcatggcagacctgtatgacagatcggagcgcgtgacccggatcgccaatgatctcggcgcgattgaagatcatatcagaaagcacatcgccaattga

SEQ ID NO: 35090 - protein, 463 aa, Silicibacter sp. TM1040
MKYISTRGQAPELTFEEAMLTGLARDGGLYVPAEIPTLSAEEIAGFAGLPYEEVAFRVMWPYVSGSFSEEEFKGIIARAYAGFEHAARAPLKQMAPNHFLLELFHGPTLAFKDFAMQLIGQLFQVALKRRGDSVTIVGATSGDTGSAAIEAFRGLDAVNVFIMYPHGRVSEVQRRQMTTPQDANVHALAVDGDFDDCQAAVKDMFNDFDFRDSVHLAGVNSINFARVLAQVVYYFTAAVALGAPHRKVSFTVPTGNFGDIFAGFIARQMGLPIDQLVVATNQNDILHRCLSGEGYFKGETIPSISPSMDIQVSSNFERALFYAYDQDGAAVAQLMDELKTGGGFNVSQGAMQALSEIYSSGRASEEETSATIKSELAASGELLCPHGAVGVKVANEHLKDGVPMVTLATAHPAKFPAAVEAASEVHPPLPPRMADLYDRSERVTRIANDLGAIEDHIRKHIAN

SEQ ID NO: 35091 - DNA, 1404 bp, Mesorhizobium sp. BNC1
  CDS (1)..(1404): transl_table=11
atggcaatggaatatgtgagtacccgcggcgaggcgccggtgctgggcttttcggacgtgcttctcgcggggcttgcgcgcgacggcggtctttatgttccccgcgaatggccgcgcttctcgccggaggaaatccgcgccctgcggggccgcccctatgaagaagccgccctcaccctgatccggccgttcatcggcggggaagttccagatcaggaactgaagcgcatcatcgacgagagttacgccaccttccgccacaaggcggtctgcccaatcgtccagaccgcgcccggcgagttcgtcctggagctctttcacggccctacccttgccttcaaggatgtggcgatgcagttcctcgcccgcattatggaccacgtgctcgccgagcgggggcagcgcgtgaccatcgtcggcgcgacctccggggacaccggcggtgcggccatccatgcatttgccggatcgaaacgggcggatgtcttcatcctcttcccgcacgggcgcgtgtcgccggtgcagcagcggcagatgaccacctccggcgcggcgaatgtgcaggcgcttgcgatcgaagggacgttcgacgattgccaggggatggtgaagagcctcttcaacgaccatgccttccgcgaccgaatgtcgctctccggcgtcaattctatcaactgggcgcgcatcctggcccaaatcgtctactacttcacctcggcgatttcgctcggcgcgcccgaccgctccgtctccttcacggtgcccaccggaaatttcggagacattttcgccgggtatgcggccaagcgcatgggccttccgatcgaccggctgatcatcgccacaaacgagaacgacattctcgcgcgcacgctcgacggcggggaatatgcgacacgccccgttatcgccacaacttcgccatcgatggacattcagatttcctcgaacttcgaacggctgctcttcgaggcatccggaaggaaggcggaagaaatccgtgcctatatggatggtctgaaacagtccggaagcttcaccctgggaaatgacacgctcgccaggatcagggacgagtttgccgccggccgtgtgagcatggaggaaaccgccgccacaatcgccggcacgcttcgcgagagcggatatctcgccgatccgcatacggcgaccgcgctcaaggtcgcgcgcgagcacgcgcggcctcacgaaaacatgatcgtgctttcgacggcgcatccggcgaagtttccgcaagccgtcgcagaggcctgcgggatttcgcccgccctgccccagtggctgggcggcttgatggagagcacggagacttacacggtccttccctcggacctgaaaatggtggaagatcacatcagccgccacgcaagggcggaaggatag

SEQ ID NO: 35092 - protein, 467 aa, Mesorhizobium sp. BNC1
MAMEYVSTRGEAPVLGFSDVLLAGLARDGGLYVPREWPRFSPEEIRALRGRPYEEAALTLIRPFIGGEVPDQELKRIIDESYATFRHKAVCPIVQTAPGEFVLELFHGPTLAFKDVAMQFLARIMDHVLAERGQRVTIVGATSGDTGGAAIHAFAGSKRADVFILFPHGRVSPVQQRQMTTSGAANVQALAIEGTFDDCQGMVKSLFNDHAFRDRMSLSGVNSINWARILAQIVYYFTSAISLGAPDRSVSFTVPTGNFGDIFAGYAAKRMGLPIDRLIIATNENDILARTLDGGEYATRPVIATTSPSMDIQISSNFERLLFEASGRKAEEIRAYMDGLKQSGSFTLGNDTLARIRDEFAAGRVSMEETAATIAGTLRESGYLADPHTATALKVAREHARPHENMIVLSTAHPAKFPQAVAEACGISPALPQWLGGLMESTETYTVLPSDLKMVEDHISRHARAEG

SEQ ID NO: 35093 - DNA, 1305 bp, Cytophaga hutchinsonii ATCC 33406
  CDS (1)..(1305): transl_table=11
atgaaactatacagtacaaatcatcaggtaccagaagtaaatttaaaagaagcagtattcaaaggtttaccggatgataacggtttatatatgccggagaatattccaacattgccggcttcattttttgaaaacattgataccctttcttttcaggatattgcctttgaagtatgcaaagcattgatcggtgatgaagttccggaaaaagaaatcagaagcattgttgatgatgtattaacgtttgacgcacctgttgttaaggttgaaaacaacatctatgtgcttgaattgtttcatggccctacgctggcattcaaagatttcggtgcccgtttcatggcccgtctgatgtcttactttttacaaaaagaaaagaaagacatcatgattttagtagcaacatccggagatactggcagcgccgttgcacagggttttctggacaaagcaggtattaaagttaccatcttatatccaagcaaaaaggtaagtgatctgcaggaaaagcagcttacaacacttggtaaaaacattacggcacttgaagtgctgggtacgtttgacgattgtcagcgtatggtaaaacaagcgttcttggataaagaaattacatctaagatcaacctgtcttctgcaaattcaatcaacatcagtcgtttgattccacagtcgttttattatttctatgcctacgcacaagcgaaaaagctaggaaagaaagttgttttctctgtgccaagcggaaacttcggaaatatatgcgcaggtttgattgccaagaaaatgggcttgccgattgatatgtttgtagcttctacaaatgcaaacgacattatgcctaaatacattaatacaggagtatttgaagcaaaaccttctgttgcaacaatcagcaatgccatggatgttggaaatccaagcaactacccgcgtgtgattgaattatacgggaaagatatcaatgcattgcgtaaagatgtagttggtaaagcatatacagatgaagagacagcagctgcggttaagtctgtatataaggctacaggatacgtgatggatccgcatggtgccgttggttacttaggcttaaaagaatactttgaagaaagcggaaaagatgctacaggtatattcttagctacagcacatccggctaagtttattgaagtcgtaaatgatatcattgaaaaagatgtagagattcctgcgcaactgaaagaactgatcaataagaaacaggaatctattgttattgaaaatgattttgaaaaactgaaatcgtttctgttgacggctctttaa

SEQ ID NO: 35094 - protein, 434 aa, Cytophaga hutchinsonii ATCC 33406
MKLYSTNHQVPEVNLKEAVFKGLPDDNGLYMPENIPTLPASFFENIDTLSFQDIAFEVCKALIGDEVPEKEIRSIVDDVLTFDAPVVKVENNIYVLELFHGPTLAFKDFGARFMARLMSYFLQKEKKDIMILVATSGDTGSAVAQGFLDKAGIKVTILYPSKKVSDLQEKQLTTLGKNITALEVLGTFDDCQRMVKQAFLDKEITSKINLSSANSINISRLIPQSFYYFYAYAQAKKLGKKVVFSVPSGNFGNICAGLIAKKMGLPIDMFVASTNANDIMPKYINTGVFEAKPSVATISNAMDVGNPSNYPRVIELYGKDINALRKDVVGKAYTDEETAAAVKSVYKATGYVMDPHGAVGYLGLKEYFEESGKDATGIFLATAHPAKFIEVVNDIIEKDVEIPAQLKELINKKQESIVIENDFEKLKSFLLTAL

SEQ ID NO: 35095 - DNA, 1278 bp, Haemophilus somnus 129PT
  CDS (1)..(1278): transl_table=11
atgaatttatataatattaaacatccggaacaacaagtaagtttttcacaagctgtgcgtcaaggtttaggaaaagatcagggcttattttttcctgaaaaattaccgcactttgacgacattgatagccttttatctttgcctttggttgaacgcagtcaaaagattttaactgctttaattggtgcggaattgtcacaagaaactattagtgcaatggtaaaaaatgcctttacatttccggcaccgatggtcaaagtagaagataatatctatgccttagaattattccacggtcccacgttagcttttaaagactttggaggacgttttatggcacaagccttagcagctgtgcgtggagacagtaaaattactattttaactgctacttcaggcgataccggtgctgcggttgcacatgctttctatggcttagaaaatattgaggtagtgattttatatccaaaaggtaaaataagtccgttacaagaaaaattattttgtacacttggcgggaatattcgaactgttgcgatcaacggtgattttgatgcttgtcaagcattggtgaaacaagcctttgatgatgaagaacttcgtcaagctgttggtttaaactctgcgaattcgattaatatcagtcgcttgttggcacaagtttgttattattttgaggcggttgcacagttaccgaaagaaattcgtcaagacattgttatttctgtgccgagcggtaatttcggtaacttaacagcgggattaattgccaaaaccttaggcttaccaatcaaacgctttattgcggcaactaatgccaatgataccgttcctcgctatttgaatagcggaaaatggcagcctcatacaacggttgcgactctttccaatgcaatggatgtgagccaaccgaataactggcctcgtgtagaagaattatttaaatgtaacggctggtctttaagtgaattgggttcaggtgcattgagtgatgaagaaacagaaaaaaccttgcaggcacaatatgccaaaggctatttatgcgaaccacatggggctattgcgtatcaggtgctaaaagatcaattacaggttaatgaaacgggtattttcctttgcacggcacatccagcaaaattcaaggaaaacgttgagcgtattttaagtctcgagcttgtgcttccggaaacattggataggtacaacaagttgccattgctttctgatgaaatggaaaatgacttcgctcaattacgtgcttatttattaaaaaaataa

SEQ ID NO: 35096 - protein, 425 aa, Haemophilus somnus 129PT
MNLYNIKHPEQQVSFSQAVRQGLGKDQGLFFPEKLPHFDDIDSLLSLPLVERSQKILTALIGAELSQETISAMVKNAFTFPAPMVKVEDNIYALELFHGPTLAFKDFGGRFMAQALAAVRGDSKITILTATSGDTGAAVAHAFYGLENIEVVILYPKGKISPLQEKLFCTLGGNIRTVAINGDFDACQALVKQAFDDEELRQAVGLNSANSINISRLLAQVCYYFEAVAQLPKEIRQDIVISVPSGNFGNLTAGLIAKTLGLPIKRFIAATNANDTVPRYLNSGKWQPHTTVATLSNAMDVSQPNNWPRVEELFKCNGWSLSELGSGALSDEETEKTLQAQYAKGYLCEPHGAIAYQVLKDQLQVNETGIFLCTAHPAKFKENVERILSLELVLPETLDRYNKLPLLSDEMENDFAQLRAYLLKK

SEQ ID NO: 35097 - DNA, 1284 bp, Shewanella sp. MR-7
  CDS (1)..(1284): transl_table=11
atggaactatataatttaaaacacccttcgcagaaagtgagctttaaggaagcggtgcaattaggactcggtaaagacagagggttgttttttcctactcaaatcccagtgttgcacgatattgaggcgctgctggcaatgccttttgtcgagcgcagtaaaaaagtgctcggcgcttggctcgcctcagagcttgggcaaggcgcggtagataagctagtcgagcgtgcctttaatttcgatttgcccttggtggcggtcgatgagcagcgctcgtgcctcgagctttttcatgggccaactttagcattcaaggattttggtgcgcgctttatggcgcaatgcatcaatgcctttgctcaagactcgcgcttaaccattctaaccgcgacctcgggtgacactggggcggcggtggccgatgccttttacggcctagataaagtcaatgtcgtcgtgctctatcctaagggcaaaatcagtgagctacaggaaaagatgttcaccaccttaggtaagaacatccacactgtggcagtagcgtccgatttcgatgcttgccagcacttagtcaaacaggcttttgaagatagcgatgtgcgtgatggcttgcatttaaactcggccaactcaatcaacatcagtcgtttactggcacagatttgttattacttcgaagcggtcgcccaatcgaaacagcgccatgaggccgatcctgtgattgccgtgcccagtggaaactttggaaacttgaccgcgggattatttgccaaagccatgggcttacctgttaaacgttttattgccgccaccaacgccaatgacactgtcccacgttatttagagagtggtgattggcaacccaatcccactcaagcgactatgtccaatgcgatggatgtgagcgagccaagtaactggccgcgcgtcgaggccatttgcgagaaactcggttggccactttcggacttagtgggtattcgcctgtctgaggctcaaacctcggaggccttggcggaattacaaactaagggctatgtgtctgagccccatgcggcgattgcggctaaggcgttatcgctcaacttagtgcctgatgaagtggggatatttttaggcacggcgcatcccgccaagtttaaggatgtcgtagatagagagcttaacctcgatttacctttgcctgcagaacttaaggcggtggagcataaacctatactctcggctgaattagccgccgattttgcccagctaaagtcacatttatttgcggtgttaagctga

SEQ ID NO: 35098 - protein, 427 aa, Shewanella sp. MR-7
MELYNLKHPSQKVSFKEAVQLGLGKDRGLFFPTQIPVLHDIEALLAMPFVERSKKVLGAWLASELGQGAVDKLVERAFNFDLPLVAVDEQRSCLELFHGPTLAFKDFGARFMAQCINAFAQDSRLTILTATSGDTGAAVADAFYGLDKVNVVVLYPKGKISELQEKMFTTLGKNIHTVAVASDFDACQHLVKQAFEDSDVRDGLHLNSANSINISRLLAQICYYFEAVAQSKQRHEADPVIAVPSGNFGNLTAGLFAKAMGLPVKRFIAATNANDTVPRYLESGDWQPNPTQATMSNAMDVSEPSNWPRVEAICEKLGWPLSDLVGIRLSEAQTSEALAELQTKGYVSEPHAAIAAKALSLNLVPDEVGIFLGTAHPAKFKDVVDRELNLDLPLPAELKAVEHKPILSAELAADFAQLKSHLFAVLS

SEQ ID NO: 35099 - DNA, 1383 bp, Hyphomonas neptunium ATCC 15444
  CDS (1)..(1383): transl_table=11
gtgaagtatatttcgaccagaggtcaggcggaacctgttgattttgcaggcgcttgcctggcgggccttgccacggacggcggcctctacgtgcccgagagctggccgcagattgcccccgccacgccgggtgaaccctacgccgagaccgccgcgcgcatcctctccgcctttgccggcgacgcgattcccaccgacgtgatgcgccgcctctgcacgcaggcctatgaccgctttgcccaccgctcggttgccccgctgacgcaggccgggccgggtctctggctgatggagctgcaccacgggccaacgctcgccttcaaggatgtggcgatgcagatcatcggccagatctatgactatctcctcggcctttccggccagcggatgaccgtaacctgcgccacgtccggcgataccggcggggccgccgccggcgcgtttgcgggcgcggagaatgtgcgcctcgtgatcctgcatccgcatgagcgggtctcgccggtccagcgcctgttcatgaccaccaccggggctgagaacgtcctcaatatctcggtcgatggggattttgacgactgccagtcgatggtcaaatcgatgttcgcggacaaggcattctcagccagtgttggcctctcaggtgtcaactcgatcaactgggcgcgcattgctgcccagtccgtctactacgccaccgccagcgcccagctgggccaccgcccgctgcgctttgtggtgcccagcggcaatatgggcgacgcgctggcaggctatgttgccgcccgctgcggcctccttccgggtggcctcgaaatccactgcgcggtgaacgagaacgacacgctggcccgcgtgttcaacaccggcaagatgacccgccaggcggctgtggccacgcccagcccggcgatggacatctccgtgccgtctaatttcgagcgcctgctgtttgaagtgaccggccgggacgccgacgcggtgcgccgcacttacgagacctatgcccagcagggcgaggtggacattcccgaggcggccagggcgcgcctctcctgcacggggctgtcggcggcgtcggtgggcaatgccgataccctcgccgagatggagcgtttccggcaggagaccggctggctgatctgtccgcacacggcggtgggcacgcagattgcgcgccgcctgaagccgtctgacgctgtcgccacaatcgttctggccacggcagctgccacgaaattccctgagacggtcaaggaagcgaccggggaggatgcgccgctgcccagccgctgcgccgagctggttgatcgcggggaggtgttcgagcggtttgcttccgatccggcagccgtccgcgcccgaatcgccgccttcgctggctag

SEQ ID NO: 35100 - protein, 460 aa, Hyphomonas neptunium ATCC 15444
MKYISTRGQAEPVDFAGACLAGLATDGGLYVPESWPQIAPATPGEPYAETAARILSAFAGDAIPTDVMRRLCTQAYDRFAHRSVAPLTQAGPGLWLMELHHGPTLAFKDVAMQIIGQIYDYLLGLSGQRMTVTCATSGDTGGAAAGAFAGAENVRLVILHPHERVSPVQRLFMTTTGAENVLNISVDGDFDDCQSMVKSMFADKAFSASVGLSGVNSINWARIAAQSVYYATASAQLGHRPLRFVVPSGNMGDALAGYVAARCGLLPGGLEIHCAVNENDTLARVFNTGKMTRQAAVATPSPAMDISVPSNFERLLFEVTGRDADAVRRTYETYAQQGEVDIPEAARARLSCTGLSAASVGNADTLAEMERFRQETGWLICPHTAVGTQIARRLKPSDAVATIVLATAAATKFPETVKEATGEDAPLPSRCAELVDRGEVFERFASDPAAVRARIAAFAG

SEQ ID NO: 35101 - DNA, 1425 bp, Rhizobium leguminosarum bv. viciae 3841
  CDS (1)..(1425): transl_table=11
atgatgaacgtggattatatctcgactcgcggcgaggccccttccctcggcttttgcgacgcccttttgaccgggctggcgcgcgatggcgggctctatgttccgcgcaaatggccgagcttttccaaaaaggagatccgtgcgctcaggggcaagacctatcaggagatcgccttcaccatcctgtcgcccttcaccaatggcgagatccccgacgacacgttccgggcgatgatcgacgaggcctacggcactttccgccatccggcgatcgcgccgctcgtccagaccgggccgaacagcttcgtcatggagctcttccacggcaccacgctcgccttcaaggacgtggcgatgcaattgctcgcccggctgatggactatgcgctggaaaagcgcggcgagcgggcgacgatcgtcggcgccacctcgggcgacaccggcggggcagcgatcgacgccttcgcgggccgcgagcgcaccgatatcttcatcctcttcccgcatggcaaggtctcgccggtgcagcagcggcagatgacgacctcgtcgtcagcaaacgtgcatgcgcttgccgtcgagggtaatttcgacgattgccagaacctcgtgaaagcgatgttcaacgacgtgaccttccgcgacaaggtccggctatccggcgtcaactcgatcaactgggcccgcatcatggctcagatcgtctattatttcacggcggcggtggcgcttggcggtccggaccggaagatctcgttcacggtgcccacaggcaatttcggcgatatcttcgccggctactgcgccaagcgcatgggcctgccgatcgaccgtctggtgatcgccaccaacgagaacgacatcctggcgcggacgctgaagaccggccgctacgacatgaaggcggtcaaggcgacgagttcgccgtcgatggacatccagatctcctcgaacttcgaacggctgctgttcgaagcctatgaccgcgacgcctcgaaagtgcgcgcggcgatggaaagcctcaagcaatccaacggcttcgagatcggcagccaagcgctgaaggcgatccgccgcgacttccgcgccgggcgcgccagcgagaagcaggtcgccgagacgatccgcaagacccatgccgaaaccggttatctgctggatccgcattcggcgatcggcgtcttcgtcgctgccaagaaagaaaagccgaatacgccgatggtgacgctttcgaccgcgcatccggcgaaattccccgccgccgtaaaatccgcctgcggtattgacccggcgcttccgacgtggcttgctgatctgatgcacagggaggagcgtttccagatcatcaaaccggagctgaaagccgttgagacttttatcggcaagcatgcccgcggcgagacgacagcaggcgcagaaagatag

SEQ ID NO: 35102 - protein, 474 aa, Rhizobium leguminosarum bv. viciae 3841
MMNVDYISTRGEAPSLGFCDALLTGLARDGGLYVPRKWPSFSKKEIRALRGKTYQEIAFTILSPFTNGEIPDDTFRAMIDEAYGTFRHPAIAPLVQTGPNSFVMELFHGTTLAFKDVAMQLLARLMDYALEKRGERATIVGATSGDTGGAAIDAFAGRERTDIFILFPHGKVSPVQQRQMTTSSSANVHALAVEGNFDDCQNLVKAMFNDVTFRDKVRLSGVNSINWARIMAQIVYYFTAAVALGGPDRKISFTVPTGNFGDIFAGYCAKRMGLPIDRLVIATNENDILARTLKTGRYDMKAVKATSSPSMDIQISSNFERLLFEAYDRDASKVRAAMESLKQSNGFEIGSQALKAIRRDFRAGRASEKQVAETIRKTHAETGYLLDPHSAIGVFVAAKKEKPNTPMVTLSTAHPAKFPAAVKSACGIDPALPTWLADLMHREERFQIIKPELKAVETFIGKHARGETTAGAER

SEQ ID NO: 35103 - DNA, 1410 bp, Pseudomonas aeruginosa UCBPP-PA14
  CDS (1)..(1410): transl_table=11
atgcgttacatcagcacccgcggccaagcgcccgccctgaacttcgaagatgtcctcctcgccggcctggccagcgacggcggcctctacgtcccggaaaacctgccacgcttcaccctcgaggagatcgcctcctgggtcggcctgccctaccacgagctggccttccgggtgatgcgcccgttcgtcgccggcagcatcgccgatgccgacttcaagaagatcctcgaggaaacctatggcgtcttcgcccatgacgcagtggcgccgctgcgccagttgaacggcaacgaatgggtgctggagctgttccacggcccgaccctggccttcaaggacttcgccctgcaactgctcggccgcctgctcgaccatgtgctggccaagcgcggcgagcgcgtggtgatcatgggggccacctccggcgataccggctccgcggccatcgaaggctgccgccgttgcgacaacgtcgacatcttcatcatgcacccgcacaaccgcgtgtccgaggtgcagcgccggcagatgaccaccatcctcggcgacaacatccacaacatcgccatcgaaggcaacttcgatgactgccaggagatggtcaaggccagcttcgccgaccagggcttcctcaagggtacccgcctggtagcggtgaactcgatcaactgggcgcggatcatggcccagatcgtctactacttccatgccgcgctgcagctcggcgcgccgcatcgctcggtggcgttctcggtgccgaccggcaacttcggcgacatcttcgccggctacctggcgcgcaacatgggcctgccggtcagccagctgatcgtcgcgaccaaccgcaacgacatcctgcaccgcttcatgagcggcaaccgctacgacaaggacaccctgcatccctcgctgtcgccgtcgatggatatcatggtctcgtccaacttcgaacgcctgctgttcgacctgcacggccgcaacggcaaggccgtcgccgaactgctggatgccttcaaggccagcggcaagctgtcggtggaagaccagcgctggaccgaggcgcgcaagctgttcgactccctggcggtcagcgacgagcagacctgcgagaccatcgccgaggtataccgctcctgtggcgagttgctcgacccgcacaccgccattggcgtgcgtgccgcacgcgaatgccggcgcagcctgagcgtgccgatggtgaccctgggcactgcgcatccggtcaagttccccgaagcggtggagaaggccggcatcggccaggcgccggcgctgcctgcgcacctcgccgacctgttcgagcgcgaggagcgctgcaccgtattgccgaacgagctggccaaggtacaggctttcgtcagccagcacggcaatcgcggcaagccgctctga

SEQ ID NO: 35104 - protein, 469 aa, Pseudomonas aeruginosa UCBPP-PA14
MRYISTRGQAPALNFEDVLLAGLASDGGLYVPENLPRFTLEEIASWVGLPYHELAFRVMRPFVAGSIADADFKKILEETYGVFAHDAVAPLRQLNGNEWVLELFHGPTLAFKDFALQLLGRLLDHVLAKRGERVVIMGATSGDTGSAAIEGCRRCDNVDIFIMHPHNRVSEVQRRQMTTILGDNIHNIAIEGNFDDCQEMVKASFADQGFLKGTRLVAVNSINWARIMAQIVYYFHAALQLGAPHRSVAFSVPTGNFGDIFAGYLARNMGLPVSQLIVATNRNDILHRFMSGNRYDKDTLHPSLSPSMDIMVSSNFERLLFDLHGRNGKAVAELLDAFKASGKLSVEDQRWTEARKLFDSLAVSDEQTCETIAEVYRSCGELLDPHTAIGVRAARECRRSLSVPMVTLGTAHPVKFPEAVEKAGIGQAPALPAHLADLFEREERCTVLPNELAKVQAFVSQHGNRGKPL

SEQ ID NO: 35105 - DNA, 1464 bp, Oenococcus oeni PSU-1
  CDS (1)..(1464): transl_table=11
atgaaatttcaaagtacacgcggacaagcagcgattgttgatggggctgacgcccttatcaacggattggcaccggacggcggactttatgtaccgcttgtttttccaacaattgattttgattgggaaaaattgcaggatgagaattatcttcagattggtcaattaattctttcgactttttttgacgaattttcaaataacgaaataactgattttttgaaatcggcttatcgggattttgatgattcaaaaattgttgaaatccatcagcttgatgacaaacgaaatttattggaattgtttcatggaccgactttggcttttaaagatatggcgctctcccttctaccttatttattgactgcggctgtcaaaaaaaacggcagttcaaagacaatggttattttaacggcaacttccggtgataccggtggtgcggctttaaagggtttcaatgatgtcccgcagacaaaaattgttgtttattatccgtcggttggtgtttccaaattacaacgtcaacagatgacgacagctgacggaaaaaatactcacgtggttgctgttactggcaattttgacgatgctcaaaaagcggttaaaaatcttttgacggatcatcggttggctcaaaaaatgtcagcagcttcgcttggtttttcctctgcgaattctattaacatcggtcgtttggtacctcaaatcatttactatgtgtatgcttatgctcaattagttaagaataatcgcctatcggctggtgagaaattggatataagcgttccgactggtaattttggtgatatcctggctgcttactgggccaaaaaacttggtgtcccaattggaaaattgaccgttgcttctaatgccaatcatgttctgaccgacttttttgcaaccggaatttacgatgccgatcgctcctttcaagttaccagcagtccggcaatggatattcttgtttccagtaatttggaacggctcttatttgacattgccggccccaaagcggtcgccgcttggatgaaagacttgaccgacaagcgtcgatatcaactcgatgatttttctttgagcagacttcaggattcttttaatgcggcgtttgccgattccaaaacaaccgctcaaacaattcaggaaacatttcagcagaataattatttgttggaccctcatacagcggttgctgtttctgttaacaaagattttccaagcaataggcaacaactgattgttgcaacagccagtccctttaagtttgccgaaactgttttaaaagcgctcggaaaagaatccgacaatgatccacaaatgaatttgaatctcatatctgatttgagtggccaaagagttcctttggcgattagcggacttttcgataaaaaaattattcatacaaaaaaattggcaatcaaagatttgctaaccgatttgaatgaagctctcggaatttga

SEQ ID NO: 35106 - protein, 487 aa, Oenococcus oeni PSU-1
MKFQSTRGQAAIVDGADALINGLAPDGGLYVPLVFPTIDFDWEKLQDENYLQIGQLILSTFFDEFSNNEITDFLKSAYRDFDDSKIVEIHQLDDKRNLLELFHGPTLAFKDMALSLLPYLLTAAVKKNGSSKTMVILTATSGDTGGAALKGFNDVPQTKIVVYYPSVGVSKLQRQQMTTADGKNTHVVAVTGNFDDAQKAVKNLLTDHRLAQKMSAASLGFSSANSINIGRLVPQIIYYVYAYAQLVKNNRLSAGEKLDISVPTGNFGDILAAYWAKKLGVPIGKLTVASNANHVLTDFFATGIYDADRSFQVTSSPAMDILVSSNLERLLFDIAGPKAVAAWMKDLTDKRRYQLDDFSLSRLQDSFNAAFADSKTTAQTIQETFQQNNYLLDPHTAVAVSVNKDFPSNRQQLIVATASPFKFAETVLKALGKESDNDPQMNLNLISDLSGQRVPLAISGLFDKKIIHTKKLAIKDLLTDLNEALGI

SEQ ID NO: 35107 - DNA, 1458 bp, Leuconostoc mesenteroides subsp. mesenteroides ATCC 8293
  CDS (1)..(1458): transl_table=11
atgaattatgtatcaacacgtggacaggcgcctgcagttacatctagccaagcaataataaacggtattgcgccagatggcggtctttacgttccagaaaaatggccaaaattaaaattagattggaaaaatctaagccagcaaagctatcaagaaattgccacgcaagtatttgatgccttttttgatgattttacagttcaggaaattgaccatattatttcaaaatcatatggcaatcaatgggatgctgagagcattgtgaccttgcacaatgaaaacaagttgcactatattgaattgtttcatggaccaaccttagcattcaaagatgttgcactacaggcactaccacatctattaacgacagctgctaaaaagcagtcactaaatgataaaattgttattttaacagctacatctggcgatacaggaactgctgctatgagcggctttgcaaatgttgaaaatactgaaatagttgttttttacccagaagttggtgttagtgatattcagcgtcaacagatgcaaactgaagagggacacaatgctcatgttacagcaataactggtaattttgatgatgcccaaaaagctgtaaaatctattttgagcgatgagaaattaattcaggaattatcagaaaagggtatgcgtttttcatcagctaattcaattaatattggtcgattagtaccacaaattgtgtattacatttatgcttacgcccaattagtaaaaaatgatgtggtggtaccaggagaagaaatcaatattgatgtgccaaccggaaactttggtaatgtgcttgcttcatattatgccagtcagttaggattaccagttcatcagtttacagttgcttcggatgaaaataatgtattaactgattttttcaacactggtatctatgatcgtcaacgtgattttaaagtcacaaattcaccggcaatggatatcttagtatcaagcaacttggaacggttgttgtattttgctagtggtcgtaatgatgaagaagttcgccagtatatgaagtcattagctgaaaatggtcaatataccttgactgataaaacgcgtaattatttgcaaaaattcacagctaaatttgcgacacaatctcaagtggttgatacgattaaagatgtctttgaaaatagcggttacttaattgatccgcatacggctgttggtcgctttgcttacgaagaagaaacacagcaaacgttacttgcagcaacagcaagtgcttataagtttccacaaacagttttggcagcattgcaggaaaaaaacgaagggggcgtagtggatttgcaaaagctagctgaacgaacaaatacagttattccagcacaagtagcaacgttatttgataaaactattgtgcacactaaaatcatcgagcctgcgatgattatgcaatctattaaagacgaactatctatctga

SEQ ID NO: 35108 - protein, 485 aa, Leuconostoc mesenteroides subsp. mesenteroides ATCC 8293
MNYVSTRGQAPAVTSSQAIINGIAPDGGLYVPEKWPKLKLDWKNLSQQSYQEIATQVFDAFFDDFTVQEIDHIISKSYGNQWDAESIVTLHNENKLHYIELFHGPTLAFKDVALQALPHLLTTAAKKQSLNDKIVILTATSGDTGTAAMSGFANVENTEIVVFYPEVGVSDIQRQQMQTEEGHNAHVTAITGNFDDAQKAVKSILSDEKLIQELSEKGMRFSSANSINIGRLVPQIVYYIYAYAQLVKNDVVVPGEEINIDVPTGNFGNVLASYYASQLGLPVHQFTVASDENNVLTDFFNTGIYDRQRDFKVTNSPAMDILVSSNLERLLYFASGRNDEEVRQYMKSLAENGQYTLTDKTRNYLQKFTAKFATQSQVVDTIKDVFENSGYLIDPHTAVGRFAYEEETQQTLLAATASAYKFPQTVLAALQEKNEGGVVDLQKLAERTNTVIPAQVATLFDKTIVHTKIIEPAMIMQSIKDELSI

SEQ ID NO: 35109 - DNA, 1380 bp, Magnetococcus sp. MC-1
  CDS (1)..(1380): transl_table=11
gtgcgttatatcagtacccggggcggtgtggcccctctctcgttttctgaagcggtgatgatgggtttggccacggatgggggtctgttggtgccggagcggctgccccaggtggatggcgcaaccctgcggcggtgggccaagctctcctaccaagagttggccctagaggtgatgcgcccctttgtggaggaggatattcccgaggccgatctccgccccttggtgatcaacgcttacgccaagtttgagcatgatgagattacccccctggtcaaggtgggggatgtgcagatattggagctgtttcacggccctaccttggcgtttaaggatgtggcgttacagtttttgggcaatctgtttgagtatctgttggaaaagcaggggggacgcctgaacattattggcgcaacctcgggggataccggttcggcggcgatccatggggtacggggtaagagtggcattgacatctttattctgcatccccaccaacgggtatcgccggtgcaggagcggcagatgaccacggtgttggacgacaatgtacacaacatcgccatagagggtaattttgatgatggtcaggccatcgttaaagcgctgtttaatgatcttgcgtttaaggaaaagtaccatttaggggcggttaactccattaactgggcgcgaattttggcgcagattgtctactatttccggggttgggcgcgagccacgggtgggaatccagagcagaaggtcagtttttcggtgccaacgggtaattttggtgacatctacgccggttatctggcgcgacagatgggcttgccggtggatcgattgattttggccaccaaccgcaacgatattttaagccgctttgtgttgcacggcagctacagcaagggtgtggtggagcccaccatcagcccctccatggatattcagatctcttcgaactttgagcgctatctgtttgatctgctggagcgtgatggggatggggtaaaggggtgcatggcggagctggccgagcagggtggattttcggtttctgcggaaaagctggcgcaggtgcgcaccatttttgacgctgtcgcggtgagcgaggcgcaaacattagagaccattacccgcgtgcatcgggagagtggttatgtgttggacccccacactgcggttggggtggcagcggcggccggtaggcagggtgtgatctgtctggccacggcgcatccggccaagtttgccgatgccgtacggcaggctacgggtgaggcggtggctttaccaccctctatgcaggatttaatgaccctaccgacccgttgtgaggttttacccgccaccgccgcagcgatcaaagccaaggttgaacagaccctcgcctag

SEQ ID NO: 35110 - protein, 459 aa, Magnetococcus sp. MC-1
MRYISTRGGVAPLSFSEAVMMGLATDGGLLVPERLPQVDGATLRRWAKLSYQELALEVMRPFVEEDIPEADLRPLVINAYAKFEHDEITPLVKVGDVQILELFHGPTLAFKDVALQFLGNLFEYLLEKQGGRLNIIGATSGDTGSAAIHGVRGKSGIDIFILHPHQRVSPVQERQMTTVLDDNVHNIAIEGNFDDGQAIVKALFNDLAFKEKYHLGAVNSINWARILAQIVYYFRGWARATGGNPEQKVSFSVPTGNFGDIYAGYLARQMGLPVDRLILATNRNDILSRFVLHGSYSKGVVEPTISPSMDIQISSNFERYLFDLLERDGDGVKGCMAELAEQGGFSVSAEKLAQVRTIFDAVAVSEAQTLETITRVHRESGYVLDPHTAVGVAAAAGRQGVICLATAHPAKFADAVRQATGEAVALPPSMQDLMTLPTRCEVLPATAAAIKAKVEQTLA

SEQ ID NO: 35111 - DNA, 1284 bp, Shewanella sp. ANA-3
  CDS (1)..(1284): transl_table=11
atggaactatataatttaaaacacccttcgcagaaagtgagctttaaggaagcggtgcaattaggactcggtaaagacagagggctgttttttcctactcaaatccctgtgttgcacgatatcgaggcgctgctggcgatgccttttgtcgagcgcagtaaaaaagtactcggcgcttggcttgcctcagagcttgggcaagacgcggtagataaactggtcgagcgtgcctttaatttcgatttgcccttggtggcggtcgatgagcagcgctcgtgcctcgagcttttccatgggccaactttagcattcaaggattttggtgcgcgctttatggcgcaatgcatcaatgcctttgctcaagactcgcgcttaaccattctaaccgcgacctcgggtgacactggggcggcggtggccgatgccttttacggcctagataaagtcaatgtcgtcgtgctctatcctaagggcaaaatcagtgagctacaggaaaagatgttcaccaccttaggtaagaacattcacactgtggcagtagcgtccgatttcgatgcttgccagcacttagtcaaacaggcttttgaagatagcgatgtgcgtgatggcttgcatttaaactcggccaactcaatcaatatcagtcgtttgctggcacagatttgttattacttcgaagcggtcgcccaatcgaaacagcgccatgaggccgatcctgtgattgctgtgcccagtggtaattttggtaatctcaccgcgggcttgtttgccaaagccatgggcttacctgttaaacgttttattgccgcgaccaacgccaatgacactgtcccacgttatttagagagtggtgattggcagcctaatcctactcaagcgactatgtccaatgcgatggatgtgagcgagccaagtaactggccgcgcgtcgaggcaatttgcgagaaactcggttggccattggcggacctagtggggattcgtttatcagaggcgcaaacctcggaggcgctggcggagttacatgcaaaaggttatgtgtccgaaccccatgcagcgattgctgccagagccttaacgcttaacttagtgcctgatgaagtggggatatttttaggtacagcacatcctgccaagtttaaggacgtcgtagatagagagcttaacctcgatttacctctgcctgcagaacttaaagcggtggagcataaacccatactctcggctgaattagccgccgattttgctcagttaaagtcacatttatttgcggtgttaagctga

SEQ ID NO: 35112 - protein, 427 aa, Shewanella sp. ANA-3
MELYNLKHPSQKVSFKEAVQLGLGKDRGLFFPTQIPVLHDIEALLAMPFVERSKKVLGAWLASELGQDAVDKLVERAFNFDLPLVAVDEQRSCLELFHGPTLAFKDFGARFMAQCINAFAQDSRLTILTATSGDTGAAVADAFYGLDKVNVVVLYPKGKISELQEKMFTTLGKNIHTVAVASDFDACQHLVKQAFEDSDVRDGLHLNSANSINISRLLAQICYYFEAVAQSKQRHEADPVIAVPSGNFGNLTAGLFAKAMGLPVKRFIAATNANDTVPRYLESGDWQPNPTQATMSNAMDVSEPSNWPRVEAICEKLGWPLADLVGIRLSEAQTSEALAELHAKGYVSEPHAAIAARALTLNLVPDEVGIFLGTAHPAKFKDVVDRELNLDLPLPAELKAVEHKPILSAELAADFAQLKSHLFAVLS

SEQ ID NO: 35113 - DNA, 1464 bp, Azoarcus sp. BH72
  CDS (1)..(1464): transl_table=11
gtgaagtacatctccacccgcggccacgccggccagcccgccaatcccgaattctgcgacatcctgctcggcggcctggcgcccgacggcggcctctacctgccggaaacctatccgcaggtgacccgcgccgaactcgacgcctggcgcaagctctcctacgccgacctggccttcgccatcctgtcgaagttcatcaccgacattcccgccgccgacctcaaggcgatctgcgacaagacctacaccgccgatgtctaccgccacgtgcgcgccggcgacaaccccgccgacatcaccccggtgcactggctggagaaggatgccgcgggcaagggcagctttggcctgcttgagctttccaatggcccgacgctcgccttcaaggacatggcgatgcagttgctcggcaacctgttcgagtacgtgctggccaagcgcagcgagaccatcaacatcctcggcgccacctcgggcgacaccggctccgccgcggagtacgcgatgcgtggcaagcacggcgtgcgcgtgttcatgctgtcgccgcacggcaagatgagcgccttccagcgtgcccagatgtactcgctgcaggacggcaacatcttcaacatcgccgtcaccggcatgttcgacgatgcccaggacatcgtgaaggcggtctccaacgaccacgccttcaaggcgaagtacaagatcggcgcggtcaactcgatcaactgggcgcgggtcgcggcgcagatcgtctattacttcaagggctatttcgccgccaccgagagcaatgaccagcaggtcgcgttctgcgtgccctcgggcaacttcggcaacatctgcgccggccatatcgctcgccagatgggtcttccggtcgccaagctgatcctcgccaccaacgaaaacgacgtgctcgacgagttcttccgcaccggcgtctatcgcccgcgcaaggcggcggaaacccatgtcacctccagcccgtcgatggatatctccaaggcgtccaacttcgagcgtttcgtgttcgacctcgtcggccgcgatccgcagaaggtggccgcgctgtggaagcaggtcgacggcggtgccgctttcgatctgaccgcgtccggcgagttctcccgcatcggcggcttcggcttcgcctccggcagcagttcgcacgccgaccgcctcgcgaccatccgcaaggtgttcgacaagtacggcgtgatgatcgacacccacaccgcggacggcgtaaaggtggcttgggagaaggcggacacagtgcccgccggcgtgccggtgctggtgctggaaaccgcgctgccggtgaagtttgcggaaaccatccaggaagcgctcggccgtgagcccgagcgtcctgcagacctcgaaggcatcgaagcgctgccgcagcgcgtggaagtgatggcgccggatgtcgaggccgtgaagcgcttcatcactacccgggtctga

SEQ ID NO: 35114 - protein, 487 aa, Azoarcus sp. BH72
MKYISTRGHAGQPANPEFCDILLGGLAPDGGLYLPETYPQVTRAELDAWRKLSYADLAFAILSKFITDIPAADLKAICDKTYTADVYRHVRAGDNPADITPVHWLEKDAAGKGSFGLLELSNGPTLAFKDMAMQLLGNLFEYVLAKRSETINILGATSGDTGSAAEYAMRGKHGVRVFMLSPHGKMSAFQRAQMYSLQDGNIFNIAVTGMFDDAQDIVKAVSNDHAFKAKYKIGAVNSINWARVAAQIVYYFKGYFAATESNDQQVAFCVPSGNFGNICAGHIARQMGLPVAKLILATNENDVLDEFFRTGVYRPRKAAETHVTSSPSMDISKASNFERFVFDLVGRDPQKVAALWKQVDGGAAFDLTASGEFSRIGGFGFASGSSSHADRLATIRKVFDKYGVMIDTHTADGVKVAWEKADTVPAGVPVLVLETALPVKFAETIQEALGREPERPADLEGIEALPQRVEVMAPDVEAVKRFITTRV

SEQ ID NO: 35115 - DNA, 1410 bp, Neisseria meningitidis FAM18
  CDS (1)..(1410): transl_table=11
atgaaatacatcagcacgcgcggcgaaaccgcacacaaaccgttcagcgaagttttattgatggggcttgcacccgacggcggcctgatgctgccggaacattatccgcaaatcgggcgggaaaccttggacaaatggcgcggtttggcttatcccgaattggcgtttgaaattatgcgcctgttcgttaccgacattccggaggacgatttgcgcgatattctgaaccgtacttacacggaagcggcgttcggtactaaggaaatcacccccgtccgcacgctttcagacggcatcaaaatccaagccttgtccaacggcccgacgctggcgttcaaagatatggcgatgcagtttttgggcaatgcgtttgaatatgttttaaacaaagaaggcaaaaaactcaatatcttgggcgcaaccagcggcgatacgggttcggctgcggaatatgccttgcgcggcaaaaaaggtgtgaatgtatttatgctgtcgcccgatggcaaaatgagcgcgttccaacgtgcgcagatgtacagcctgcaagacgggaatatccacaatatcgccgtgaagggtatgtttgacgactgtcaggatattgtgaaggcggtgcaaaacgatgccgcgttcaaggaaaaataccatatcggtacggtcaattcgattaactggggacgcatcgtcgcgcaagtggtttattactttgccggctatttcaaagcgacgcaaagcaatgacgagcaagtcagcttttgcgtgccgagcggcaacttcggcaacgtttgcgcgggacatattgccaaacagatgggcttgcccatccgccgcctgattgtcgcgaccaatgaaaacgatgtgttggacgagtttttcaaaaccggcgcgtaccgcccgcgcaacagcgcgcatacttatgttacctccagcccatctatggacatttccaaagcgtccaatttcgagcgtttcgtgttcgacctgatggatcgcgatcctcaggaaatcaatacgctgtggacggaagtcgcggcgggcaagggctttgacttgcagtttgccttagacaaagtcggcggcaaatacggctttacctccagcaagtccacccacgccgaccgcctcgccaccatcaaacaggtttacgagcaagaccaagaactcatcgacccgcacactgccgacggcgtaaaagtcgcccgcgaagtgcgcgaagaaggggaaacggtggtttgtttggaaaccgcgttggcagcgaaattcgatgcgaccatacgcgaagccgtcggcgatgccgccattccgcgccctgccgcgctggaaggtttggaaaacctgccgcagcgcgtgcaaaccgtgccgaacagtgcggatgcggtaaaaggcatcatcgaacaaacccttgcctga

SEQ ID NO: 35116 - protein, 469 aa, Neisseria meningitidis FAM18
MKYISTRGETAHKPFSEVLLMGLAPDGGLMLPEHYPQIGRETLDKWRGLAYPELAFEIMRLFVTDIPEDDLRDILNRTYTEAAFGTKEITPVRTLSDGIKIQALSNGPTLAFKDMAMQFLGNAFEYVLNKEGKKLNILGATSGDTGSAAEYALRGKKGVNVFMLSPDGKMSAFQRAQMYSLQDGNIHNIAVKGMFDDCQDIVKAVQNDAAFKEKYHIGTVNSINWGRIVAQVVYYFAGYFKATQSNDEQVSFCVPSGNFGNVCAGHIAKQMGLPIRRLIVATNENDVLDEFFKTGAYRPRNSAHTYVTSSPSMDISKASNFERFVFDLMDRDPQEINTLWTEVAAGKGFDLQFALDKVGGKYGFTSSKSTHADRLATIKQVYEQDQELIDPHTADGVKVAREVREEGETVVCLETALAAKFDATIREAVGDAAIPRPAALEGLENLPQRVQTVPNSADAVKGIIEQTLA

SEQ ID NO: 35117 - DNA, 1281 bp, Actinobacillus pleuropneumoniae serovar 1 str. 4074
  CDS (1)..(1281): transl_table=11
atgaacttatacaacatcaaacacccagaagaacaagttaatttcgcacaaggcgtgcgccaaggtttaggtaaggatcaggggttatttttccctgaagtgttaccgaaatttgacgatattgatgcgttactggatttacctttggttgaacgcagccaaaaaattttggcggcacttatcggtaacgaacttccgcaagaaacggtaaatgccatggtaaaaaatgcgtttactttccctgctccattagcaaaagtgaatgactatatttatgcacttgagctgttccacggcccgacattggcatttaaagacttcggcggtcgttttatggcgcaagcactggcaagcgtgcgtggtgacggcaaaatcaccattttaaccgcaacctcaggcgacaccggtgcggcggtagcgcacgcattttatggcttagaaaatatcaatgtagtgatcctttacccgaaaggcaaaatcagcccgttacaagaaaaattattctgtaccttaggcggtaacattcgtaccgttgcgattgaatcggattttgacgcttgccaagtgttagtaaaacaagcgtttgacgatgctgaattacgtcaagcgatcggcttaaactccgcaaactcaatcaatatcagccgtttattagcgcaagtttgttattactttgaagcggtagcacaattaccgaaagcaaaacgttctgatgtagtggtttcagtaccaagcggtaacttcggtaacttaaccgctggtttaatcgcaaaaaccttaggtttaccaattaaacgttttatcgcatcaaccaatgcgaatgacacagtgccgcgttatttaaaatcaggtaaatgggaaccgaacgcaacggtagcaacgctttcaaacgcaatggacgtaagccgcccgaacaactggcctcgtgtggaagaattatttaaacgcaacggttgggcgttaagcgatttaggttcggcggcattaaacgatgcggaaaccgaagcggcattaaaagcacaatatgcggaaggttatttatgcgaaccgcacggtgcaatcgcttaccaagcgttaaaagatcagcttcaagcgggcgaaaccggtattttcctctgcaccgctcacccggcaaaattcaaagaaagcgtagaacgtattcttaacatcgaattaccactaccggaagcattggataaacataacaaaatggaattattatccgacactatgccggcggatttcgccaaattacgtgagtatttgttagcgggtaactaa

SEQ ID NO: 35118 - protein, 426 aa, Actinobacillus pleuropneumoniae serovar 1 str. 4074
MNLYNIKHPEEQVNFAQGVRQGLGKDQGLFFPEVLPKFDDIDALLDLPLVERSQKILAALIGNELPQETVNAMVKNAFTFPAPLAKVNDYIYALELFHGPTLAFKDFGGRFMAQALASVRGDGKITILTATSGDTGAAVAHAFYGLENINVVILYPKGKISPLQEKLFCTLGGNIRTVAIESDFDACQVLVKQAFDDAELRQAIGLNSANSINISRLLAQVCYYFEAVAQLPKAKRSDVVVSVPSGNFGNLTAGLIAKTLGLPIKRFIASTNANDTVPRYLKSGKWEPNATVATLSNAMDVSRPNNWPRVEELFKRNGWALSDLGSAALNDAETEAALKAQYAEGYLCEPHGAIAYQALKDQLQAGETGIFLCTAHPAKFKESVERILNIELPLPEALDKHNKMELLSDTMPADFAKLREYLLAGN

SEQ ID NO: 35119 - DNA, 1278 bp, Haemophilus influenzae R2846
  CDS (1)..(1278): transl_table=11
atgaatttatacaatatcaaacacccagaagaacaagtcactttttctcaggctgttcgtcaaggtcttgggcgggatcaaggtttattctttccagaagttattcctaaacttaataacattaatgaattacttgaattgcctcttgttgagcgtagccaaaaaattctaggtgcattaattggtgaagaattaccgaaagcaacgttagacgagatggtgagaaatgcattcactttcaccgcaccgttagaaaaagttgaagataatatttatgcacttgaattatttcatggtcccacattggcatttaaagactttggtggtcgttttatggcacaggcacttgctgcggtacgtggtgatggaaaaaccaccattttaacggctacgtctggcgatactggagctgctgtagcacatgcgttttatggattaaaaaatattaatgtagttatcctttatccaaaaggtaaaatcagcccattacaagaaaagctattctgtactttaggtgggaatattcgtactgttgcgattaacgctgatttcgatgcgtgccaggctttagttaagcaagcctttgatgatgttgaattgcgccaagctatcgggcttaactctgcaaattctattaatatcagccgtttattagctcaagtttgttattactttgaggctgtcgcacaattgccaaaagaaaaacgtgataatgtcgtggtttctgtgccaagcggtaattttggtaacttaacggcgggattaattgcaaaaaccttaggcttgccgataaaacgctttgtcgcctcaacaaacgcaaatgatactgtgccacgttatttgaaatcgggtaattgggatcctaaaacgacagttgcaaccctttctaatgcaatggatgtaagtcgcccaaataattggccgagagtggaggaattgtttaaacgaaatggttgggatttaactgatttaggttcggggatgctaagtgatagcgaaacagaagatactttaaaagcgatgcagtcgaaaggttatttatgtgagcctcacggtgcgatagcttatcaggtgttgaaagatcaacttaaagcagatgaagtaggcattttcttgtgcactgcacatccagcgaaatttaaagaatccgtagaacgtattcttggtattcagcttccattacctgaaacactggataaacataatcagctaccattgctttctgatgaaatggataatgattttgcacaactacgggcttacttattgaagtcataa

SEQ ID NO: 35120 - protein, 425 aa, Haemophilus influenzae R2846
MNLYNIKHPEEQVTFSQAVRQGLGRDQGLFFPEVIPKLNNINELLELPLVERSQKILGALIGEELPKATLDEMVRNAFTFTAPLEKVEDNIYALELFHGPTLAFKDFGGRFMAQALAAVRGDGKTTILTATSGDTGAAVAHAFYGLKNINVVILYPKGKISPLQEKLFCTLGGNIRTVAINADFDACQALVKQAFDDVELRQAIGLNSANSINISRLLAQVCYYFEAVAQLPKEKRDNVVVSVPSGNFGNLTAGLIAKTLGLPIKRFVASTNANDTVPRYLKSGNWDPKTTVATLSNAMDVSRPNNWPRVEELFKRNGWDLTDLGSGMLSDSETEDTLKAMQSKGYLCEPHGAIAYQVLKDQLKADEVGIFLCTAHPAKFKESVERILGIQLPLPETLDKHNQLPLLSDEMDNDFAQLRAYLLKS

SEQ ID NO: 35121 - DNA, 1278 bp, Haemophilus influenzae R2866
  CDS (1)..(1278): transl_table=11
atgaatttatacaatatcaaacacccagaagaacaagtcactttttctcaggctgttcgtcaaggtcttgggcgggatcaaggtttattctttccagaagttattcctcaacttaataacattaatgaattacttgaattgcctcttgttgagcgtagtcaaaaaattctaggtgcattaattgatggcgagttaccacaagcaacgttagatgcaatggtaaaaaatgcgtttactttcactgcaccgttagaaaaagtggaagataatatttatgcacttgaattatttcacggtccaacgctagcatttaaagattttggtgggcgttttatggcacaggcacttgctgcggtacgtggcgatggcaaaatcactattttaacggcaacctcaggcgatactggagccgctgtagcacatgcgttttatggattagaaaatattaatgtagttatcctttatccaaaaggcaaaatcagcccattgcaagaaaagctgttctgtactttaggtgggaatattcgtactgttgcgattaacgctgattttgatgcgtgtcaggctttggttaagcaagcctttgatgatgttgaattgcgccaagctatcgggcttaactctgcaaattctattaatatcagccgtttattagctcaagtttgttattactttgaggctgtcgcacaattgccaaaagaaaaacgtgataatgttgtggtttctgtgccaagcggtaattttggtaacttaacggcgggattaattgcaaaaaccttaggcttgccgataaaacgctttgtcgcctcaacaaacgcaaatgatactgtgccacgttatttgaaatcgggtaattgggatcctaaaacgacagttgcaaccctttctaatgcaatggatgtaagtcgcccaaacaattggccgagagtggaggaattgtttaaacgaaatggttgggatttaactgatttaggttcggggatgctaagtgatagcgaaacagaagataccttaaaagcgatgcagtcgaaaggttatttatgtgaacctcacggtgcgatagcttatcaggtgttgaaagatcaacttaaagcgagtgaaacaggaatcttcctgtgtacggcacatcctgcgaaatttaaagaatccgtagaacgtattcttggtattcagcttccattacctgaaacactggataaacataatcagctaccattgctttctgatgaaatggataatgattttgcacaactacgggcttacttattgaagtcataa

SEQ ID NO: 35122 - protein, 425 aa, Haemophilus influenzae R2866
MNLYNIKHPEEQVTFSQAVRQGLGRDQGLFFPEVIPQLNNINELLELPLVERSQKILGALIDGELPQATLDAMVKNAFTFTAPLEKVEDNIYALELFHGPTLAFKDFGGRFMAQALAAVRGDGKITILTATSGDTGAAVAHAFYGLENINVVILYPKGKISPLQEKLFCTLGGNIRTVAINADFDACQALVKQAFDDVELRQAIGLNSANSINISRLLAQVCYYFEAVAQLPKEKRDNVVVSVPSGNFGNLTAGLIAKTLGLPIKRFVASTNANDTVPRYLKSGNWDPKTTVATLSNAMDVSRPNNWPRVEELFKRNGWDLTDLGSGMLSDSETEDTLKAMQSKGYLCEPHGAIAYQVLKDQLKASETGIFLCTAHPAKFKESVERILGIQLPLPETLDKHNQLPLLSDEMDNDFAQLRAYLLKS

SEQ ID NO: 35123 - DNA, 1317 bp, Prosthecochloris aestuarii DSM 271
  CDS (1)..(1317): transl_table=11
atgatttactacagtaccaataaatcttcgacaccggcaagcctcaaaagagcgacgcttgagggtctagcccccgatggcggcctctatgtcccgtctgccataccggttttctctccctcggagatcgaactgctcaaagaagctccgtttaaggatattgcctttgccatagcaaaaaaatataccggaagtgaaattccccctgaccgtctctacgagatcattgaagagtgcttcaatttcccaaccccactggtacctctcgacaacaacacgtttatcgaggaactcttccatggccccacacttgcgttcaaagactacggtgcacgttttctggccagaatgaccggttatttcgcagaggaagatcatacactcattaccatcctcgtagcgacttccggagacacgggtagcgctgtagcctacggatttcagggtattcccaatacacgggtcgtcctgctctatccatccggaaaagtcagccgccttcaggaacagcagctgacaaccgcaggaggaaacgtcacagcacttgaggtcaaaggtgattttgatgattgtcaaaggcttgtcaaacaagcatttatggacggatcgatcaagcagaatctcaccctgacatcggcaaactccatcaatatatcgcgtctcatcccccagtcgttctactatgcatgggcagcgctgcaactcgacagaaagtatccggggaaaaaagctgtcttctcggttccgagcggaaactacggcaaccttaccgctggcgtactggcaaaaatgatgggattcccgatcgatcactttattgcagcctccaatgcaaacgacagcgttacacgctatattgaagagggacgctatgagcctcatccgacaatccgtacactgtcgacggcaatggatgtcggcgatccaagcaatttcgcccgcctgcgccacatctatgccaatgatcacacgaaaatggctgcagatattacaggctactcgatctcggacaacgaaacgctcgaaaccatcagaagcgtctacgaccgtttcggctatatcatggatccgcataccgctgtcggcagcagggctcttgaactctggagagagcagatgacgcaagccgattccaacccggctgtcgtactgtcgacagcgcatccggcaaaattccttgaatcgatccgtgaagcgctcgatatggagatatccatccctgacagattgcagaccgttctggataaacagaaaatagcaaccctgatcggttccgactacaatgaactctcagcgtttctttctgcactcgattaa

SEQ ID NO: 35124 - protein, 438 aa, Prosthecochloris aestuarii DSM 271
MIYYSTNKSSTPASLKRATLEGLAPDGGLYVPSAIPVFSPSEIELLKEAPFKDIAFAIAKKYTGSEIPPDRLYEIIEECFNFPTPLVPLDNNTFIEELFHGPTLAFKDYGARFLARMTGYFAEEDHTLITILVATSGDTGSAVAYGFQGIPNTRVVLLYPSGKVSRLQEQQLTTAGGNVTALEVKGDFDDCQRLVKQAFMDGSIKQNLTLTSANSINISRLIPQSFYYAWAALQLDRKYPGKKAVFSVPSGNYGNLTAGVLAKMMGFPIDHFIAASNANDSVTRYIEEGRYEPHPTIRTLSTAMDVGDPSNFARLRHIYANDHTKMAADITGYSISDNETLETIRSVYDRFGYIMDPHTAVGSRALELWREQMTQADSNPAVVLSTAHPAKFLESIREALDMEISIPDRLQTVLDKQKIATLIGSDYNELSAFLSALD

SEQ ID NO: 35125 - DNA, 1302 bp, Xylella fastidiosa Dixon
  CDS (1)..(1302): transl_table=11
atgattcaaatgaacttccattccacccgcaccacagctccggtgaccaccctcagccaggcaatcgctgcaggcttagcaccggatggcggcttatatgtccccgagtgcttgccaccccttggtgacttggaccacagcgcagatttaatcaacaccgccaccgcactactgacccccttctttgcgggggatccgctagaagtgcatgtgccgtcgatctgtgccgaagcgctggatctccccgcaccactgctgcccttggctacccctgaagattatgtccttgaattatttcacggccccactgctgccttcaaggattttggcgcacgttttctagcggcctgcctgactcggctacgacgtgatgccgaacgtcccttgacgattctggtggctacctccggtgatacgggtgctgcggtggcggcggcatttcatcggcaacccggattgcgtgtcgtcgttctgtacccggatggccgtgtatcgccacgtcaggcccaccaattgggttgttttggcgacaacgtacacacactgcgtgtggctggcgtgttcgatgactgccaagccatggtcaagcaggcactgaacgataccagcctccaaacagccgtgccgctgagttcggccaacagcatcagcctgggccgcttgctgccgcagatgagctactacgcccatgcagccttgacccaccgtgccagcacgggccgccctctgaacctcattgtgcccaccggcaacctcggcaatgccttggccgcgattctggcgcgcgccctgggagtgcccttaggacagattgtgttggcgacaaacgccaaccgcgtactctctgattacttttccggagcacattaccgtccccagcccagtgtggcgactttggccaatgcaatggacgttggagcgcccagtaatttcgaacgattgcgctggttgtatcgcggcgatgacgctgcattgcgcgccgcctttaccgcctattccgtcgacgacatcgcgatccgccagaccatcaccgcacggcatcgtcgctacgacgagatattttgtccccataccgctactgcggtgtttgtgcttgagcacttgcgtgcacagggcgtcgctggtgattgggcagttgtggcgaccgcgcatccagccaaatttgagcaggtggtagaaccgttgatcggtaccaccgtgcccgtgccggcggccctggatagcctcttgcaacgtcccgcgagcgacgaaccgctcgccccagagtacccggcattgcggcacatgatgctggccacctaa

SEQ ID NO: 35126 - protein, 433 aa, Xylella fastidiosa Dixon
MIQMNFHSTRTTAPVTTLSQAIAAGLAPDGGLYVPECLPPLGDLDHSADLINTATALLTPFFAGDPLEVHVPSICAEALDLPAPLLPLATPEDYVLELFHGPTAAFKDFGARFLAACLTRLRRDAERPLTILVATSGDTGAAVAAAFHRQPGLRVVVLYPDGRVSPRQAHQLGCFGDNVHTLRVAGVFDDCQAMVKQALNDTSLQTAVPLSSANSISLGRLLPQMSYYAHAALTHRASTGRPLNLIVPTGNLGNALAAILARALGVPLGQIVLATNANRVLSDYFSGAHYRPQPSVATLANAMDVGAPSNFERLRWLYRGDDAALRAAFTAYSVDDIAIRQTITARHRRYDEIFCPHTATAVFVLEHLRAQGVAGDWAVVATAHPAKFEQVVEPLIGTTVPVPAALDSLLQRPASDEPLAPEYPALRHMMLAT

SEQ ID NO: 35127 - DNA, 1293 bp, Xylella fastidiosa Ann-1
  CDS (1)..(1293): transl_table=11
atgaacttccattccacccgcaccacagctccggcgaccaccctcagccaggcaatcgctgcaggcttagcaccggatggcggcttatatgtccccgagtgcttgccaccccttggtgacttggagcacagcgcagatttcatcaacaccgccaccgcactactgacccccttctttgcgggcgatccgctggaagtgcatgtgccgtcgatctgtgccgaagcgctggatctccccgcaccactgctgcccttggccacccctgaagattatgcccttgagttatttcacggccccactgctgccttcaaggatttcggcgcacgttttctagcggcctgcctgacccggctacgacgtgatgccgaacgtcccttgacgattctggtggcgacctccggtgatacgggtgctgcggtggcggcggcatttcatcggcaacccggattgcgtgtcgtcgtcctgtacccggatggccgtgtatcgccacgtcaggcccaccaattgggttgttttggcgacaacatacatacactgcgtgtggctggcgtgttcgatgactgccaagccatggtcaagcaggccctgaacgataccagcctccaaacagccgtgccgctgagttcggccaacagcatcagcctgggccgcttgctgccgcagatgagctactacgcccatgcagccttgacccaccgtgccagcacgggccgccctctgaacctcattgtgcccaccggcaacctcggcaatgccttggccgcgattctggcgcgcgccctgggagtgcccttaggacagattgtgttggcgacaaacgccaaccgcgtactccctgattacttttccggagcacattaccgtccccagcccagtgtggcgacgttggccaatgcaatggacgttggagcgcccagtaatttcgaacgattgcgctggttgtatcgcggggatgacgccgcattgcgtgccgcctttaccgcctattctgtcgacgacatcgcgatccgccagaccatcaccgcacggcatcgtcgctacgacgagatattttgcccccataccgctacggcggtgtttgtgcttgagcacttgcgtgcacagggcgtcgctggggattgggccgttgtggcgaccgcgcatccagccaaatttgagcaggtggtagaaccgttgatcggtaccaccgtgcccgtgccggcggccctggatagcctcctgcaacgtcccgtgcgcgacgaaccgctcgccccagagtacccggcattgcggcacatgctactggccacctaa

SEQ ID NO: 35128 - protein, 430 aa, Xylella fastidiosa Ann-1
MNFHSTRTTAPATTLSQAIAAGLAPDGGLYVPECLPPLGDLEHSADFINTATALLTPFFAGDPLEVHVPSICAEALDLPAPLLPLATPEDYALELFHGPTAAFKDFGARFLAACLTRLRRDAERPLTILVATSGDTGAAVAAAFHRQPGLRVVVLYPDGRVSPRQAHQLGCFGDNIHTLRVAGVFDDCQAMVKQALNDTSLQTAVPLSSANSISLGRLLPQMSYYAHAALTHRASTGRPLNLIVPTGNLGNALAAILARALGVPLGQIVLATNANRVLPDYFSGAHYRPQPSVATLANAMDVGAPSNFERLRWLYRGDDAALRAAFTAYSVDDIAIRQTITARHRRYDEIFCPHTATAVFVLEHLRAQGVAGDWAVVATAHPAKFEQVVEPLIGTTVPVPAALDSLLQRPVRDEPLAPEYPALRHMLLAT

SEQ ID NO: 35129 - DNA, 1362 bp, Croceibacter atlanticus HTCC2559
  CDS (1)..(1362): transl_table=11
gtgttaaagcaaggaatactaaagaagtttccgcataaaaacggaataacaattacacagtttatgacctattatagtttaaacggaaaagcaaaacaagtaaactttgaaactgcagtacgtaaaggcttggcagaagataaaggcttgtattttcctgatcatatttcagcattaccaaaatcattttatgatgccattgaaaatttatcacctaccgaaatcggttatcatgttatcaaacaatttgtaggagatgaaattccagaaaacgatttaaaaattataatttctgaaacattagattttaaatttcctgttgtatctgttgaagaaaatgtaggatcactagagttgtatcatggtcctactttggcatttaaagatgtgggtgctcgctttatggcacgttgcttagggtattttaatacctctcaaaaaaatacagaaaaagtaaccgtacttgttgccacttctggagatacaggcggcgcagttgcaaatggcttttataatgttgaaggtgtaaatgttgttatactctaccctagcggaaaagtgagccatatacaagaacagcaacttacaaccttgggaggaaatattgaagctattgaagttgatggcacgtttgacgattgccaagcaatggtgaagaaagcatttttagataaagactttaaggggaaacgcaacttaacctcagcaaactcaataaatgtggcgcgttggttaccacaaatgttctatttctttttggcttataaacaattaaagtctctggataagaagcttgtattttcagtaccaagtggtaattacggaaatatctgtgctggaatgatggcgcaaaaactgggtttaccgatatcccattttgttgctggaactaacgagaatgacatagttccagaatatttaaaaactggaatctataccgcaaaaccatctgtagcaacaattagtaatgccatggatgttggcgacccaagtaattttatccgcattcaaaaaattcacgataatgatgatacgaccttaaaacaacatctttcagcgtatcgttatagtgatactgaaactgaagatgctatgattcagctatataaaacacataattatatagcagatcctcacggcgcaattggatatttagcgctgaaaaaatatcaagaatcgaatcctgatacctatggtgtgtttctagaaaccgcgcatccttgtaagtttttagatgtgataccgaagtcaatagttgatgctgttaatattccgaagagtattaaagcgattatggataaagagaaaaaatctacattattaattacgtataccgagttaaaggagtatctcttaaagtaa

SEQ ID NO: 35130 - protein, 453 aa, Croceibacter atlanticus HTCC2559
MLKQGILKKFPHKNGITITQFMTYYSLNGKAKQVNFETAVRKGLAEDKGLYFPDHISALPKSFYDAIENLSPTEIGYHVIKQFVGDEIPENDLKIIISETLDFKFPVVSVEENVGSLELYHGPTLAFKDVGARFMARCLGYFNTSQKNTEKVTVLVATSGDTGGAVANGFYNVEGVNVVILYPSGKVSHIQEQQLTTLGGNIEAIEVDGTFDDCQAMVKKAFLDKDFKGKRNLTSANSINVARWLPQMFYFFLAYKQLKSLDKKLVFSVPSGNYGNICAGMMAQKLGLPISHFVAGTNENDIVPEYLKTGIYTAKPSVATISNAMDVGDPSNFIRIQKIHDNDDTTLKQHLSAYRYSDTETEDAMIQLYKTHNYIADPHGAIGYLALKKYQESNPDTYGVFLETAHPCKFLDVIPKSIVDAVNIPKSIKAIMDKEKKSTLLITYTELKEYLLK

SEQ ID NO: 35131 - DNA, 1389 bp, Sulfitobacter sp. EE-36
  CDS (1)..(1389): transl_table=11
atgcgttatgtctccacccgtggttccgcccccgttttgtcgttcgaagaggcgctgctgaccggcctcgcccgtgacggcggcctgtatgtgcccgaaacgatcccgacgctcggcaccgatgagctgcgcgagatggccacgatgtcctacgaggatgtcgcctttcgtgtgatgaaaccctttgtcggcgacacattcagcgacgatgaattcaaggcactgatcgccaaggcctatgcgggcttcaaccacaaggtgcgcgcgccgctggtgcagcttgaacaggggcatttcctgcttgaactgttccacggtcccacgctggcgttcaaagattttgccatgcagttgatcggccacatgttccaggccgttctgtcgcgcaagggtgaacgggtgaccatcgtcggtgcgacctcgggcgataccggatcggccgcgatcgaagccttccgcgggctggataacgttgacgttttcattcttttcccccacggccgcgtgtccgaagtacagcgccgacagatgaccacaccatcggaaagcaacgtgcacgcgctggcgctggacggtgatttcgacgactgtcaggcgcgcctgaaagacatgttcaacgaccacgctttccgcgacggcgtgcaactggcaggggtcaatagcatcaactggggccgcgtgctggcgcaggtggtctattacttcaccgcagggctggctatgggcgcgctggaccgcaaggtcagctttaccgtgcccacgggcaacttcggcgacatcttcgcgggctatatcgcgcgcgaaatgggactgccgattgccgatctggtggttgcgacgaaccagaatgacatcctgcaccgctgcctgaccacaggcggctaccacaagggcgaggttcatgcctctatcagcccatcgatggatattcaggtcagctccaactttgaacgcgccttgtatttcgcctacggccaagacagcgacgcgatcaatgcgctgatgggcgatctggcgaagggtgggtttgacgtcggcgacaatgccctgcgcgacctgcaaaacacctataaatcgggccgcgtttccgaagaggaaaccagcgagacgatcaagaccttctacgccgacacaaacgaacttctgtgcccgcattctgccatcggggtgcgcgtgggggcggccttgcgtgatcctgcgacgccgatgatcacgctggccaccgcgcatccggccaagttccccgacgcggtcgaagccgccacaggccagcgcccgccgctgcccgatcacatggccgatctgttcgatcgcgaagaacgcgtgacccgcgtgccgaacgaccttgaggcgctcaaggatatcattaaagggggcatcgctcagtga

SEQ ID NO: 35132 - protein, 462 aa, Sulfitobacter sp. EE-36
MRYVSTRGSAPVLSFEEALLTGLARDGGLYVPETIPTLGTDELREMATMSYEDVAFRVMKPFVGDTFSDDEFKALIAKAYAGFNHKVRAPLVQLEQGHFLLELFHGPTLAFKDFAMQLIGHMFQAVLSRKGERVTIVGATSGDTGSAAIEAFRGLDNVDVFILFPHGRVSEVQRRQMTTPSESNVHALALDGDFDDCQARLKDMFNDHAFRDGVQLAGVNSINWGRVLAQVVYYFTAGLAMGALDRKVSFTVPTGNFGDIFAGYIAREMGLPIADLVVATNQNDILHRCLTTGGYHKGEVHASISPSMDIQVSSNFERALYFAYGQDSDAINALMGDLAKGGFDVGDNALRDLQNTYKSGRVSEEETSETIKTFYADTNELLCPHSAIGVRVGAALRDPATPMITLATAHPAKFPDAVEAATGQRPPLPDHMADLFDREERVTRVPNDLEALKDIIKGGIAQ

SEQ ID NO: 35133 - DNA, 1389 bp, Roseovarius nubinhibens ISM
  CDS (1)..(1389): transl_table=11
gtgaaatatatctcgaccaggggcacggccccgacgctgagtttcgaagaggccatgctaaccgggttggcgcgggacggggggctctatctgcccgagacgatcccgacgctcagcccggacgagatcgcggcattcgaggggctgccctatgaggaggtggcgtttcgggtgatgcggccctatgtgggcgacgccttcaccgacgaagagtttcgcggcatcatcgcgcgggcctatgacgggtttgcggtggcgtcgcgcgcgccgctcaagcagctcgcgccggggcatttcctgctggagctgttccacgggccgacgctggccttcaaggatttcgccatgcagctcatcgggcagctgttcgagttctcgctcaaacggtcgggcaagcgggtctgtatcgtgggcgcgacgagcggcgacaccggcagcgcggcgatcgaggcgtttcgcgggctcgaggcggtggatgtgttcatcctctatccgcatgggcgggtgtccgaggtgcagcggcggcaaatgtcgacgccgtcggaggacaatgtgcatgcgctggcggtggatgggcatttcgacgattgccaggcgcgcgtgaaggatatgttcaacgatttcgagttccgcgatgccgttgggcttgccggtgtgaactcgatcaactgggcgcgggttctggcgcaggtggtctattacttcacctccgccgtgagccttggcgcgccgcatcgcaaggtgagctttaccgtgcccaccggcaatttcggcgatattttcgcgggctacatcgccaagcgcatggggcttcccatcgagcggctggtggtggcgacgaaccagaacgacattctgcaccggtgcctcgagagcggcgagtacaagcccgatggggtgatcccgtcgatcagcccgtcgatggatattcaggtcagctccaactttgagcgggcgctgttcgaggcctatggccgcgacggggcggcggtggcgcagctcatggaagagctcaaatccggcgggttcagcgtgagccagggcgcccgtgaggcgctgcgcgagagctatgacagcgaccgggtgagcgaggacgagacccgcgccgagatcgcccgtcagcaggccgagagtgccgagcttctgtgtccgcatagtgccattggcacggcggtggcggatcggcagcggcagacgggcacgccgatgatcacgctggcgacggcgcatccggccaagttccctgacgcggtggaagcggccagcggtgtccggccccccttgcctccgcatatgtcggacctgtatgagcggccggaacggatcacgcgggtcggcaacgaccttggcgcgatcgaggcactgatcagggaacggaccgggaattga

SEQ ID NO: 35134 - protein, 462 aa, Roseovarius nubinhibens ISM
MKYISTRGTAPTLSFEEAMLTGLARDGGLYLPETIPTLSPDEIAAFEGLPYEEVAFRVMRPYVGDAFTDEEFRGIIARAYDGFAVASRAPLKQLAPGHFLLELFHGPTLAFKDFAMQLIGQLFEFSLKRSGKRVCIVGATSGDTGSAAIEAFRGLEAVDVFILYPHGRVSEVQRRQMSTPSEDNVHALAVDGHFDDCQARVKDMFNDFEFRDAVGLAGVNSINWARVLAQVVYYFTSAVSLGAPHRKVSFTVPTGNFGDIFAGYIAKRMGLPIERLVVATNQNDILHRCLESGEYKPDGVIPSISPSMDIQVSSNFERALFEAYGRDGAAVAQLMEELKSGGFSVSQGAREALRESYDSDRVSEDETRAEIARQQAESAELLCPHSAIGTAVADRQRQTGTPMITLATAHPAKFPDAVEAASGVRPPLPPHMSDLYERPERITRVGNDLGAIEALIRERTGN

SEQ ID NO: 35135 - DNA, 1389 bp, Oceanicola batsensis HTCC2597
  CDS (1)..(1389): transl_table=11
gtgaagtacatctcgaccaggggccgcgcccccgagctgaccttcgaagaggcgatgctgaccgggctggcacgcgacggcgggctctacgtgccggccgatatccccacgctctccggcgacgagatcgcggcacttgccaaccagccctacgaggaggtcgcctttcgcatcatgcggcccttcatcggcgacaccttttccgacgacgaattccggggcatcatcgcccgcgcctatgccggcttcgaacatgcctcccgcgcgccgctggtccagctcggccccggtcacttcctgctcgaactgttccacgggccgaccctggccttcaaggatttcgccatgcagctgatcggtcagctgttcgaggcctcgctgacccgctcgggcgaccgcgtgaccatcgtcggcgccacctcgggcgataccggatcggccgcgatcgaggcgttccgggggctcgacgcggtggatgtcttcatcctgttcccccatggccgggtcagcgaggtgcagcgccgccagatgaccaccccggccgagacgaatgtccacgccctctcggtcaccggccatttcgacgactgccaggcgcgggtgaaggacatgttcaacgatttcgccttccgcgacgaggtccggctggccggcgtgaactcgatcaactgggcgcgggtgctggcgcaggtcgtctactacttcacctcggccgtggcgctcggcgcgccgcaccgcaaggtcggtttcacggttcccacgggcaatttcggcgacatcttcgccggctacatcgcccgccgcatgggcctgccgatcgaccggctggtggttgcgacgaaccagaacgacatcctgcaccgctgcctgaccaccggcagatacctccccgagggggtgatcccctcgatcagcccctcgatggacatccaggtctcgtcgaacttcgaacgcgtgctcttcgaggcctacgaccgcgacggcgcggcggtggcccagctcatggacgagctgaaggccggcggcttcaccgtctcgcagggcgcgctggaacggctgcaggacctgttcctgtccggccgcgcctcggaagaggagacgggcgccacgatccgccgcctgcgcgagacggccggagagacgctctgcccgcattccgcggtcggggtgaaggtggccgaggagcatctggacccgggcgtcccgatgatcacccttgcgacggcgcatccggccaagttccccgatgcggtcgaggccgccaccggggcccggcccggcctgccgccccacatggccgatctcttcgaccgcgacgaaagagtcacgcgggtcgagaacgatcttgccgaaatcgaacacttcatccgggaaaacatcgcgaattga

SEQ ID NO: 35136 - protein, 462 aa, Oceanicola batsensis HTCC2597
MKYISTRGRAPELTFEEAMLTGLARDGGLYVPADIPTLSGDEIAALANQPYEEVAFRIMRPFIGDTFSDDEFRGIIARAYAGFEHASRAPLVQLGPGHFLLELFHGPTLAFKDFAMQLIGQLFEASLTRSGDRVTIVGATSGDTGSAAIEAFRGLDAVDVFILFPHGRVSEVQRRQMTTPAETNVHALSVTGHFDDCQARVKDMFNDFAFRDEVRLAGVNSINWARVLAQVVYYFTSAVALGAPHRKVGFTVPTGNFGDIFAGYIARRMGLPIDRLVVATNQNDILHRCLTTGRYLPEGVIPSISPSMDIQVSSNFERVLFEAYDRDGAAVAQLMDELKAGGFTVSQGALERLQDLFLSGRASEEETGATIRRLRETAGETLCPHSAVGVKVAEEHLDPGVPMITLATAHPAKFPDAVEAATGARPGLPPHMADLFDRDERVTRVENDLAEIEHFIRENIAN

SEQ ID NO: 35137 - DNA, 1407 bp, Erythrobacter sp. NAP1
  CDS (1)..(1407): transl_table=11
atggaatacatctccaccagaggctccgcgccgacactcgactttgagggagccactcttgccgggctcgcttcggatggcggtctgtacctgccgcgcgaatggccgcgcctgagccacgaagagatccgtgagctgcgcggactgtcctacgcgcagcttgccgcacgcatcatgctaccctttgtcgagggcgcgctgaccgaggacgaactcgaagagctgtgcgagacggtatacggcgatttcggtcatgcgtccgtgaccccgttggtgcagatggatgagacgcattggctgcttgagctgttccacggcccgacgctcgcattcaaggacgtcgcgctgcagatgctcgggcacctgttcgagatcttccttgcccgcagtgacgagcgtctgaccatcgttggcgcgactagcggtgataccggttcggctgcgatcaatgcggtggcggggcgcgaacgggtcgagatcttcatgctccacccctcgggccgagtatcggaagtccagcggcgccagatgacgacggtgcgcgcgcccaacgtccataatctcgcgatcgaaggcagcttcgacgacgcccagcgccacgtgaagcggatgttcgccgatgagagcgtgaccggcacgctgaacctcggcgcagtcaactcgatcaactgggcgcggttgatggcgcaagtggtctactacttctactccgcactccagcttggcgggcctgatcgcaagattgcctacagcgtaccaacaggcaattttggcgacgtgttcgcaggctacgtcgccgcgcagatgggtttgccgatcgagcggctgatcgtggcgaccaacgtgaacgacatcctccaccgcgcgctaaccaaaggcgattattcggcgggtgaaaccaccgctacaattacgccttcgatggacatccaggtcagctccaatttcgagcggctactgttcgatgttggcgggcgagatggacctgcgatggctcatcagatgtctggcttcgatgcatcgaaagccatgcaactcaccaatgcgcagcgcgagggcgcctcggctttgttttcgagcgcacgcgccgatcaggacgaaaccgcccgcgccctgcaatgggcgtatcgcaatgccggacaggtgatcgacccgcataccggtgtcggacttcacgcggcgcaggttgccgagggtattgcgcctggtacgcctatcgtgacgttggcaaccgcgcacccagcgaaattccgcgatgcggtcgagcgcgccgtgggcgtgcgtccttccttgcctgcgcgggtcggcgatctgtttggtcgcgaagagatgttcaccgagcttggcggagactacgaggcgtcgcgcgatttcgtgcttcagacggcgaccccgtcggcgatctga

SEQ ID NO: 35138 - protein, 468 aa, Erythrobacter sp. NAP1
MEYISTRGSAPTLDFEGATLAGLASDGGLYLPREWPRLSHEEIRELRGLSYAQLAARIMLPFVEGALTEDELEELCETVYGDFGHASVTPLVQMDETHWLLELFHGPTLAFKDVALQMLGHLFEIFLARSDERLTIVGATSGDTGSAAINAVAGRERVEIFMLHPSGRVSEVQRRQMTTVRAPNVHNLAIEGSFDDAQRHVKRMFADESVTGTLNLGAVNSINWARLMAQVVYYFYSALQLGGPDRKIAYSVPTGNFGDVFAGYVAAQMGLPIERLIVATNVNDILHRALTKGDYSAGETTATITPSMDIQVSSNFERLLFDVGGRDGPAMAHQMSGFDASKAMQLTNAQREGASALFSSARADQDETARALQWAYRNAGQVIDPHTGVGLHAAQVAEGIAPGTPIVTLATAHPAKFRDAVERAVGVRPSLPARVGDLFGREEMFTELGGDYEASRDFVLQTATPSAI

SEQ ID NO: 35139 - DNA, 1296 bp, Pseudoalteromonas tunicata D2
  CDS (1)..(1296): transl_table=11
atggagcaaacaatgttactgcataatttaaaagatcattcagaaaaagtgtcatttatccaagcggtaaaaacaggattaggccgtgatcaaggtgtgttttttccggaaaatttaaccccaatcgcagacattgatgccttacttgaactggattttgtcacccgcagtagcaaaattttaagtcatttaattggcgatgagttatcaagtgagcaagtagctgccatggttgctcgtgcatttaactttgatttgaaattagttgaagttgaaaaaaacatatattgtttagagctttatcatggtccgacattggcttttaaagactttggtggtcgttttatggctgaatgtttagctgagtttagccaaggtaataaaactaccattttaactgcaacaagcggagatactggcgctgcagttgcacatgctttttataaaaaagacaatatcgatgtcgtgattttataccctaaaggtaaaatatcgttagcacagcaaaagctattcactaccttgggtgagaatattcattgttatgccgttgatggtagttttgatgattgtcaggcgatggttaaagctgcgtttttagataatgaagtgaaacagcgtttaggcttaaattcggctaactcaattaacatcagtcgcttagtggctcaagtgtgttattactttgaagccttggcgcgtttacctaaagcgcaaagagcgcaagctcacgtttcagtaccaagtggtaattttggtaatgtttgtgcggcaatgattggtgctgtgattggtttacctgcggcgaaactgtcggcaacaaccaatcaaaatgacaccgtaccacgctttttacacaataaagaatggcaaccggctgcaactaaagaatcattatctaatgcaatggatgtgagtcgtccaaataactggccacgagtgcaatacatgcttgatcacaactggtttagctatgacaatttttactcacacgctattgatgagcaaaccacacaagccgcgatgcatcatttaaatcagttaggctatttagctgagccacacacggcgattgcttatgaagggcttaaacgtgacttggccgcagatggcgttggggtatttttagctactgcacacccagctaagtttaaagaaagtgttgaaggtattttagatattaagttagagatgccaaaaccgctgagcgacgcactggctaaaccgtgtttagcggttgatttagttaatgattatcatgtattacgtgaagcgttattagttaaattaggctaa

SEQ ID NO: 35140 - protein, 431 aa, Pseudoalteromonas tunicata D2
MEQTMLLHNLKDHSEKVSFIQAVKTGLGRDQGVFFPENLTPIADIDALLELDFVTRSSKILSHLIGDELSSEQVAAMVARAFNFDLKLVEVEKNIYCLELYHGPTLAFKDFGGRFMAECLAEFSQGNKTTILTATSGDTGAAVAHAFYKKDNIDVVILYPKGKISLAQQKLFTTLGENIHCYAVDGSFDDCQAMVKAAFLDNEVKQRLGLNSANSINISRLVAQVCYYFEALARLPKAQRAQAHVSVPSGNFGNVCAAMIGAVIGLPAAKLSATTNQNDTVPRFLHNKEWQPAATKESLSNAMDVSRPNNWPRVQYMLDHNWFSYDNFYSHAIDEQTTQAAMHHLNQLGYLAEPHTAIAYEGLKRDLAADGVGVFLATAHPAKFKESVEGILDIKLEMPKPLSDALAKPCLAVDLVNDYHVLREALLVKLG

SEQ ID NO: 35141 - DNA, 1290 bp, Photobacterium sp. SKA34
  CDS (1)..(1290): transl_table=11
atgaaattgtataatctaaaagaacatcaagaacaggtttcatttggtcaggctgtacgtcaaggattaggacgtaaccaaggtctattctttccatcagaactccctcaatttagcgatattgatgcattgctagagatggattttgtcacgcgtagtagcaagatcctttccgcgtttatcggtgatgagctaagtgaagaaactgttagccaaatgattgatagtgcattccaattcccagcacctatcaataaagtaaaagacggcgtgtatgcgttagaattattccatggtccaacattagcattcaaagattttggtggccgctttatggcgcaatcactagcagcagtaacgtctgatagtgagagtgatattacaattttaacggcgacatcaggcgatacaggtgccgctgttgcgcatgctttctatggtatggataacatcaaggtggtgattttgtacccgaagggtaagatcagtccattacaagaaaagttgttttgtacattaggtaagaatattacaacagttgcggtgaatggcacatttgatgattgccaagcgctagtgaaacaagcatttgatgatgctgagttgcgcaaagaagtgggtttaaactctgcgaattcgatcaatattagccggttaatggcgcagatctgttactactttgaagctgttgctcaactgcctaaagcagaacgtgagcaattagttatttcagtaccaagtggtaattttggtaatttaacggcaggcttattagctaaatcgctaggtttacccgttaaacgctttattgcggcaacgaatgaaaatgatacggttccacgttatttacaaacgggtgagtggtctccaaaagtaaccgttccaactatttcaaatgcgatggatgttagccaaccgaataactggccacgtatcgaagaactttgtcagcttaaaggttggggtctaagtgagctaggtcatggtgctgtaacagatgagcaaacggctgagaccttaaagcagatggatgcagaaggctatttatgtgagcctcatggcgcgattgcttatcgtattcttaacgagcaattaaaagatggcgaaacaggtttgttcctttgtactgcgcatccagcgaagtttaaagaagtcgtggatgagattttagacaaagatattccattacctgcaccattagcgaagcataatgcgatggaattattatctttagagcgtgataatgattttgaagctgtgaaggcggtattacgttcagtacagtcataa

SEQ ID NO: 35142 - protein, 429 aa, Photobacterium sp. SKA34
MKLYNLKEHQEQVSFGQAVRQGLGRNQGLFFPSELPQFSDIDALLEMDFVTRSSKILSAFIGDELSEETVSQMIDSAFQFPAPINKVKDGVYALELFHGPTLAFKDFGGRFMAQSLAAVTSDSESDITILTATSGDTGAAVAHAFYGMDNIKVVILYPKGKISPLQEKLFCTLGKNITTVAVNGTFDDCQALVKQAFDDAELRKEVGLNSANSINISRLMAQICYYFEAVAQLPKAEREQLVISVPSGNFGNLTAGLLAKSLGLPVKRFIAATNENDTVPRYLQTGEWSPKVTVPTISNAMDVSQPNNWPRIEELCQLKGWGLSELGHGAVTDEQTAETLKQMDAEGYLCEPHGAIAYRILNEQLKDGETGLFLCTAHPAKFKEVVDEILDKDIPLPAPLAKHNAMELLSLERDNDFEAVKAVLRSVQS

SEQ ID NO: 35143 - DNA, 1395 bp, Oceanospirillum sp. MED92
  CDS (1)..(1395): transl_table=11
gtgaaatatatttctacccgtggtaaagctccagcaatgaactttgaagaagtcttgctggcaggcttggcgagtgatggtggcctttatgttccagaacagctgccaacattctcccaggatgaaatcgcatcctgggcaggtctgccatacaacgagttggcctacaatgtgattaaaccgtttgtttcagattgcatcgatgatgcggatctgaagaaaatgatcgatgaaacctatgctggtttcaatcacatcgcggtggcacccctgaaagaactcggcaccaatgaatgggtactcgagctgttccatggccctacgttggcgtttaaagattttgctttgcagttactcggtcgtctaatggactatgcgcttgaaaagcgcggtgagcacctggtaattatgggagcaacgtctggtgatacaggctcagcggcgattgaaggctgctgccatagtaaacatctggatatttttattcttcacccgcacaaccgcgtatcagaagtccagcgccgtcagatgacaaccattattaaagacaatgtctttaatattgcccttgaaggcaattttgatgactgtcagcagatggttaaagacagtttcgccaatcaggatttcctgaatggaatgaagcttggtgcagttaactcgatcaactgggcgcgtatcatggcgcagatcgtttattacttctctgcagccctggctgtaggtggaccgcaccgagaagtaagcttctctgttccaacgggtaacttcggcgatatttttgcaggttatctggcaaaacagatgggcttgccagttaagcagctggtagtcgcaaccaacaaaaatgatattctgcatcgtgttattgctggtaacgatatgtctaaaggggatctggtacacacgctgtctccttcgatggatatcatggtctcttcaaacttcgaacgtatgttgtttgatgtatatgatcgtaatggtgaagagatctctgatctgatgagtcgtttctcaaaagagtctgtggaacttgatcctgctcgctgggaaaaggttcgcgagctatttgatagctatgcagtagatgatgaaacaacctgtgatgtcattaaacaggtatttgcggaaactgagtacctgctggatccgcatacagccatcggtgtgaaagctgcgcgtgaatgtaatcgtgataagtcagttcctatgattacactttcgactgcgcatcctgtgaaattcccagagccggttgttaaagcgggcttggaatcgccacaactgcctgcacatatggttgacctttttgagcgagaagagcaagtggaggttctggataatgatctggcaaccgttcaacagtttgttgcttcgcacgttcacacagaataa

SEQ ID NO: 35144 - protein, 464 aa, Oceanospirillum sp. MED92
MKYISTRGKAPAMNFEEVLLAGLASDGGLYVPEQLPTFSQDEIASWAGLPYNELAYNVIKPFVSDCIDDADLKKMIDETYAGFNHIAVAPLKELGTNEWVLELFHGPTLAFKDFALQLLGRLMDYALEKRGEHLVIMGATSGDTGSAAIEGCCHSKHLDIFILHPHNRVSEVQRRQMTTIIKDNVFNIALEGNFDDCQQMVKDSFANQDFLNGMKLGAVNSINWARIMAQIVYYFSAALAVGGPHREVSFSVPTGNFGDIFAGYLAKQMGLPVKQLVVATNKNDILHRVIAGNDMSKGDLVHTLSPSMDIMVSSNFERMLFDVYDRNGEEISDLMSRFSKESVELDPARWEKVRELFDSYAVDDETTCDVIKQVFAETEYLLDPHTAIGVKAARECNRDKSVPMITLSTAHPVKFPEPVVKAGLESPQLPAHMVDLFEREEQVEVLDNDLATVQQFVASHVHTE

SEQ ID NO: 35145 - DNA, 1413 bp, Xanthobacter autotrophicus Py2
  CDS (1)..(1413): transl_table=11
gtgcgttacgtttccacccgtggtgaagctcccgttctctccttttccgacgcgctgctcgcggggcttgcgcgcgacggcggcctctatctgcccgaggcctggccgaccctctccagggatgagatcgccgcgctggcgggaaaaccctacgctgccgtcgccaaggccgtgatcggcccgttcgtgggcgacgcgctgccgccgcgcgccctcgacctgatgatcgacgacgcctatgcgggcttccgtcatccggccgtggccccgctgacccagatcggcgccaaccgcttcctccttgagctattccacggcccgaccctcgccttcaaggacgtggcgatgcagctgctcgcccggctgatggaccatgtgctggcctcgcgcggcagccgggccaccatcgtgggcgccacttccggcgacaccggcagcgcggccatcgaggcgttccggcgctcggacgcggtggatgtcttcatcctctatccccacggccgggtgtccgaggtgcagcgccggcagatgaccacggtgaattcgccgagcgtccatgccattgccgtggaaggcacgttcgacgactgccagaacctggtcaaggccatgttcaaccaccacgccttccgcgactccctggcgctggcaggggtgaattccatcaactgggcgcggatcgtggcccaggtggtctattatttctatgccgccaccgccctgggcgcgccccatcgggacgtctccttcgtggtgcccaccggcaatttcggcgatatcctcgccggctgggtggcgaagaagatgggcctgccgatccgcgacctcaccatcgccaccaacgtcaacgacatcctggtgcgcaccctggacaccggccgctatgaggtgaagggggtgctgccctcctcctcgccgtccatggatatccagatctcctccaatttcgagcgcctgctgttcgaggccctggaccgcgacagcgcggtgctgcgccagctgatggatcagctcgcccagtcgggctccttcagcgtgccgcgcgctgcgctcgccgccatctgcgccgacttctccgccggccgagccgacgagccggagaccgctgccaccatcgccaggctctaccagtccgccggctatctctgcgatccgcacacggcggtgggccttgcggtggcggacaaggtggagcacgcggccagggtgccgcaggtggtgctctccaccgcccaccccgccaagttccccgacgcggtggaagccgccaccggccatcgtccggccctgccgccgcacatggcggacctcatgacccgccgggagagcgtcagcgtgctgcccaacgaccttgccgccatcgagaccttcattcgcgcccatgcgcgcatcgcccggggcgcggcggcatga

SEQ ID NO: 35146 - protein, 470 aa, Xanthobacter autotrophicus Py2
MRYVSTRGEAPVLSFSDALLAGLARDGGLYLPEAWPTLSRDEIAALAGKPYAAVAKAVIGPFVGDALPPRALDLMIDDAYAGFRHPAVAPLTQIGANRFLLELFHGPTLAFKDVAMQLLARLMDHVLASRGSRATIVGATSGDTGSAAIEAFRRSDAVDVFILYPHGRVSEVQRRQMTTVNSPSVHAIAVEGTFDDCQNLVKAMFNHHAFRDSLALAGVNSINWARIVAQVVYYFYAATALGAPHRDVSFVVPTGNFGDILAGWVAKKMGLPIRDLTIATNVNDILVRTLDTGRYEVKGVLPSSSPSMDIQISSNFERLLFEALDRDSAVLRQLMDQLAQSGSFSVPRAALAAICADFSAGRADEPETAATIARLYQSAGYLCDPHTAVGLAVADKVEHAARVPQVVLSTAHPAKFPDAVEAATGHRPALPPHMADLMTRRESVSVLPNDLAAIETFIRAHARIARGAAA

SEQ ID NO: 35147 - DNA, 1398 bp, gamma proteobacterium HTCC2207
  CDS (1)..(1398): transl_table=11
atgaaatatatcagcaccagaggcggcggcgagccaaagagtttcgaagaggttgtactgactgggttagccccagatggcggactttatgtacctcaggaattacccaagtttagtcaagaagagatcgcctcctgggctggtctgtcttatcaggatctggcattaaagattattacgccttttgtcgatggcgcgattcctcatgctgacctaaaaaagttgattgataaatcctattccacattccgtcacggcggtattgcaccgctgattcagaccggacacaacgaatggattatggagctgtttcacggcccgactctggcgtttaaagattttgcgctgcagtttttgggcaacctgctcgattatattctcgccaagcgcaaccaaaaagttgtgattatgggtgccacctccggtgacacaggctctgcggcgattgaaggctgccgtcgctgtgaaaatatcgatatctttatactgcacccgcacaatcgcgtatcagaagtgcagcgccgtcagatgaccacggttgccgcagacaatgtgcacaatattgccatgcacggcaattttgatgactgtcagaatatggtaaaagcgagctttagcgaccaatcttttctccctgaaggtcgtcagttagctgcggttaactcgattaattgggcgcgtattatggctcagattgtctactatttttgggcttctctttctctgggtggcccccagcgcagggtatcgttctcagttcccacaggtaactttggtgatatatttgccggttatttggcgcacaagatgggtttgcccattgagcagttggttattgccaccaaccagaatgatattctgcatcgctgcatcagcgagaatgatcacagcacccgtccgctggagcaaagtctggcgccgagtatggatattatgatctcgagcaattttgagcgcttgctgtttgatctctacgatcgcgacggtccggccattgccgagttaatgaaagaggccaaagcgggtcatatgaatctcagcgattcagctttaatcgaagcgcgcaaattgttcaccagctatcgctgtgacaatgacggcatgctggagatgattcgcagcgtcttgcaagagagtgattacctgatggatccgcacacagccattggtctggatgcggcacgtcactgtcgagccaatactgaaacaccgatggtaaccttggccactgcccatccggctaagttcccgcatgcggtccgtgaagcgggttatcccactgatcctgaactgccaactcatttggcagatttgtttgagaaggaagagcactacgcagtgctggacaatgatcaggatgcggtgcaggcgtttattgcggggaatattacggagtag

SEQ ID NO: 35148 - protein, 465 aa, gamma proteobacterium HTCC2207
MKYISTRGGGEPKSFEEVVLTGLAPDGGLYVPQELPKFSQEEIASWAGLSYQDLALKIITPFVDGAIPHADLKKLIDKSYSTFRHGGIAPLIQTGHNEWIMELFHGPTLAFKDFALQFLGNLLDYILAKRNQKVVIMGATSGDTGSAAIEGCRRCENIDIFILHPHNRVSEVQRRQMTTVAADNVHNIAMHGNFDDCQNMVKASFSDQSFLPEGRQLAAVNSINWARIMAQIVYYFWASLSLGGPQRRVSFSVPTGNFGDIFAGYLAHKMGLPIEQLVIATNQNDILHRCISENDHSTRPLEQSLAPSMDIMISSNFERLLFDLYDRDGPAIAELMKEAKAGHMNLSDSALIEARKLFTSYRCDNDGMLEMIRSVLQESDYLMDPHTAIGLDAARHCRANTETPMVTLATAHPAKFPHAVREAGYPTDPELPTHLADLFEKEEHYAVLDNDQDAVQAFIAGNITE

SEQ ID NO: 35149 - DNA, 1386 bp, delta proteobacterium MLMS-1
  CDS (1)..(1386): transl_table=11
atgcgctatatctccacccggggggggattgcccccatctctttcacccaggcggtgatgatgggcctggccgatgacggcggcctgctgttgccggaaaccatccccagcgtcgaggccgccaccatcgagcactggcgcggcttgacttaccaggagttggccggggaggtactgcaactcttcatcgacgatattcccgccgccgacctccaagaattgatcacccgttcctgcgccaaattccgcgatcccgccatcaccccgctggtcaagcagggtgattgttatatcctggagctgttccacggccccaccctggccttcaaggatgtcgccctgcaactgctgggcaatctctttgaatacctgctcaaggcctccggcggccggatgaatatcctgggcgccacctcgggggataccggcagcgccgccatccacggggtgcggggcaaggagcggatcaatatttttatcctgcacccccaccacaaggtcagccccatccaggaacaacagatgaccacggtgctggatgacaacgtcttcaatatcgccattgatggtaccttcgacgacggccaggccatcgtcaaaaagctctttggtgatcttgctttcaaggaaaaacaccaactgggggcgatcaactccatcaactgggcccgcatcgtcgcccaggtggtctactacgtctatgccgccctcaagctgggccagccgggcagggaggtggatttcgcggtgcccaccggcaacttcggcgatatcttcgccggtttcgtggcccgccgtctgctgccgcagtcgatcggccgcctgatcctggccaccaatgaaaacaatctgctgacccgcttcgtccaggacggcgactactcggtgagcggggtcagacccaccagcagccccagcatggatatccaggtggccagcaatttcgagcgttatctgtactatttgctcgctgaagatgccgccgccaccgccgattacatggcacggttcgccgccgacggccggctccagttcagcggcgagcagttggcccgcatccagggtgatttcgtctccgccagcgccgacgaggccgccaccattgccaccatcggcgatttccaccggcgataccactacctgcttgatccccacagcgcggtgggggtccacgccggccaggcctgccgccggtcggggcatcccctggtctgtctggccaccgcccatcccgccaaattcggcgaagcggtggaacgggccatcggccaaccgccggagctgccgccgccgctggccgacctggccggccgggagagtcgctgccaggtaatggcggcggaagtggaaaccatccgggagtttatcgccgatcatgccatctga

SEQ ID NO: 35150 - protein, 461 aa, delta proteobacterium MLMS-1
MRYISTRGGIAPISFTQAVMMGLADDGGLLLPETIPSVEAATIEHWRGLTYQELAGEVLQLFIDDIPAADLQELITRSCAKFRDPAITPLVKQGDCYILELFHGPTLAFKDVALQLLGNLFEYLLKASGGRMNILGATSGDTGSAAIHGVRGKERINIFILHPHHKVSPIQEQQMTTVLDDNVFNIAIDGTFDDGQAIVKKLFGDLAFKEKHQLGAINSINWARIVAQVVYYVYAALKLGQPGREVDFAVPTGNFGDIFAGFVARRLLPQSIGRLILATNENNLLTRFVQDGDYSVSGVRPTSSPSMDIQVASNFERYLYYLLAEDAAATADYMARFAADGRLQFSGEQLARIQGDFVSASADEAATIATIGDFHRRYHYLLDPHSAVGVHAGQACRRSGHPLVCLATAHPAKFGEAVERAIGQPPELPPPLADLAGRESRCQVMAAEVETIREFIADHAI

SEQ ID NO: 35151 - DNA, 1404 bp, Oceanobacter sp. RED65
  CDS (1)..(1404): transl_table=11
atgatgaaatacatttctactcgcggaaatgctcccgagttgagctttgaagaagtcttattaacaggcctagccgaagatggcggcctatatgtaccaaaagaagtaccacactatagcttggaagagattgcgtcttggcgtgatcttccatacaccgagcttgcgcacaaagttatttatccttttgttgaaggatgtgtggaaagtgcagacctgaagaaaattttggatgaagtttattcggggtttggtcataaagcggttgcgccacttcagcaaattgatcacaacgaatacgtgcttgagctattccacgggccaaccttggcgtttaaagattttgcattgcaaacattaggacgcctactggattacgttctcgaacgtcgccatgaaaaagttgtgattatgggcgctacgtctggtgacacaggcagtgctgctattgaaggtaccaaagcctgtcgcaatgtggatatctttatcctgcatcctcacgaaaaagtcagtgaggtgcagcgtcgtcagatgaccacagtaaaaggtgataacatctacaatatcgccatcaaaggtaactttgacgatgcacaggatatggtgaagaaaagctttggcgatcaaagctttttgcgtggtgaacgcaaactagttgcagtaaacagtatcaactgggcacgcatcatgtcgcaaatcgtttactacttctattcggcattaaaccttggtggtccgctgcgtcccatggcgtattctgtaccgacaggtaactttggtgacatctttgccggttacatggccaagaaaatgggtttgcctattgagcagctagtgattgcaaccaatagcaatgatgtattgcatcgcttaatgagtaaaaaccaatacgaagtgcgtccattattgcacaccattacaccgtccatggacattgcggtgtcttcaaattttgagcgtttactatttgatctttatgatcgtgacggaaaggcgctggcggatcttatggcacgcatgaacgccaagcaagatatcgtatcacttgatgaagaaaagcttggtaaagctcgccagttatttgatagctatgcctgtgatgaagcgtctactgtagaaacaatgaaagcggtttatgaagaaactggttacttactggatcctcatacagcgattggtgttaaagccgctcgagaaactcgccgtaacaccagtattcctatgattactctgggtacagcgcatccggttaaatttgaagatgccgttaagcaagcaggctttgatatgcctgagttgcctcatcacttaacggatctgatggaacgtgaagaacgtttacacgtgttacctgcagatcttgatgttgttcatgagtttattgcagagaacacgttcaagtaa

SEQ ID NO: 35152 - protein, 467 aa, Oceanobacter sp. RED65
MMKYISTRGNAPELSFEEVLLTGLAEDGGLYVPKEVPHYSLEEIASWRDLPYTELAHKVIYPFVEGCVESADLKKILDEVYSGFGHKAVAPLQQIDHNEYVLELFHGPTLAFKDFALQTLGRLLDYVLERRHEKVVIMGATSGDTGSAAIEGTKACRNVDIFILHPHEKVSEVQRRQMTTVKGDNIYNIAIKGNFDDAQDMVKKSFGDQSFLRGERKLVAVNSINWARIMSQIVYYFYSALNLGGPLRPMAYSVPTGNFGDIFAGYMAKKMGLPIEQLVIATNSNDVLHRLMSKNQYEVRPLLHTITPSMDIAVSSNFERLLFDLYDRDGKALADLMARMNAKQDIVSLDEEKLGKARQLFDSYACDEASTVETMKAVYEETGYLLDPHTAIGVKAARETRRNTSIPMITLGTAHPVKFEDAVKQAGFDMPELPHHLTDLMEREERLHVLPADLDVVHEFIAENTFK

SEQ ID NO: 35153 - DNA, 1281 bp, Vibrio sp. Ex25
  CDS (1)..(1281): transl_table=11
atgaagctttacaatataaaagaaaatgatgaacaagtttcctttggccaagccgttcgccaagggttaggccgtaaccaaggtctatttttcccatcggaattaccaaagtttgaagacgttgatgcgctactggcagaagactttgtttctcgtagcactaagattttatcagcgtttatcggtgatgagctggcggaagagcaagtcaacgcgcttgtggacgcagcgttccaattcccggcgccaatcaatcaagtcaaagacggtgtttacgcgttagagcttttccatggtccaacgctggcatttaaagattttggcggtcgctttatggcgcaatctcttgcggcggtatcggacggtggcaagatcaccattctgactgcgacttctggcgatactggcgcagccgttgcgcacgctttctatggtatggaagacatcaacgttgtgattctttacccgaaaggcaagatcagcccactgcaagagaagctattctgtacgctaggcaagaacattcacactgtcgcgatcgatggcgacttcgatgcgtgccaggctctggttaagcaagctttcgatgattccgcactgcgtgaagagatcggcctgaactctgcaaactcaatcaacatcagccgtttgatggcgcaaatctgttactactttgaagcagcagcgcaaatgagcaaacaagagcgtgaaaacctagtcgtgtctgtaccaagtggtaactttggtaacctaactgctggtctactggcaaaagcgctgggtctgccgatcaaacgctttatcgctgcaactaacgctaatgacacggttccgcgctacctagaaacaggtaagtgggagccaaaaccaacggttgcaacgacatcgaacgcgatggacgtgagtcaaccgaacaactggccgcgtatcgaagagctctgccgagtgaaagagtggggcctagagactctaggtaaaggcgcggtttcagatgagcaaagcgcacaatctgtgaaagacctgtactcattgggctacctatgtgaaccgcacggtgcgattgcttaccgcgttcttgaagagcaactgcaagatggtgaaaccggtctgttcctatgtactgcgcacccagcgaagttcaaagaagtggtggatgacattttgcaatctgacatcgagcttcctgcaccgctagcgaagcacgcggcaatggaactgctatcggaagagctagacgcagactttgatgcattgaaacaagtactgcgccgcgtacagtaa

SEQ ID NO: 35154 - protein, 426 aa, Vibrio sp. Ex25
MKLYNIKENDEQVSFGQAVRQGLGRNQGLFFPSELPKFEDVDALLAEDFVSRSTKILSAFIGDELAEEQVNALVDAAFQFPAPINQVKDGVYALELFHGPTLAFKDFGGRFMAQSLAAVSDGGKITILTATSGDTGAAVAHAFYGMEDINVVILYPKGKISPLQEKLFCTLGKNIHTVAIDGDFDACQALVKQAFDDSALREEIGLNSANSINISRLMAQICYYFEAAAQMSKQERENLVVSVPSGNFGNLTAGLLAKALGLPIKRFIAATNANDTVPRYLETGKWEPKPTVATTSNAMDVSQPNNWPRIEELCRVKEWGLETLGKGAVSDEQSAQSVKDLYSLGYLCEPHGAIAYRVLEEQLQDGETGLFLCTAHPAKFKEVVDDILQSDIELPAPLAKHAAMELLSEELDADFDALKQVLRRVQ

SEQ ID NO: 35155 - DNA, 1284 bp, Alteromonadales bacterium TW-7
  CDS (1)..(1284): transl_table=11
atgcaattacataatttaaaagataactcacaaaaagtgtcgtttgttgaagcagtaaaaacaggacttggacgtaaccaaggagtgttttttcctgaatcgttagcgcccatggctgatgttgacgcattacttgatatggattttgttacgcgcagtagcaaaattttatcccatttaattggtgatgagttgccaagtagcactgttgccgacatggttaaaaatgcgtttaattttccagttaagttagtcgaggtagaagaaaatacctattgtttggagctatttcatggtcctacgctggcctttaaagattttggtgggcgctttatggctgaatgcttagcgcagtttaaccaaggtgaaaaagtgactattctaacagcaacatcaggtgatactggtgcagcggttgcacatgcattttacaataaaccaaacattgatgtggttattctttatcctaaaggaaaaatttcacttgctcagcaaaagctatttactaccttaggtggcaatattcattgttacgcggttgatggcagttttgacgattgccaagaacttgttaagaagtcgtttttagatgatgaagttaaatctacacttggcttaaattcagcaaattcgataaacataagccgcttagtcgctcaggtgtgttattactttgaagcgattgcacaactgccaaaagaaaagcgtgcaacagcgcatatttctgtaccaagtggtaactttggtaatgtatgcgctgcaatgattggcgctgtaatagggttgccagttggaaagttaagtgcaacaacaaaccaaaacgacaccgttcctcgttttatacttgataaaaattggttgcctaatgcaacgcttgaatcgctttcaaatgcgatggacgtgagtaagccaaataactggccacgtgtgcaaactatgttggacaacaactggtttagttacgacaacttttactcaattagtgttgacgaagaaaacactcaaacggtgatgaaaaatattcatcaaacagggtatgttgcagagccacatacagcaattgcctaccaaggtttagtcaataaccgagctccgggtgctgcgggcatctttttagcaactgcacatccagctaagtttaaagaaagtgtagaaggtatactaaatattgaacttgatatgccaaagccattgagcgacgcattggctaaaccatgtcttgcaagcgacataaacgccgattacgacgctttgcgtacagaaatactggctaagttagcttaa

SEQ ID NO: 35156 - protein, 427 aa, Alteromonadales bacterium TW-7
MQLHNLKDNSQKVSFVEAVKTGLGRNQGVFFPESLAPMADVDALLDMDFVTRSSKILSHLIGDELPSSTVADMVKNAFNFPVKLVEVEENTYCLELFHGPTLAFKDFGGRFMAECLAQFNQGEKVTILTATSGDTGAAVAHAFYNKPNIDVVILYPKGKISLAQQKLFTTLGGNIHCYAVDGSFDDCQELVKKSFLDDEVKSTLGLNSANSINISRLVAQVCYYFEAIAQLPKEKRATAHISVPSGNFGNVCAAMIGAVIGLPVGKLSATTNQNDTVPRFILDKNWLPNATLESLSNAMDVSKPNNWPRVQTMLDNNWFSYDNFYSISVDEENTQTVMKNIHQTGYVAEPHTAIAYQGLVNNRAPGAAGIFLATAHPAKFKESVEGILNIELDMPKPLSDALAKPCLASDINADYDALRTEILAKLA

SEQ ID NO: 35157 - DNA, 1398 bp, marine gamma proteobacterium HTCC2143
  CDS (1)..(1398): transl_table=11
atgaaatatatcagcactcgcgggaaatctcccgcgctcaattttgaagaagttttgctaaccggactggcccccgatggtggtctctacgttcccgaaactttacctaagtattcccagcaggaaattgcttcctgggcagggctaagctattccgacctggccttcaaaattgttcagcccttcgttgatgacacgattccggctgatgatttaaaggcgctaattgatgatacttatgtcgatttccgtcacccatcgatagcaccgttagttcaactggataaaaatgaatgggtgctggagttatttcaaggtccaactttggcctttaaagattttgcgttacagttgctcggtcgcctgctggactatgtgcttgaacgcagtcatcggaaagtagtaataatgggggctacctcgggtgatactggctctgcggcaatacaagggtgtaagcgttgtaaaaatatcgatatttttatattacatccctttcaaagagtgtcagaagttcagcgtcgacaaatgaccacagtactggcggataatattcacaatgtcgccgtcaaaggtaactttgatgattgccagtctatggtgaaagccagttttaatgacaaaagcttcctgccagaagatcgccagttagtagcggttaactcgattaactgggcgaggataatggcgcaaattgtctactatttttacgcatcgctctctcttggagggccactgcgtcccgttgctttttcagtaccaaccggaaactttggtgatatctatgccggctatttggcgtcaaaaatggggctgcctattgatcagctgatagtggcgaccaacactaatgatattttacaccgttgcattagtcgcaatgatttcaccaaacatccgctagttcacactctttcgccaagcatggatattgttgtttcaagtaattttgagcgtcttttatttgattgttacgaccgtgatggtgccgccgttagcgatttgatgactcggtttcagagcgaagatgtggtgttgaaggactctgcgttttctaacatacaggcgctatttgatagctatcaagttgatgacgagcgaaccgttgagacaatagctgaggtttacgaggccacggaatatttgttggatccacacacggctataggtgtcgaagcgggcaggaaagttcgtcggcgcgacgatatccccatgatcacgttggcaaccgcgcatcctgcaaagtttcccgaagccgcattaaaggcaggttaccctcgagaacctgagttgcctcatcatatggccgacttgtttcagaatgaagagcgctttactgttttagataacgatatcggccaagttcacgattttgtggttgccaatataacagcttaa

SEQ ID NO: 35158 - protein, 465 aa, marine gamma proteobacterium HTCC2143
MKYISTRGKSPALNFEEVLLTGLAPDGGLYVPETLPKYSQQEIASWAGLSYSDLAFKIVQPFVDDTIPADDLKALIDDTYVDFRHPSIAPLVQLDKNEWVLELFQGPTLAFKDFALQLLGRLLDYVLERSHRKVVIMGATSGDTGSAAIQGCKRCKNIDIFILHPFQRVSEVQRRQMTTVLADNIHNVAVKGNFDDCQSMVKASFNDKSFLPEDRQLVAVNSINWARIMAQIVYYFYASLSLGGPLRPVAFSVPTGNFGDIYAGYLASKMGLPIDQLIVATNTNDILHRCISRNDFTKHPLVHTLSPSMDIVVSSNFERLLFDCYDRDGAAVSDLMTRFQSEDVVLKDSAFSNIQALFDSYQVDDERTVETIAEVYEATEYLLDPHTAIGVEAGRKVRRRDDIPMITLATAHPAKFPEAALKAGYPREPELPHHMADLFQNEERFTVLDNDIGQVHDFVVANITA

SEQ ID NO: 35159 - DNA, 1404 bp, marine gamma proteobacterium HTCC2080
  CDS (1)..(1404): transl_table=11
ttgcccatcaattacattagcactcgtggcggcgcacctgccctcgattttgagggtgtacttctcgcggggcttgccgccgatggggggttgtatgtgcctgagcagttaccgacgttttctagcgagcagataaagtccatgcggggtatggactatccctcgctggcctttgaaattctgaagcccttcgttgaggggtcgattgagtttgatgatttacgtcgattaattgacgaagcctatggaacctttcgccatgacgccatagcgccactcgtgcagcttgaacaaaatcaatgggttcttgagctctttcatggtcccactcttgccttcaaagactttgcgctgcagctgttaggacggctcttagatcacgttctggaacgtcggcaagagcgtgttgtgattatgggcgccacttcgggggataccggctctgccgccattgaggggtgccgacactgtgaatttatcgatatttttatcctgcatcccaacgaccgtgtatcagaggtgcagcggcgccagatgaccacagttctgggtgagaatattcacaaccttgccattgaaggtaattttgacgactgtcaggcaatggtgaaagctagctttgtggccgagccctttctgcctgatgggcgggcgttagttgccgtaaattcaataaactgggccagaattatggcgcagattgtgtattatttttatgcggccctcgctctgggtgcgccagagagaaccgtcaatttttcagtgcctacgggtaactttggcgatatttttgcagggtatttggcccgcagtatggggctgccgatagatcagttggtgatcgcgacaaatcgtaatgatgttcttcatcgcctactgacttccggagaatacgctaagttgcagctagagcagtctatctctccgagcatggatattacggtgtcctcaaattttgagcgcctgatgttcgacctctacgatcgtgatggtgccgttgttagtcagctgatggacgactttcaaaaggggtctattcaactgtctgacacagccatgtccaaagctagagagctatttagtagttactgcgtgtctgatgacgagacttgcgaggaaatcgccgcaatttctgcgcaatgtggctacttactcgatccccacagcgctatcggtacgcttgctgcacgggcttgtcagcgagataccactcagcccatggtaacgcttgcgaccgcccacccagccaagtttccagcggcaattgaggccagtggtattcaacagccggctgaattaccggcgcatttatcggatctcttcgatcgctccgaacggttcaccgtgctgcccaacgatcttgctaccgttcagcaacacatggttgatggtattgctaagtaa

SEQ ID NO: 35160 - protein, 467 aa, marine gamma proteobacterium HTCC2080
MPINYISTRGGAPALDFEGVLLAGLAADGGLYVPEQLPTFSSEQIKSMRGMDYPSLAFEILKPFVEGSIEFDDLRRLIDEAYGTFRHDAIAPLVQLEQNQWVLELFHGPTLAFKDFALQLLGRLLDHVLERRQERVVIMGATSGDTGSAAIEGCRHCEFIDIFILHPNDRVSEVQRRQMTTVLGENIHNLAIEGNFDDCQAMVKASFVAEPFLPDGRALVAVNSINWARIMAQIVYYFYAALALGAPERTVNFSVPTGNFGDIFAGYLARSMGLPIDQLVIATNRNDVLHRLLTSGEYAKLQLEQSISPSMDITVSSNFERLMFDLYDRDGAVVSQLMDDFQKGSIQLSDTAMSKARELFSSYCVSDDETCEEIAAISAQCGYLLDPHSAIGTLAARACQRDTTQPMVTLATAHPAKFPAAIEASGIQQPAELPAHLSDLFDRSERFTVLPNDLATVQQHMVDGIAK

SEQ ID NO: 35161 - DNA, 1662 bp, Aspergillus oryzae
  CDS (1)..(1662)
atgacgagtacagctccgacggaatcccaaaaattcctctccaccagaggtggtgactatggcctctcgttcgagaccgttgtcttgaagggactcgctgcggatggcggtcttttcttgcctcacgaaatcccgaccgcaaacgactggcaaagttggaaagatctctcgtacgccgaacttgccttcaagatcgtcagcctttatatctccccctccgagatccccccggaagacctgaaaggcatcattgaacggagctactcgacattccgcgcagaagatgttgtccccttgacccatctgcaggatgacaacctgtatcttctcgagctattccatggcccaagctactccttcaaagactgtgccttgcaatttctgggaaatcttttcgaataccttctcgtgcggaaaaaccaaggaaaggttggaaaaggtgcgctctttaaagcctctggtgtgtggcgatccagtagaactgaccaactagcagatagacatcatttgacagtcgtcggtgcgacgagcggtgatactggatccgccgcaatctacggtcttaggggcaagaaggacgtgtccgtggtcatcttgcatcccaagggccgcgtcagccctatccaagaggcgcagatgaccacctgcacagacaggaatgtccacaatcttgccgtgacgggaacattcgacgattgccaggatattgtcaaggctatgttcaacgatcctgatagcaaccaggctttgaagctcggtgccgttaactccatcaacttctcgagaatcctcgcccagatcgtgttctacttctacgcctacttccaacttgccagaaagtcgccgacgttcaaagtgggcgacaaggtcagatttgtgactcccaccggaaacttcggcaatatcctcgccggttacttcgcaaccaagatgggtctccccgccgataagctggtcgtggcaacaaatgagaacgatatcctgcaccgcttctggacgactggccgctacgagaagaaccctgttcaggaacagcaggccgatggtaccgtgaaggccgaggcttgcaaggagacaccaagccctgcaatggatattttggtctccagcaacttcgagagactcatgtggttcctcgcaaaagaacaagcagcggcagccggcttggacgacgcgtccagcaagaagagggccggtgaagaggttttggcctggtaccaatcattgaaggcaactggcggcttcgggcctgtagataaggacctgttggaaaacggacggtcgactttcgacagcgaccgtgtgagcaactcagagactgtcgagactatcaagtcttgctaccaggaaaccaaatacgttcttgatccccattcggctgttgcagttaccgtcgcgaagagatcgcttgctaagaatggctcgaacgtccaccacatctcgctctccactgctcaccccgccaaattctctgaggtcgtcgaatcagctctcaagggcgaggccggcttcaacttcgatgagcaggtgcttcctgacgagttcaaggctttcgcgcaaaaggagaccagggtcaccacggttgagaattcgtgggagaaggtccgggagatcgtgaaacgccaagctgaagaggacatcaaggctgaaagcagcgcttaa

SEQ ID NO: 35162 - protein, 553 aa, Aspergillus oryzae
MTSTAPTESQKFLSTRGGDYGLSFETVVLKGLAADGGLFLPHEIPTANDWQSWKDLSYAELAFKIVSLYISPSEIPPEDLKGIIERSYSTFRAEDVVPLTHLQDDNLYLLELFHGPSYSFKDCALQFLGNLFEYLLVRKNQGKVGKGALFKASGVWRSSRTDQLADRHHLTVVGATSGDTGSAAIYGLRGKKDVSVVILHPKGRVSPIQEAQMTTCTDRNVHNLAVTGTFDDCQDIVKAMFNDPDSNQALKLGAVNSINFSRILAQIVFYFYAYFQLARKSPTFKVGDKVRFVTPTGNFGNILAGYFATKMGLPADKLVVATNENDILHRFWTTGRYEKNPVQEQQADGTVKAEACKETPSPAMDILVSSNFERLMWFLAKEQAAAAGLDDASSKKRAGEEVLAWYQSLKATGGFGPVDKDLLENGRSTFDSDRVSNSETVETIKSCYQETKYVLDPHSAVAVTVAKRSLAKNGSNVHHISLSTAHPAKFSEVVESALKGEAGFNFDEQVLPDEFKAFAQKETRVTTVENSWEKVREIVKRQAEEDIKAESSA

SEQ ID NO: 35163 - DNA, 1545 bp, Saccharomyces cerevisiae
  CDS (1)..(1545)
atgcctaacgcttcccaagtttacagatctaccagatccagctctccaaagacaatctcttttgaagaggctatcattcaaggtctggccactgacggtggtcttttcattccaccaactattccacaagtggaccaagccactcttttcaatgattggtcaaagctctccttccaagacttagcctttgctatcatgagactatacattgcccaagaagagattccagatgctgatctaaaggacttgatcaagagatcttattctactttccgttctgatgaagtcacccccttggtgcaaaacgtcactggtgacaaggagaatttgcacattttagaattattccacggtcctacctacgctttcaaagacgttgctttacaatttgtcggtaatctttttgaatacttcttacaaagaaccaacgccaatttacctgaaggcgagaaaaagcaaatcactgtggtcggtgctacttccggtgacactggttctgcagccatctacggtttaagaggcaaaagggacgtttccgttttcatcttatatccaaccggtagaatttccccaattcaagaagaacaaatgaccaccgttccagatgaaaacgtccagactttgtctgttaccggtactttcgacaactgtcaagatatcgtcaaagctattttcggtgacaaagaattcaactctaaacacaacgtcggtgctgttaactccatcaactgggcaagaatcttggcccaaatgacctattacttttattcattcttccaagccaccaacggtaaggactccaagaaggtcaagttcgttgtgccaagtgggaacttcggtgatatattggccggttattttgccaagaaaatgggtttgcctattgaaaaactggccatcgctaccaatgaaaacgacattttggacagatttttgaaatctggtctatacgaaagatcagacaaggttgctgctactttatccccagcaatggatatcttaatctcttctaactttgaaagactactatggtacctagctcgtgaatacctagctaatggtgatgatttgaaagccggtgaaatcgtcaacaattggttccaggaattgaagaccaacggtaagttccaagttgacaaatccatcattgaaggcgcatcaaaggactttacatcagaaagagtttccaatgaagaaacatctgaaacaatcaagaagatctacgaatcatctgtaaatccaaaacattacatcttagatcctcacacagctgtcggtgtttgcgccacagaaagattgattgcaaaagataatgacaagtccatccaatacatttctctatctaccgctcacccagctaaatttgccgatgctgtaaacaatgcattgtctggattttccaattattcatttgaaaaggatgttttgcctgaggaattgaagaaactatccacattaaagaagaaattaaaattcatcgaaagagctgacgttgaattggtcaaaaacgctattgaagaagaacttgctaaaatgaaattataa

SEQ ID NO: 35164 - protein, 514 aa, Saccharomyces cerevisiae
MPNASQVYRSTRSSSPKTISFEEAIIQGLATDGGLFIPPTIPQVDQATLFNDWSKLSFQDLAFAIMRLYIAQEEIPDADLKDLIKRSYSTFRSDEVTPLVQNVTGDKENLHILELFHGPTYAFKDVALQFVGNLFEYFLQRTNANLPEGEKKQITVVGATSGDTGSAAIYGLRGKRDVSVFILYPTGRISPIQEEQMTTVPDENVQTLSVTGTFDNCQDIVKAIFGDKEFNSKHNVGAVNSINWARILAQMTYYFYSFFQATNGKDSKKVKFVVPSGNFGDILAGYFAKKMGLPIEKLAIATNENDILDRFLKSGLYERSDKVAATLSPAMDILISSNFERLLWYLAREYLANGDDLKAGEIVNNWFQELKTNGKFQVDKSIIEGASKDFTSERVSNEETSETIKKIYESSVNPKHYILDPHTAVGVCATERLIAKDNDKSIQYISLSTAHPAKFADAVNNALSGFSNYSFEKDVLPEELKKLSTLKKKLKFIERADVELVKNAIEEELAKMKL

SEQ ID NO: 35165 - DNA, 1308 bp, Xanthomonas campestris pv
  CDS (1)..(1308): transl_table=11
atgatgttcatctctacccgtggcgccgcacctgccgtgagcctgagccaggcgatcgccgccggcctggccccggacggcggcctgtacgtgccgcagaccctgccgccggcgcgcaccctgcaggccggcgcaacgctggccgacacggccaccacactgctgcagccgttcttcgaaggtgacgcgctggcaggcgagctggcggccatctgcgccgaagcgttcgatttcccggcgccgctggtgccgctggccacgccgggcgactacgcgctggagctattccatggccccaccgcggccttcaaagattttggtgcgcggtttctggccgcttgtctgacgcggctgcggcgcgccgaagaccgcccgctgaccattctggtggctacctccggcgataccggcgcggccgtggcggcggcgttccatcggcagcccggcctgcgggtggtggtgctgtatccggatggccgcgtgtcgccccggcaggcgcatcagctgggctgcttcggcgacaacatccaggcattgcgtgtggccggcaccttcgacgactgccaggccatggtcaagcaggccttgaacgatggcgagctgcaggcgcagctgccgctgagttcggccaatagcatcagcctggggcggctgctgccgcagatgagctactacgcgcacgcagcgctgcagcaccacgctggctccggggccgcattgaacctggtggtgcccaccggcaacctgggcaacggcctggccgcgatcctggcacgcgcgctcggcgtgccgctgggccagatcgtgctggcgtccaacgccaaccatgtgttgcccgactacttcgccggcgacgactacgcaccgcaacccagcgtggccaccgtggccaacgcgatggacgtgggtgcacccagcaatttcgaacgcctgcgttggctgtatgacggcgacgatgcggccctgcgcgaggcgttccgtgcgctgtcggtggatgacacggcgatccgccataccgtgcagcaacgcttcgcacgctacggcgaggtgcattgcccgcataccgccaccgccgtgcacgtactggagcaattgcgcgcggaaggggtcgagggcggcaccggcgactgggcggtggcggccacggcgcacccggccaagttcgaggcggtggtggagccactgatcggccgcgcggtggagattccgccggcgctggcggcgctgttgcagcgtccggcgcatgccgaaccgctggcaccggactacctggcgttccggcagcgtctgctcgcggatgcgccctga

SEQ ID NO: 35166 - protein, 435 aa, Xanthomonas campestris pv
MMFISTRGAAPAVSLSQAIAAGLAPDGGLYVPQTLPPARTLQAGATLADTATTLLQPFFEGDALAGELAAICAEAFDFPAPLVPLATPGDYALELFHGPTAAFKDFGARFLAACLTRLRRAEDRPLTILVATSGDTGAAVAAAFHRQPGLRVVVLYPDGRVSPRQAHQLGCFGDNIQALRVAGTFDDCQAMVKQALNDGELQAQLPLSSANSISLGRLLPQMSYYAHAALQHHAGSGAALNLVVPTGNLGNGLAAILARALGVPLGQIVLASNANHVLPDYFAGDDYAPQPSVATVANAMDVGAPSNFERLRWLYDGDDAALREAFRALSVDDTAIRHTVQQRFARYGEVHCPHTATAVHVLEQLRAEGVEGGTGDWAVAATAHPAKFEAVVEPLIGRAVEIPPALAALLQRPAHAEPLAPDYLAFRQRLLADAP

SEQ ID NO: 35167 - DNA, 1311 bp, Xanthomonas axonopodis pv
  CDS (1)..(1311): transl_table=11
atgctgatgtttatctccacccgtggcggtgcccccgccgcaagcctgagccaagccattgccgccgggctggcgcccgatggcggcctctacgtgccgcagaccctgccacctgcccgtacgctggttgcgggcgccggcctggccgacaccgccactgcgctgttgcagccatttttcgagggcgacgcactggcggccgaactgcctgccatctgtgccgaagccttcgatttcccggcgccattggtggcgctgggtacgccgggcgattacgcgctggagctgtttcatggccccacggcggcgttcaaggatttcggtgcgcgcttcctggctgcctgcctgacccgcttgcgccgcgctgaagaccgcccgctcaccatcctggtcgccacctccggcgacaccggcgccgccgtggccgccgcgttccatcgccagcccggcctgcgcgtggtggtgctgtatccggacggccgcgtgtcgccgcggcaggcgcatcagttggggtgtttcggcgacaacatccaggccctgcgcgtggccggctcgttcgacgactgccaggcgatggtcaagcaggccttgaacgatgccgcgttgcagacgcaggtgccgctgagttcggccaacagcatcagtctgggccggctgctgccgcagatgagttactacgcgcatgccgccctgcagcatcatgcggcgtcgggcagcgtgctcaatctggtgatacccaccggtaacctgggcaacgcgctggcggcgatcatcgcgcgcgcgctcggggtgccgttgggccgcatcgcgctggcgtccaacgccaatcacgtgttgccggactatttcgcgggcgatgcctacgcaccgcagcccagcgtgtccaccctggccaatgcgatggacgtgggcgcgccgagcaacttcgagcggctgcggtggctctacaacggcgacgatgccgccttgcgtgaggaattccgggccttgtcggtggacgatgcggcgattcgcaacaccgtgcagcagcgcttcgcgcgctacggcgaggtgcattgcccgcataccgccaccgcggtgcatgtgctcgaacaactgcgtgccgaaggcgcggagggcggcactggcgactgggcggtagcggccaccgcgcatccggcaaagttcgagggcgtggtggagccgctgattggccgttccgtagaggttccgccggcactggccgcactgctgcagcgcccagcgcatgccgaagcactggcgccggactacgccgcccttcggcagcgcttgcttgccgatgccacctga

SEQ ID NO: 35168 - protein, 436 aa, Xanthomonas axonopodis pv
MLMFISTRGGAPAASLSQAIAAGLAPDGGLYVPQTLPPARTLVAGAGLADTATALLQPFFEGDALAAELPAICAEAFDFPAPLVALGTPGDYALELFHGPTAAFKDFGARFLAACLTRLRRAEDRPLTILVATSGDTGAAVAAAFHRQPGLRVVVLYPDGRVSPRQAHQLGCFGDNIQALRVAGSFDDCQAMVKQALNDAALQTQVPLSSANSISLGRLLPQMSYYAHAALQHHAASGSVLNLVIPTGNLGNALAAIIARALGVPLGRIALASNANHVLPDYFAGDAYAPQPSVSTLANAMDVGAPSNFERLRWLYNGDDAALREEFRALSVDDAAIRNTVQQRFARYGEVHCPHTATAVHVLEQLRAEGAEGGTGDWAVAATAHPAKFEGVVEPLIGRSVEVPPALAALLQRPAHAEALAPDYAALRQRLLADAT

SEQ ID NO: 35169 - DNA, 1644 bp, Cryptococcus neoformans
  CDS (1)..(1644)
atggcccaggaaatgagatacttttccacaagaggtggcaaggagaccctatccttcgaggacgccgtcttgaccggtctcgcccccaacggaggtctctacatccccacccacatccctgcccttcccaaggactggaagaccaagtgggccggtctttcgttcccagagctctcccacgaaatcctctctcttttcgtccccacctctgtcattccctccgacgacctccagtcaatcatcaacactgcctacagctccttccgatcccccgccactacgcccatcaggcagactggtgacaatgaatacgttctcgagctttggcatgggcccacatgggcttttaaggacgtggcccttcagttcttgggagagttgttcaggtactttttggagaggaggaacaaggacaagactgaggatatggaagaattgaccgttgtcggtgctaccagtggcgacacaggaagtgctgccatctacggtctccgatccaagccttccatcaccatcttcatcctctaccccgacggccgagtgtcccctatccaggaggcacaaatggccactgtccccgacgccaatgtctactgcgtcgctgttgaggactctgattttgacacttgtcagagcatcgtcaagaccctcttttcggacgcccagttcaacgccactcaccgtctcggtgctatcaactcgatcaactgggcccgtatccttgctcaaatcgtctactacttctccgcctacttccagcttcccgaagaggccaggaaggacggtgcaaagcttcaattcgtagtgcccactgggaactttggtgacattcttgctggctggtacgccaagaagctcggcctgcccatggagcaactcgtcgtcgcgaccaacgagaacgacattctcgagcgtttcttcaggaccgggaggtacgaggctgatgacgctgtgcaacaagaccagactgccgagactgctgctgtcaacggctctagcgacgggcagcaggctgtcagcgccgtcaaggcgactcactctcccgctatggacatcctcctttcttccaactttgagaggctcttgtactaccttgcgcttgagaccaacggcaccgagggctccgatgaggagaagaggttcaaggctcaggagaggttgaacgactggatgagcactttgaagaaggatggcaaggtcgatcttggagaggatgtgaggcaggctgctggcaaggacttttgggccgaaagggtatctgacggtcagacgctcgaggagattcaaaagtactacaggcgtgagaagtacggtccttatgtcgtcgacccccaaaccgccgtcggccttaccgctcaggagcgctctgccaagaaggcttcccccgacaccacttggatcactctctccactgcgcaccccgcgaaattctctggtgctgttgagctcgctctctcagcctccgagttccccgattttgactttcgacgggatgtgctcccggacgagctcaagaagctggagggtctcgagaagcgagtacacagagtcaagggcgaggagggtgtgcgtgcgctgattgaaaaggtgaagagtgcgagccatgaaaaagtggatgcggaagagggacgagggtctctttaa

SEQ ID NO: 35170 - protein, 547 aa, Cryptococcus neoformans
MAQEMRYFSTRGGKETLSFEDAVLTGLAPNGGLYIPTHIPALPKDWKTKWAGLSFPELSHEILSLFVPTSVIPSDDLQSIINTAYSSFRSPATTPIRQTGDNEYVLELWHGPTWAFKDVALQFLGELFRYFLERRNKDKTEDMEELTVVGATSGDTGSAAIYGLRSKPSITIFILYPDGRVSPIQEAQMATVPDANVYCVAVEDSDFDTCQSIVKTLFSDAQFNATHRLGAINSINWARILAQIVYYFSAYFQLPEEARKDGAKLQFVVPTGNFGDILAGWYAKKLGLPMEQLVVATNENDILERFFRTGRYEADDAVQQDQTAETAAVNGSSDGQQAVSAVKATHSPAMDILLSSNFERLLYYLALETNGTEGSDEEKRFKAQERLNDWMSTLKKDGKVDLGEDVRQAAGKDFWAERVSDGQTLEEIQKYYRREKYGPYVVDPQTAVGLTAQERSAKKASPDTTWITLSTAHPAKFSGAVELALSASEFPDFDFRRDVLPDELKKLEGLEKRVHRVKGEEGVRALIEKVKSASHEKVDAEEGRGSL

SEQ ID NO: 35171 - DNA, 1431 bp, Methylobacillus flagellatum
  CDS (1)..(1431): transl_table=11
atgagatatatttccacccgcgggcaatcgcccgcacagtcgtttactgaaatcctgcttggcggcctggcgcccgatggcggcctctatttgcccgagcaatatccgcaattcagccaggacgagctgaatgcgatgcgcggcatgcattaccgcgacctggcgttcaccatcctctcgcgcctgatcgatgatattcctgctgctgctgctgacctgcgcgccattatcgacaagacctatcgtgcggatgtctatgcctatgcgcgcgctggacagaatgccgaggacatcactcccacgctcaagctggaggacgacctctacctgctgtccttgtccaatggcccgaccctggcattcaaggacatggcgatgcagttgcttggcaacctgttcgaatatatgctggcgcagaaaggcgagacgatcaatatcctcggcgcaacttccggagacaccggttctgctgcggaatacgccatgcgcggcaagcagggtgtcaaggtgttcatgctctcgccttaccagaagatgagccgtttccagactgcgcagattgtcagcctgcaggatgacaatatttacaatatcgcggtcaagggcgtgttcgacgattgccaggacatcgtcaaggccgtgtccaatgaccatgccttcaaggcaaagaacaagatcggcgcagtaaactccatcaactgggcgcgtgtggcggcccaggtggtgtattacttcaagggttactttgccgtcaccgcggacaatgcgcagcgggtcagcttcgccgtgccttccggcaacttcggcaacgtctgtgccgggcatatcgcccgcatgatgggcttgccgattgccaagctggtagtggcgaccaacgaaaacgatgtgctggacgaattcttcaagaccggtgtctatcgtccgcgcggttctgccaatacttaccacacctccagtccttccatggatatttccaaggcatccaatttcgagcgcttcgtcttcgatctggtgggccgttatgcggccaaggtgcgtgagctgtggggcaaggtagatgcgggtggcagcgtcgacctcaatgaaggcggttggtttgccaaggtggcggattacggctttgtctccggcagcagcaaccacgccaacggcatgcagaccatcagggtgacccatgagcgctatggcgtcaccatcgatacccataccgccgatggtctcaaggtggcgttggagcagcgcagggcgggcattccgatgctggtacttgaaaccgcgttgccggccaaattcgaggatgcgattgtcgaggcgctgggccagaagccgaacgcccgcacagcctggaggcttggaagcctgccgcagcgctttgaggtgatggaggccgatgtggccgctatcaagcagttcattgtcgagcatgtttga

SEQ ID NO: 35172 - protein, 476 aa, Methylobacillus flagellatum
MRYISTRGQSPAQSFTEILLGGLAPDGGLYLPEQYPQFSQDELNAMRGMHYRDLAFTILSRLIDDIPAAAADLRAIIDKTYRADVYAYARAGQNAEDITPTLKLEDDLYLLSLSNGPTLAFKDMAMQLLGNLFEYMLAQKGETINILGATSGDTGSAAEYAMRGKQGVKVFMLSPYQKMSRFQTAQIVSLQDDNIYNIAVKGVFDDCQDIVKAVSNDHAFKAKNKIGAVNSINWARVAAQVVYYFKGYFAVTADNAQRVSFAVPSGNFGNVCAGHIARMMGLPIAKLVVATNENDVLDEFFKTGVYRPRGSANTYHTSSPSMDISKASNFERFVFDLVGRYAAKVRELWGKVDAGGSVDLNEGGWFAKVADYGFVSGSSNHANGMQTIRVTHERYGVTIDTHTADGLKVALEQRRAGIPMLVLETALPAKFEDAIVEALGQKPNARTAWRLGSLPQRFEVMEADVAAIKQFIVEHV

SEQ ID NO: 35173 - DNA, 1539 bp, Ashbya gossypii
  CDS (1)..(1539)
atgtctcaagtttaccgctcgactcgctcgtcgtcggaggacactaaatcgttcgaagaggctgtgatccaaggcctcgccgaggacggcgggctgttcttgcctgctgtgatccccagactcagggaggagacgctgttcgagcactgggcgcacctgtcgttccaggacttggcgatggagatcatgaagttctacattgcggactgggagatccctgcgccagagctgcgggagctgatcgagcggtcgtacagctcgttccggtcggaggaggtgacgccgctgcgcaagaacgtgacgggcgacgacgagaacctgcacattctggagctgttccacgggcccacctacgcgttcaaggacgtggcgctgcagttcgtgggtaacctgttcgagtacttcctggagcgtaagaaccgggacgtgtctgaggaagagcgcacgcacctgactgttgtgggcgccacgtccggggacaccgggtctgcggcgatctacgggcttcgcggcaagcaggacgtgtctgtcttcatcctgtaccctcatgggcgcatctctccgatccaggaagagcagatgaccactgtggaggacgagaacgtgcacactatggcgatcgagggctccttcgacaactgccaggacatcgtgaagtctatcttcgtggacgaggagttcaaccggaagcacaacatcgctgccgtcaactccatcaactgggcgcgcatcctagcccagatcacctactacttctactcttacttcagagcgaccgacggccagccggggcgtgtgaagttcatcgtgccatctggtaacttcggcgacatcctagccggcttctacgccaagcagatggggcttccaattgagaagctggtcattgccaccaacgaaaacgacatcctcgacagattcttgagagagggtgtgtacgagagatccgaggacgtcacagccacgcactctccagccatggatatcttggtctcttccaacttcgagagactgctatggttctttgcccgcgagcagcttgctcagggtgacgaccaagaggctggttcaattgtcaacagatggtttgagcagttgagagaggagcgccgctttgacgtgccagagcacctcctagacgctatcagataccacttcgactctgagcgtgttgacaactacaacactctcgccagtatcagacacatctacgagcacgctcagaaccctgagagatacgtcattgacccacacacggctgtcggtatctgtgcggcgaacagacagatcgctcatgaccaaaacaacgaaatccactacatttcgcttgccactgctcacccagcgaagtttgcggacgctgtgaacgaagctctctcctcttacgatgactacaacttcgatgacgttcttccagaccgtctaagacgtctaggtgaccttgagaagagaattaagtacgtggacaacaccgacgttgatgttatcaaatctatcattgaggaggaactgattaacatgggcatttacaatccatag

SEQ ID NO: 35174 - protein, 512 aa, Ashbya gossypii
MSQVYRSTRSSSEDTKSFEEAVIQGLAEDGGLFLPAVIPRLREETLFEHWAHLSFQDLAMEIMKFYIADWEIPAPELRELIERSYSSFRSEEVTPLRKNVTGDDENLHILELFHGPTYAFKDVALQFVGNLFEYFLERKNRDVSEEERTHLTVVGATSGDTGSAAIYGLRGKQDVSVFILYPHGRISPIQEEQMTTVEDENVHTMAIEGSFDNCQDIVKSIFVDEEFNRKHNIAAVNSINWARILAQITYYFYSYFRATDGQPGRVKFIVPSGNFGDILAGFYAKQMGLPIEKLVIATNENDILDRFLREGVYERSEDVTATHSPAMDILVSSNFERLLWFFAREQLAQGDDQEAGSIVNRWFEQLREERRFDVPEHLLDAIRYHFDSERVDNYNTLASIRHIYEHAQNPERYVIDPHTAVGICAANRQIAHDQNNEIHYISLATAHPAKFADAVNEALSSYDDYNFDDVLPDRLRRLGDLEKRIKYVDNTDVDVIKSIIEEELINMGIYNP

SEQ ID NO: 35175 - DNA, 1290 bp, Buchnera aphidicola subsp
  CDS (1)..(1290): transl_table=11
atgaaactttacaatttaaaaaaccataacgaacaagtaaattttgaagcagccgtaaaattaggattaggtcagcaacaagggttgtttttccctgtagaattacctactattactcctattgaattatcaaaaatattaaaaatggattttattactcgtagtactgaaatactttctaaattcatttgtcatgaaatatctaaagaagaactatataaacatgttaaacaagcattttcatttaaacatccattaaaaataaaaattacaaaagatatacattgcttcgaactgtttcacggtccaacattggcgtttaaagattttggagctcgttttatggctcaaatgatattattactaaataaaaaaaatgaatcagttactattttaactgcaacatcaggtgatacaggtgcagcggtagcaaatgcattctatggaatgaaaaatgtgcgagtaattattttatatcctaaaggcaagatcagtgaattacaagagaaattattttgtactttaggtagaaatataaaaactatatcaattaatggtagttttgacgattgtcaaaaattagtaaaagaagcttttaacgataaaaaactgaaagaatcaataggattaaattcagctaattcaattaatataagtagattattagcacaaatctgttattattttgaagctttctctttaatttcagaagaacaaagaaaaaatttagtaatagcagttccatgcggtaattttggaaatttaacagctggattattatctaaatctcttggtttgccaatcaaatcatttatagcatgtacgaatgcgaatgataccgtaccaagattccttaataatggtacgtggaatcctaaaaaaactgtatctacaatttctaatgctatggatatcagtcaacctaataattggactcgaattgaagaattattttatcgaaaaaaatgggatttaaaaaaacttaggtttggaagtgtatcggatcatactacagaagaaacattaaaagaactatttaaattaggttatgtttctgaacctcatgcagcaatagcatatagattgttgcgagatcaattaaaagaaaatgaatttggcttatttttaggcaccgctcatccggctaaatttaaaaatactgtagaaaaaatattaaaaaataaaatttcactgccttctgaactacaaaatagaattgatttaccattattatctcataatattaaccctgtttttagtaaattaaaaacgtttttattagaaaaataa

SEQ ID NO: 35176 - protein, 429 aa, Buchnera aphidicola subsp
MKLYNLKNHNEQVNFEAAVKLGLGQQQGLFFPVELPTITPIELSKILKMDFITRSTEILSKFICHEISKEELYKHVKQAFSFKHPLKIKITKDIHCFELFHGPTLAFKDFGARFMAQMILLLNKKNESVTILTATSGDTGAAVANAFYGMKNVRVIILYPKGKISELQEKLFCTLGRNIKTISINGSFDDCQKLVKEAFNDKKLKESIGLNSANSINISRLLAQICYYFEAFSLISEEQRKNLVIAVPCGNFGNLTAGLLSKSLGLPIKSFIACTNANDTVPRFLNNGTWNPKKTVSTISNAMDISQPNNWTRIEELFYRKKWDLKKLRFGSVSDHTTEETLKELFKLGYVSEPHAAIAYRLLRDQLKENEFGLFLGTAHPAKFKNTVEKILKNKISLPSELQNRIDLPLLSHNINPVFSKLKTFLLEK

SEQ ID NO: 35177 - DNA, 1290 bp, Buchnera aphidicola subsp
  CDS (1)..(1290): transl_table=11
atgaaactctataatttaaaaaaccataacgaacaagtaaattttgaaactgccgtaaaacttggattaggacagaaacaaggtttgttttttccagtaaaattaccaattatgactcctgtagagttatcaaaaatattaaaaatggattttattacacgaagtactgaaatactttctaaatttattagtagtgaaatttctaaagaagtattgcatgaacatgttaaaaaagcattttcattttcaaaaccattaaaaatttgtattaataagaatataagctgttttgaactatttcatggcccaacattagcatttaaagattttggggcacgttttatggctcaaatgatactatgtcttaataaaaaaaatgaatcttttacgattttgacagcaacgtcaggagacaccggagctgcagttgctcatgctttttatggaatgaaaaacattcgagtaattattttatatccaaagggaaaaatcactctattacaagaacaattattttgtactttagggaaaaatataaaaactatttctattaacggtagttttgacgattgtcaaaaattagtcaaaaaagcctttgatgataaaaaattaaaagaatcaataggattaaattctgctaattctattaatataagtcgtttattagcccaaatatgctattattttgaagctttttcattgatttctgaagaaaaaagaaaaaatttagttatagccgttccatgcggtaactttggtaatttaacagctggtttattagccaaatctcttggtttgccaattcaatcatttattgcatgtactaattctaatgatacagttccaagatttctgaatagtggaaaatggaatcctaaaaaaactgtatcaacaatttctaatgctatggatattagttgccctaataattggccccgaattgaagaattatttcgtcgtaaaaaatgggatttaaaagaattaagattcggaagtgtatcagataatgttactaaagagactcttaaagagttatttcgaatgggttatgtatccgaaccacatgctgcaattgcctacaggctattgcatgatcaattaaaaaaagaagaattcggtttgtttttaggaactgcacatccgtctaaatttaaagatactgtagaaaaaatattagaaaacagtatttctttaccaaaagaattgaaaaatagaaataatttaccattattatcccataatattaatcctgattttaataaattaaaagaatttttattagaaaaataa

SEQ ID NO: 35178 - protein, 429 aa, Buchnera aphidicola subsp
MKLYNLKNHNEQVNFETAVKLGLGQKQGLFFPVKLPIMTPVELSKILKMDFITRSTEILSKFISSEISKEVLHEHVKKAFSFSKPLKICINKNISCFELFHGPTLAFKDFGARFMAQMILCLNKKNESFTILTATSGDTGAAVAHAFYGMKNIRVIILYPKGKITLLQEQLFCTLGKNIKTISINGSFDDCQKLVKKAFDDKKLKESIGLNSANSINISRLLAQICYYFEAFSLISEEKRKNLVIAVPCGNFGNLTAGLLAKSLGLPIQSFIACTNSNDTVPRFLNSGKWNPKKTVSTISNAMDISCPNNWPRIEELFRRKKWDLKELRFGSVSDNVTKETLKELFRMGYVSEPHAAIAYRLLHDQLKKEEFGLFLGTAHPSKFKDTVEKILENSISLPKELKNRNNLPLLSHNINPDFNKLKEFLLEK

SEQ ID NO: 35179 - DNA, 1293 bp, Buchnera aphidicola subsp
  CDS (1)..(1293): transl_table=11
atgaaattatataatttaaaaaaaaaacaagatcaagtaaatttttcaaaagctgtaaaactcggtttaggaaaaaaccaaggtcttttttttcctaaagaactacctattcttacaaaagaacaattatataaattattaaaaatggattttttaactcgaagcagcaaaattttatccatgtttataggagatgaaattcattactctgaattaactaaacggattaaaaacgcgttctcatttactactcccaaaatagtatctatatccaaaaacattgcctgctttgaactatttcatggacctaccttagcttttaaagactttggtgcaagattcatggctcaaatattatcattcttaaatcatgacaaaaatgatactattactatcttaacagctacgtcaggagatacaggagctgcagtagctcatgcattttttaagatgaaaaatgttagagtgataatcttatatcccaaaggaaaaattagcgaattacaagaaaaattgttttgtacattaggtgaaaacataatcactattgctgttaatggaagttttgatgaatgtcaaaaattagttaagcaagcttttaacgatgatcaactcagaatagaaacaggactaaactcagcaaattctataaatatcagccgattattagcgcaaatttgttattattttgaagcgtttgctttacttacaaaaaaacaacaaaaaaatttagtaatatctgtaccatgtggtaattttggaaatttaactgcaggactcttagcaaaagcgttaggtttacctatcaaatcattcattgcatctacaaattcaaacgatacagttccgagatttcttaaaactggattctggaaacctaacaatactgtatctactatttctaatgctatggacattagtcaaccgaataattggccacgagtagaagaattatttaaaagaaaattttggtcattaaaaacactaaaatacggaagtgtatccgatatcttaacaaaaaaaagtttaaaaaaactagcgtttttaggatacgtttcagaacctcatgcagctgtagcatactacacattaaaaaacaaacttaaacaaaatgaatttggtttatttttaggtactgcacatcctgcaaaattcaaaaaaactatcgaaaaaatattacaaataacattatttttaccatcaaaactacgcaatcaaataaaactaccactactttctcataatataaggccagatttttcaaaactcaaaaaatttttactagaaaaataa

SEQ ID NO: 35180 - protein, 430 aa, Buchnera aphidicola subsp
MKLYNLKKKQDQVNFSKAVKLGLGKNQGLFFPKELPILTKEQLYKLLKMDFLTRSSKILSMFIGDEIHYSELTKRIKNAFSFTTPKIVSISKNIACFELFHGPTLAFKDFGARFMAQILSFLNHDKNDTITILTATSGDTGAAVAHAFFKMKNVRVIILYPKGKISELQEKLFCTLGENIITIAVNGSFDECQKLVKQAFNDDQLRIETGLNSANSINISRLLAQICYYFEAFALLTKKQQKNLVISVPCGNFGNLTAGLLAKALGLPIKSFIASTNSNDTVPRFLKTGFWKPNNTVSTISNAMDISQPNNWPRVEELFKRKFWSLKTLKYGSVSDILTKKSLKKLAFLGYVSEPHAAVAYYTLKNKLKQNEFGLFLGTAHPAKFKKTIEKILQITLFLPSKLRNQIKLPLLSHNIRPDFSKLKKFLLEK

SEQ ID NO: 35181 - DNA, 1278 bp, Haemophilus influenzae
  CDS (1)..(1278): transl_table=11
atgaatttatacaatatcaaacacccagaagaacaagtcactttttctcaggctgttcgtcaaggtcttgggcgggatcaaggtctattctttccagaagttattcctcaacttaataacattaatgaattacttgaattgcctcttgttgagcgtagtcaaaaaattctaggtgcattaattgatggcgagttaccacaagcaacgttagatgcgatggtgaaaaatgcattcacttttcctgcaccgttagaaaaagtggaagaaaatatttatgcacttgaattatttcacggtccaacgctagcatttaaagattttggtgggcgttttatggcacaggcacttgctgcggtacgtggcgatggcaaaattactattttaacggctacgtctggcgatactggagccgctgtagcacatgcgttttatggattagaaaatattaatgtagttatcctttatccaaaaggcaaaatcagcccattgcaagaaaagctgttctgtactttaggtgggaatattcgtactgttgcgattaacgctgatttcgatgcgtgtcaggctttggttaagcaagcctttgatgatgttgaattgcgccaagctatcgggcttaactctgcaaattctattaatatcagccgtttattagctcaagtttgttattactttgaagctgtcgcacaattgccaaaagaaaaacgtgataatgtcgtggtttctgtgccaagtggtaattttggtaacttaactgcgggattaattgcaaaaaccttaggcttgccaataaaacgctttgtcgcctcaacaaacgcaaatgatactgtgccacgttatttgaaatcgggtaattgggatcctaaaacgacagttgcaaccctttctaatgcaatggatgtaagtcgcccaaataattggccaagagtggaggaattgtttaaacgaaatggttgggatttaactgatttaggttcggggatgctaagtgatagcgaaacagaagataccttaaaagcgatgcagtcgaaaggttatttatgtgaacctcacggtgcgatagcttatcaggtgttgaaagatcaacttaaagcgagtgaaacaggaatcttcctgtgtacggcgcatcctgcgaaatttaaagaatccgtagaacgtattcttggtattcagcttccattacctgaaacactggataaacataatcagctaccattgctttcagatgaaatggataatgattttgcacaactacgggcttacttattgaagtcataa

SEQ ID NO: 35182 - protein, 425 aa, Haemophilus influenzae
MNLYNIKHPEEQVTFSQAVRQGLGRDQGLFFPEVIPQLNNINELLELPLVERSQKILGALIDGELPQATLDAMVKNAFTFPAPLEKVEENIYALELFHGPTLAFKDFGGRFMAQALAAVRGDGKITILTATSGDTGAAVAHAFYGLENINVVILYPKGKISPLQEKLFCTLGGNIRTVAINADFDACQALVKQAFDDVELRQAIGLNSANSINISRLLAQVCYYFEAVAQLPKEKRDNVVVSVPSGNFGNLTAGLIAKTLGLPIKRFVASTNANDTVPRYLKSGNWDPKTTVATLSNAMDVSRPNNWPRVEELFKRNGWDLTDLGSGMLSDSETEDTLKAMQSKGYLCEPHGAIAYQVLKDQLKASETGIFLCTAHPAKFKESVERILGIQLPLPETLDKHNQLPLLSDEMDNDFAQLRAYLLKS

SEQ ID NO: 35183 - DNA, 1461 bp, Helicobacter pylori
  CDS (1)..(1461): transl_table=11
atgccttttgtccccacccgttctttgaaagaaaaaaagattgattttattgaagcaatattaaaccccaacgccccaaaaggcgggctttacactttagagcgttttgaaacattacaatggcaagattgtttgaatctgagctataacgatctagtggaatgcgtgtttgagcggttgggtttagaaatccctaaaaatttactggcaagcgctttaaaacgctatgaaaattttgataaccctaaaaatccagcccctatttttgcgctcaatgaaaggctttttgtccaagaactctaccatgggcctagtttggcgtttaaagacatggcgttgcagcctttagcgagcttgttttctaatctagcggtaggaaaaaatgaaaagtatttaatgctcgtttccacgagtggtgataccggccctgcgactttagaaagtttggcaggcatgcctaatgtttttgtggtgtgtttataccccaaagacggcacaagtttggtccaaaaactccaaatggttacccaaagcgctagcaatttaaaagtctttgggatcagtggggattttgatgatgcgcaaaacgcgctcaaaaaccttttaaaagacgatgattttaacgaggctttaaaagcgtgccaattgaaattaagcgtggctaattccgtgaattttgggcgcatcgcttttcaaatcgtctatcatatttggggctttttggaattgtataaaaaaggcgcgatcaattctaaagaaaaaatcaccctagccatacctagcggtaattttgggaacgctttaggggcgttttatgccaaaaaaatgggtttgaatattgataaaatcaaggtcgtaaccaacagcaatgatgttttaagggagtttatagagacagggcgttacgatttaacccatcgttctttaaagcaaacttactcgccggctatggatattttaaaaagctctaatgtggaaagggcgctttttagcctttttgggtttgaacgcacgctagaattgatgcaagctttagaagaagagaaattttatgccttaaaacctaaagaattggcccttttacaggagcatttttcttgcgcgagctgctcagatgaagcttgtttgaaaacgatccaagaagtttatgcagagcaccaatacctgattgaccctcataccgccaccgctttaaacgctagcttgaaaacccacgaaaaaacccttgtttccgccaccgcctcttatgagaaattccctagaatcacccttttagccctaaacgagcaaaagaaaaacgataacgataaggccgccctagaaacgcttaaaaacagctacaataccccggatagccaacgccttgatgatttgtttgaaagagggatcaagcaccaagaagttttaaaactcaatgagatcaaatcttctattcttttgtggctagaaagcctacattaa

SEQ ID NO: 35184 - protein, 486 aa, Helicobacter pylori [sequence omitted]

SEQ ID NO: 35185 - DNA, 1428 bp, Methylobacillus glycogenes
  CDS (1)..(1428): transl_table=11
atgaaatacatttccacccgcgggcaatcgcctgcactgtctttctctgaaattctgcttggcggcttggcgcctgatggcggcttgtatttgcccgagcaatacccgcagtttagcgctgacgcactgagcgcgatgcgcggcatgaattaccgcgacctggcgttcaccatcctctcgcgtctgatcgacgatattcccgctgacgacctgcgcatcatcgtcgacaagacctatcgcgcggatgtatatgcctatgctcgcccgggccaggatgccgaagacattacgccgacctataagctggaggacgacctctacctgctttccctgtccaatggcccaaccctggcgttcaaggatatggcgatgcagttattgggcaacctgttcgaatacgtgttggcgcaaaagggcgagacgactaatattctcggcgcgacctccggcgataccggttctgcggcggaatacgccatgcgcggcaagcagggcgtcaaggtgttcatgctctcgccgcaccagaagatgagccgtttccagaccgcacagatgttcagcctgcaagacgacaatatcttcaatatcgcggtcaagggcgtgtttgacgactgccaggacatcgtcaaggccgtgtcgaacgaccatgctttcaaggccaagaataagatcggtgccgtgaattccatcaactgggcacgcgtggctgctcaggtagtgtattacttcaagggttatttcgccgtcactgcggataatgcgcagcaggtcagctttgccgtgccttccggcaacttcggcaatgtctgtgccgggcatatcgcccgcatgatgggcttgccgattgccaagctggtggtagcgaccaacgaaaacgacgtgctggatgagttcttcaaaactggcgtctaccgtccgcgcggctccgccaatacctaccatacttccagcccctccatggatatttccaaggcctccaatttcgagcgtttcgtcttcgacctagtgggccgtgacgccgccaaggtgcgcgagctatggggcaaggtggatgcgggcggcagtttcgaccttaacgacggtggctggtttgccaaggtagcggattacggcttcgtttccggcagcagcaaccatgccaaccgcatgcagaccatcaaggcgacgcatgagcgctacggtgtcaccattgatacccacaccgcggacggtctcaaggtggcgctggaacaccgcgaggcaggtaccccgatgctggtgctggaaaccgcattgccggccaaattcgaggacgcgattgtcgaggcgttagggcataaacccgagcgtccgcacagcctggaaggcctggaatccctgcctcagcgctttgaggtgatggaggccgatgcagccgtcatcaaacagttcattgttgagcatatttga

SEQ ID NO: 35186 - protein, 475 aa, Methylobacillus glycogenes
MKYISTRGQSPALSFSEILLGGLAPDGGLYLPEQYPQFSADALSAMRGMNYRDLAFTILSRLIDDIPADDLRIIVDKTYRADVYAYARPGQDAEDITPTYKLEDDLYLLSLSNGPTLAFKDMAMQLLGNLFEYVLAQKGETTNILGATSGDTGSAAEYAMRGKQGVKVFMLSPHQKMSRFQTAQMFSLQDDNIFNIAVKGVFDDCQDIVKAVSNDHAFKAKNKIGAVNSINWARVAAQVVYYFKGYFAVTADNAQQVSFAVPSGNFGNVCAGHIARMMGLPIAKLVVATNENDVLDEFFKTGVYRPRGSANTYHTSSPSMDISKASNFERFVFDLVGRDAAKVRELWGKVDAGGSFDLNDGGWFAKVADYGFVSGSSNHANRMQTIKATHERYGVTIDTHTADGLKVALEHREAGTPMLVLETALPAKFEDAIVEALGHKPERPHSLEGLESLPQRFEVMEADAAVIKQFIVEHI

SEQ ID NO: 35187 - DNA, 1410 bp, Pseudomonas aeruginosa
  CDS (1)..(1410): transl_table=11
atgcgttacatcagcacccgcggccaagcgcccgccctgaacttcgaagatgtcctcctcgccggcctggccagcgacggcggcctctacgtcccggaaaacctgccacgcttcaccctcgaggagatcgcctcctgggtcggcctgccctaccacgagctggccttccgggtgatgcgcccgttcgtcgccggcagcatcgccgatgccgacttcaagaagatcctcgaggaaacctatggcgtcttcgcccatgacgcagtggcgccgctgcgccagttgaacggcaacgaatgggtgctggagctgttccacggcccgaccctggccttcaaggatttcgccctgcaactgctcggccgcctgctcgaccatgtgctggccaagcgcggcgagcgtgtggtgatcatgggggccacctccggcgataccggctccgcggccatcgaaggctgccgccgttgcgacaacgtcgacatcttcatcatgcacccgcacaaccgcgtgtccgaggtgcagcgccggcagatgaccaccatcctcggcgacaacatccacaacatcgccatcgaaggcaacttcgacgactgccaggagatggtcaaggccagcttcgccgaccagggcttcctcaagggtacccgcctggtagcggtgaactcgatcaactgggcgcggatcatggcccagatcgtctactacttccatgccgcgctgcagctcggcgcgccgcatcgctcggtggcgttctcggtgccgaccggcaacttcggcgacatcttcgccggctacctggcgcgcaacatgggcctgccggtcagccagctgatcgtcgcgaccaaccgcaacgacatcctgcaccgcttcatgagcggtaatcgctacgacaaggacaccctgcatccctcgctgtcgccgtcgatggatatcatggtctcgtccaacttcgaacgcctgctgttcgacctgcacggccgcaacggcaaggccgtcgccgaactgctggatgccttcaaggccagcggcaagctgtcggtggaagaccagcgctggaccgaggcgcgcaagctgttcgactccctggcggtcagcgacgagcagacctgcgagaccatcgccgaggtataccgctccagtggcgagttgctcgacccgcacaccgccattggcgtgcgtgccgcccgcgaatgccggcgcagcctgagcgtgccgatggtgaccctgggcactgcgcatccggtcaagttccccgaagcggtggagaaggccggcatcggccaggcaccggcgctgcctgcgcacctcgccgacctgttcgagcgcgaggagcgctgcaccgtattgccgaacgagctggccaaggtacaggccttcgtcagccagcacggcaatcgcggcaagccgctctga

SEQ ID NO: 35188 - protein, 469 aa, Pseudomonas aeruginosa
MRYISTRGQAPALNFEDVLLAGLASDGGLYVPENLPRFTLEEIASWVGLPYHELAFRVMRPFVAGSIADADFKKILEETYGVFAHDAVAPLRQLNGNEWVLELFHGPTLAFKDFALQLLGRLLDHVLAKRGERVVIMGATSGDTGSAAIEGCRRCDNVDIFIMHPHNRVSEVQRRQMTTILGDNIHNIAIEGNFDDCQEMVKASFADQGFLKGTRLVAVNSINWARIMAQIVYYFHAALQLGAPHRSVAFSVPTGNFGDIFAGYLARNMGLPVSQLIVATNRNDILHRFMSGNRYDKDTLHPSLSPSMDIMVSSNFERLLFDLHGRNGKAVAELLDAFKASGKLSVEDQRWTEARKLFDSLAVSDEQTCETIAEVYRSSGELLDPHTAIGVRAARECRRSLSVPMVTLGTAHPVKFPEAVEKAGIGQAPALPAHLADLFEREERCTVLPNELAKVQAFVSQHGNRGKPL

SEQ ID NO: 35189 - DNA, 1545 bp, Schizosaccharomyces pombe
  CDS (1)..(1545)
atgtctagccaagttagttatttatcgactcgtggtggatcttcaaatttttcttttgaagaggctgtgcttaagggtttggctaatgatggaggattgtttattccatcagaaatccctcagctacctagcggatggattgaggcttggaaggacaaatccttccctgaaattgcctttgaggtaatgtctttgtacattcctcgctctgaaatttcagctgatgaattgaaaaaattggttgatcgctcttactctaccttccgccacccagagactactcctctaaaatcattaaagaacggtctcaatgtacttgagctcttccatggtcctacttttgcgttcaaagatgttgctttgcaatttcttggtaacctctttgaatttttccttactcgtaagaacggaaacaaacctgaagacgaacgtgatcatctgaccgtggttggtgccactagtggtgacactggtagtgcagctatctatggcttacgtggcaagaaggacgtttcagtttttatcttatttcccaatggacgtgtttcccctatccaagaagctcagatgactacagtcacagatcctaacgttcactgtatcactgtgaacggcgtctttgacgattgtcaagatcttgttaaacaaatttttggcgatgttgagtttaataagaagcatcatattggtgccgttaattctattaactgggctcgtattctctctcaaattacctattacttatattcttatctttccgtttacaagcaaggaaaggctgacgatgttcgtttcatcgttcccaccggtaattttggtgatattctcgctggttactacgccaagcgtatgggcttacctactaaacaacttgttattgctactaacgagaatgatattttgaatcgtttcttcaagactggtcgttatgaaaaagctgattctactcaagtttcgcccagtggacctatttccgccaaagaaacttactctcctgcaatggacattttggtttcttctaacttcgagcgttacttatggtatcttgcattagccactgaggctcctaatcatactcctgctgaggcctcggaaattttgtctcgctggatgaatgaattcaaacgtgatggaacagttactgtccgtcccgaggttttggaagccgctagacgtgatttcgtgagtgaacgtgttagtaatgatgaaaccattgatgctattaaaaaaatctatgaaagtgatcattatatcatcgacccacacactgctgttggcgtcgaaactggtcttcgttgcttagagaagactaaggaccaggatattacctatatttgcctttccacagctcatcctgctaagtttgacaaagcagtaaaccttgctctttcttcttatagtgattataactttaacacacaagtattaccgatagagtttgatggcctcttggatgaggagcgcacctgcattttctcaggaaaacccaatattgacattcttaaacaaattattgaagttactctcagcagagagaaagcttag

SEQ ID NO: 35190 - protein, 514 aa, Schizosaccharomyces pombe
MSSQVSYLSTRGGSSNFSFEEAVLKGLANDGGLFIPSEIPQLPSGWIEAWKDKSFPEIAFEVMSLYIPRSEISADELKKLVDRSYSTFRHPETTPLKSLKNGLNVLELFHGPTFAFKDVALQFLGNLFEFFLTRKNGNKPEDERDHLTVVGATSGDTGSAAIYGLRGKKDVSVFILFPNGRVSPIQEAQMTTVTDPNVHCITVNGVFDDCQDLVKQIFGDVEFNKKHHIGAVNSINWARILSQITYYLYSYLSVYKQGKADDVRFIVPTGNFGDILAGYYAKRMGLPTKQLVIATNENDILNRFFKTGRYEKADSTQVSPSGPISAKETYSPAMDILVSSNFERYLWYLALATEAPNHTPAEASEILSRWMNEFKRDGTVTVRPEVLEAARRDFVSERVSNDETIDAIKKIYESDHYIIDPHTAVGVETGLRCLEKTKDQDITYICLSTAHPAKFDKAVNLALSSYSDYNFNTQVLPIEFDGLLDEERTCIFSGKPNIDILKQIIEVTLSREKA

SEQ ID NO: 35191 - DNA, 1290 bp, Serratia marcescens
  CDS (1)..(1290): transl_table=11
atgaaactgtacaaccttaaggatcacaacgagcaggtcagcttcgcgcaggcgatcaaacaaggcctgggcaagcaacaggggctgttcttcccgctggatctgccggagttcgaactgaccgaaatcgaccacctgctggagcaggattttgtcacccgcagcagccgcattttgtcggcctttatcggcgaagaggtgccggaaacggcgctgaagaaacgcgtgcaggccgcctttgagttcccggcgccggtggcgaaagtgaccgatgacgtctcctgcctggagctgttccacggcccgacgctggcgttcaaagacttcggcggccgctttatggcgcagatgctggcggaagtggccggcgagcagccggtgaccattctgaccgccacctccggcgacaccggcgccgccgtggcgcacgccttctacggcctgaaaaacgtgcgggtggtgatcctgtatccgcagggcaaaatcagcccgctgcaggaaaagctgttctgcaccctgggcggcaacattcacaccgtggcgatcgacggtgacttcgatgcttgtcaggcgctggtgaagcaggcgttcgacgatcaggaattgaaagacgcgctgcacctgaactcggccaactcgattaacatcagccgtttgctggcgcagatttgctactacttcgaagcggtggcgcagctgccgcaggaagcgcgcaatcagctggtgatttcggtgccgagcggcaacttcggcgatctgaccgccgggctgctggccaaatcgctgggcctgccggtgaagcgcttcatcgccgccaccaacgccaacgacaccgtgccgcgcttcctgaccagcggccagtggcagccgcacgctacggtcgcgacgctgtccaacgccatggacgtcagccagccgaacaactggccgcgcgtggaagagctgttccgtcgcaaggtctggcagttgaaggagctgggtcacgcggcggtcagcgacgagaccaccaaagacacgatgcgtgagctggccgagctgggctatatctccgaaccgcatgcggccatcgcctaccgcgcgctgcgtgatcagttgcaggaaggggagttcggcctgttcctcggcaccgcgcatccggccaagtttaaagagagtgtggaagcgatactcggccaggagttgccgttgccgaaagcgctggcgctgcgggctgagctgccgctgctgtcgcacacgctgccggccagcttcggcgagctgcgcaagttcctgatggggctgcctgcctga

SEQ ID NO: 35192 - protein, 429 aa, Serratia marcescens
MKLYNLKDHNEQVSFAQAIKQGLGKQQGLFFPLDLPEFELTEIDHLLEQDFVTRSSRILSAFIGEEVPETALKKRVQAAFEFPAPVAKVTDDVSCLELFHGPTLAFKDFGGRFMAQMLAEVAGEQPVTILTATSGDTGAAVAHAFYGLKNVRVVILYPQGKISPLQEKLFCTLGGNIHTVAIDGDFDACQALVKQAFDDQELKDALHLNSANSINISRLLAQICYYFEAVAQLPQEARNQLVISVPSGNFGDLTAGLLAKSLGLPVKRFIAATNANDTVPRFLTSGQWQPHATVATLSNAMDVSQPNNWPRVEELFRRKVWQLKELGHAAVSDETTKDTMRELAELGYISEPHAAIAYRALRDQLQEGEFGLFLGTAHPAKFKESVEAILGQELPLPKALALRAELPLLSHTLPASFGELRKFLMGLPA

SEQ ID NO: 35193 - DNA, 1545 bp, Saccharomyces cerevisiae
  CDS (1)..(1545)
atgcctaacgcttcccaagtttacagatctaccagatccagctctccaaagacaatctcttttgaagaggctatcattcaaggtctggccactgacggtggtcttttcattccaccaactattccacaagtggaccaagccactcttttcaatgattggtcaaagctctccttccaagacttagcctttgctatcatgagactatacattgcccaagaagagattccagatgctgatctaaaggacttgatcaagagatcttattctactttccgttctgatgaagtcacccccttggtgcaaaacgtcactggtgacaaggagaatttgcacattttagaattattccacggtcctacctacgctttcaaagacgttgctttacaatttgtcggtaatctttttgaatacttcttacaaagaaccaacgccaatttacctgaaggcgagaaaaagcaaatcactgtggtcggtgctacttccggtgacactggttctgcagccatctacggtttaagaggcaaaaaggacgtttccgttttcatcttatatccaaccggtagaatttccccaattcaagaagaacaaatgaccaccgttccagatgaaaacgtccagactttgtctgttaccggtactttcgacaactgtcaagatatcgtcaaagctattttcggtgacaaagaattcaactctaaacacaacgtcggtgctgttaactccatcaactgggcaagaatcttggcccaaatgacctattacttttattcattcttccaagccaccaacggtaaggactccaagaaggtcaagttcgttgtgccaagtgggaacttcggtgatatattggccggttattttgccaagaaaatgggtttgcctattgaaaaactggccatcgctaccaatgaaaacgacattttggacagatttttgaaatctggtctatacgaaagatcagacaaggttgctgctactttatccccagcaatggatatcttaatctcttctaactttgaaagactactatggtacctagctcgtgaatacctagctaatggtgatgatttgaaagccggtgaaatcgtcaacaattggttccaggaattgaagaccaacggtaagttccaagttgacaaatccatcattgaaggcgcatcaaaggactttacatcagaaagagtttccaatgaagaaacatctgaaacaatcaagaagatctacgaatcatctgtaaatccaaaacattacatcttagatcctcacacagctgtcggtgtttgcgccacagaaagattgattgcaaaagataatgacaagtccatccaatacatttctctatctaccgctcacccagctaaatttgccgatgctgtaaacaatgcattgtctggattttccaattattcatttgaaaaggatgttttgcctgaggaattgaagaaactatccacattaaagaagaaattaaaattcatcgaaagagctgacgttgaattggtcaaaaacgctattgaagaagaacttgctaaaatgaaattataa

SEQ ID NO: 35194 - protein, 514 aa, Saccharomyces cerevisiae
MPNASQVYRSTRSSSPKTISFEEAIIQGLATDGGLFIPPTIPQVDQATLFNDWSKLSFQDLAFAIMRLYIAQEEIPDADLKDLIKRSYSTFRSDEVTPLVQNVTGDKENLHILELFHGPTYAFKDVALQFVGNLFEYFLQRTNANLPEGEKKQITVVGATSGDTGSAAIYGLRGKKDVSVFILYPTGRISPIQEEQMTTVPDENVQTLSVTGTFDNCQDIVKAIFGDKEFNSKHNVGAVNSINWARILAQMTYYFYSFFQATNGKDSKKVKFVVPSGNFGDILAGYFAKKMGLPIEKLAIATNENDILDRFLKSGLYERSDKVAATLSPAMDILISSNFERLLWYLAREYLANGDDLKAGEIVNNWFQELKTNGKFQVDKSIIEGASKDFTSERVSNEETSETIKKIYESSVNPKHYILDPHTAVGVCATERLIAKDNDKSIQYISLSTAHPAKFADAVNNALSGFSNYSFEKDVLPEELKKLSTLKKKLKFIERADVELVKNAIEEELAKMKL

SEQ ID NO: 35195 - DNA, 26 bp, Artificial sequence
  primer
atgaaactctacaatctgaaagatca

SEQ ID NO: 35196 - DNA, 27 bp, Artificial sequence
  primer
ttactgatgattcatcatcaatttacg

SEQ ID NO: 35197 - protein, 565 aa, Artificial sequence
  consensus sequence
  Variant (3)..(4): Xaa in position 3 to 4 is any amino acid
  Variant (6)..(6): Xaa in position 6 is any amino acid
  Variant (7)..(7): Xaa in position 7 is any or no amino acid
  Variant (10)..(11): Xaa in position 10 to 11 is any amino acid
  Variant (13)..(72): Xaa in position 13 to 72 is any amino acid
  Variant (73)..(94): Xaa in position 73 to 94 is any or no amino acid
  Variant (98)..(99): Xaa in position 98 to 99 is any amino acid
  Variant (103)..(103): Xaa in position 103 is any amino acid
  Variant (108)..(122): Xaa in position 108 to 122 is any amino acid
  Variant (123)..(156): Xaa in position 123 to 156 is any or no amino acid
  Variant (158)..(159): Xaa in position 158 to 159 is any amino acid
  Variant (167)..(167): Xaa in position 167 is any amino acid
  Variant (169)..(183): Xaa in position 169 to 183 is any amino acid
  Variant (185)..(185): Xaa in position 185 is any amino acid
  Variant (187)..(190): Xaa in position 187 to 190 is any amino acid
  Variant (192)..(193): Xaa in position 192 to 193 is any amino acid
  Variant (195)..(203): Xaa in position 195 to 203 is any amino acid
  Variant (204)..(204): Xaa in position 204 is any or no amino acid
  Variant (206)..(214): Xaa in position 206 to 214 is any amino acid
  Variant (215)..(217): Xaa in position 215 to 217 is any or no amino acid
  Variant (220)..(221): Xaa in position 220 to 221 is any amino acid
  Variant (223)..(224): Xaa in position 223 to 224 is any amino acid
  Variant (227)..(230): Xaa in position 227 to 230 is any amino acid
  Variant (232)..(241): Xaa in position 232 to 241 is any amino acid
  Variant (242)..(249): Xaa in position 242 to 249 is any or no amino acid
  Variant (254)..(255): Xaa in position 254 to 255 is any amino acid
  Variant (257)..(259): Xaa in position 257 to 259 is any amino acid
  Variant (261)..(262): Xaa in position 261 to 262 is any amino acid
  Variant (265)..(278): Xaa in position 265 to 278 is any amino acid
  Variant (279)..(290): Xaa in position 279 to 290 is any or no amino acid
  Variant (293)..(293): Xaa in position 293 is any amino acid
  Variant (298)..(300): Xaa in position 298 to 300 is any amino acid
  Variant (302)..(304): Xaa in position 302 to 304 is any amino acid
  Variant (306)..(308): Xaa in position 306 to 308 is any amino acid
  Variant (312)..(317): Xaa in position 312 to 317 is any amino acid
  Variant (318)..(319): Xaa in position 318 to 319 is any or no amino acid
  Variant (321)..(321): Xaa in position 321 is any amino acid
  Variant (323)..(323): Xaa in position 323 is any amino acid
  Variant (325)..(343): Xaa in position 325 to 343 is any amino acid
  Variant (344)..(370): Xaa in position 344 to 370 is any or no amino acid
  Variant (372)..(372): Xaa in position 372 is any amino acid
  Variant (374)..(375): Xaa in position 374 to 375 is any amino acid
  Variant (378)..(381): Xaa in position 378 to 381 is any amino acid
  Variant (384)..(385): Xaa in position 384 to 385 is any amino acid
  Variant (387)..(426): Xaa in position 387 to 426 is any amino acid
  Variant (427)..(482): Xaa in position 427 to 482 is any or no amino acid
  Variant (485)..(485): Xaa in position 485 is any amino acid
  Variant (487)..(502): Xaa in position 487 to 502 is any amino acid
  Variant (503)..(513): Xaa in position 503 to 513 is any or no amino acid
  Variant (516)..(516): Xaa in position 516 is any amino acid
  Variant (518)..(518): Xaa in position 518 is any amino acid
  Variant (521)..(534): Xaa in position 521 to 534 is any amino acid
  Variant (535)..(564): Xaa in position 535 to 564 is any or no amino acid
GLXXDXXGLXXPXXXXXXXXXXXXXXXXXXXXXXXXXXXXXXXXXXXXXXXXXXXXXXXXXXXXXXXXXXXXXXXXXXXXXXXXXXXXXXXXXXLELXXGPTXAFKDXXXXXXXXXXXXXXXXXXXXXXXXXXXXXXXXXXXXXXXXXXXXXXXXXIXXATSGDTGXAXXXXXXXXXXXXXXXLXPXXXXSXXQXXXXXXXXXXNXXXXXXXXXXXXFDXXQXXVKXXXXDXXXXXXXXXXXXXXXXXXNSINXXRXXXQXXYYXXXXXXXXXXXXXXXXXXXXXXXXXXVPXGNFGXXXAXXXAXXXGLPXXXXXXXXAXNXNXXXXXXXXXXXXXXXXXXXXXXXXXXXXXXXXXXXXXXXXXXXXXXTXSXXMDXXXXSNXXRXXXXXXXXXXXXXXXXXXXXXXXXXXXXXXXXXXXXXXXXXXXXXXXXXXXXXXXXXXXXXXXXXXXXXXXXXXXXXXXXXXXXXXXXXXXXXXXXPHXAXXXXXXXXXXXXXXXXXXXXXXXXXXXTAXPXKFXXXXXXXXXXXXXXXXXXXXXXXXXXXXXXXXXXXXXXXXXXXXP

SEQ ID NO: 35198 - protein, 18 aa, Artificial sequence
  protein pattern
  Variant (5)..(5): Xaa in position 5 is any amino acid
  Variant (6)..(6): Xaa in position 6 is Ala, Gly or Ser
  Variant (8)..(8): Xaa in position 8 is Ile, Leu or Val
  Variant (9)..(9): Xaa in position 9 is any amino acid
  Variant (10)..(10): Xaa in position 10 is Ala, Pro or Ser
  Variant (12)..(13): Xaa in position 12 to 13 is any amino acid
  Variant (16)..(17): Xaa in position 16 to 17 is any amino acid
  Variant (18)..(18): Xaa in position 18 is Ala, Gly, Ser or Thr
NSINXXRXXXQXXYYXXX

SEQ ID NO: 35199 - protein, 18 aa, Artificial sequence
  protein pattern
  Variant (2)..(3): Xaa in position 2 to 3 is any amino acid
  Variant (7)..(7): Xaa in position 7 is any amino acid
  Variant (12)..(12): Xaa in position 12 is Phe, Met or Val
  Variant (13)..(13): Xaa in position 13 is Ala or Gly
  Variant (14)..(14): Xaa in position 14 is any amino acid
  Variant (15)..(15): Xaa in position 15 is Gln, Arg or Ser
  Variant (16)..(16): Xaa in position 16 is any amino acid
  Variant (17)..(17): Xaa in position 17 is Ile, Leu, Met or Val
  Variant (18)..(18): Xaa in position 18 is Ala, Gly, Pro or Ser
LXXGPTXAFKDXXXXXXX

SEQ ID NO: 35200 - protein, 21 aa, Artificial sequence
  protein pattern
  Variant (3)..(3): Xaa in position 3 is Cys, Ser or Thr
  Variant (8)..(8): Xaa in position 8 is Asp or Asn
  Variant (9)..(9): Xaa in position 9 is Ala, Ile, Leu or Val
  Variant (10)..(10): Xaa in position 10 is any amino acid
  Variant (12)..(18): Xaa in position 12 to 18 is any or no amino acid
  Variant (20)..(20): Xaa in position 20 is any amino acid
  Variant (21)..(21): Xaa in position 21 is Ile, Leu, Pro or Val
VPXGNFGXXXAXXXXXXXGXX

SEQ ID NO: 35201 - protein, 16 aa, Artificial sequence
  protein pattern
  Variant (2)..(2): Xaa in position 2 is any amino acid
  Variant (3)..(3): Xaa in position 3 is Ala or Ser
  Variant (4)..(4): Xaa in position 4 is Asn or Pro
  Variant (5)..(5): Xaa in position 5 is Ala or Ser
  Variant (8)..(8): Xaa in position 8 is any amino acid
  Variant (9)..(11): Xaa in position 9 to 11 is any or no amino acid
  Variant (13)..(13): Xaa in position 13 is Asn, Gln, Arg or Ser
  Variant (14)..(14): Xaa in position 14 is any amino acid
  Variant (15)..(15): Xaa in position 15 is Glu, Asn, Pro or Ser
  Variant (16)..(16): Xaa in position 16 is Asn or Arg
TXXXXMDXXXXSXXXX

SEQ ID NO: 35202 - protein, 13 aa, Artificial sequence
  protein pattern
  Variant (2)..(2): Xaa in position 2 is Ile, Leu, Met or Val
  Variant (3)..(3): Xaa in position 3 is Ala, Gly, Thr or Val
  Variant (11)..(11): Xaa in position 11 is any amino acid
  Variant (13)..(13): Xaa in position 13 is Ala, Thr or Val
IXXATSGDTGXAX

SEQ ID NO: 35203 - protein, 11 aa, Artificial sequence
  protein pattern
  Variant (2)..(2): Xaa in position 2 is any amino acid
  Variant (5)..(5): Xaa in position 5 is Ala, Asp, Asn or Gln
  Variant (6)..(6): Xaa in position 6 is Ala or Cys
  Variant (8)..(9): Xaa in position 8 to 9 is any amino acid
GXFDXXQXXVK

SEQ ID NO: 35204 - DNA, 696 bp, Escherichia coli
  CDS (1)..(696): transl_table=11
atgttagaagatctcaaacgccaggtattagaagccaacctggcgctgccaaaacacaacctggtcacgctcacatggggcaacgtcagcgccgttgatcgcgagcgcggcgtctttgtgatcaaaccttccggcgtcgattacagcgtcatgaccgctgacgatatggtcgtggttagcatcgaaaccggtgaagtggttgaaggtacgaaaaagccctcctccgacacgccaactcaccggctgctctatcaggcattcccctccattggcggcattgtgcatacgcactcgcgccacgccaccatctgggcgcaggcgggtcagtcgattccagcaaccggcaccacccacgccgactatttctacggcaccattccctgcacccgcaaaatgaccgacgcagaaatcaacggcgaatatgagtgggaaaccggtaacgtcatcgtagaaacctttgaaaaacagggtatcgatgcagcgcaaatgcccggcgttctggtccattcccacggcccgtttgcatggggcaaaaatgccgaagatgcggtgcataacgccatcgtgctggaagaggtcgcttatatggggatattctgccgtcagttagcgccgcagttaccggatatgcagcaaacgctgctggataaacactatctgcgtaagcatggcgcgaaggcatattacgggcagtaa

SEQ ID NO: 35205 - protein, 231 aa, Escherichia coli
MLEDLKRQVLEANLALPKHNLVTLTWGNVSAVDRERGVFVIKPSGVDYSVMTADDMVVVSIETGEVVEGTKKPSSDTPTHRLLYQAFPSIGGIVHTHSRHATIWAQAGQSIPATGTTHADYFYGTIPCTRKMTDAEINGEYEWETGNVIVETFEKQGIDAAQMPGVLVHSHGPFAWGKNAEDAVHNAIVLEEVAYMGIFCRQLAPQLPDMQQTLLDKHYLRKHGAKAYYGQ

SEQ ID NO: 35206 - DNA, 651 bp, Clostridium difficile 630
  CDS (1)..(651): transl_table=11
atgttattagagaaattaagaaaagaagtattacaagcatctttagaccttttaaactataatttagtgacattaacaggaggaaatgtaagtgggagagatgaacaaactggctatatagcaatcaccccaagtggaatggattatagaaatcttacaccaagtgatattgttatagtagatgtagatggaaatattatagatggaaaatggaaagcatcagtggatttatcagaccacttgtatatatataagcatagagaagacataaatagtataattcatacacattctacatactcaagttgttttgctattttaaatgaacctatagaatgcgcaagtacaactcttgcaaatgaagtagggggttcagtaccagttgcaaaattttcgccaccaacatctaaaaagatgggaaaatgtgttattgaagcaattggtgacaaaagagcatgtcttttagcaaatcatggcgtaattgcagttggtccatctgtaggacatgctcttacagccgctgtaatgttagaagattcagcaaaagtatattacttagcaaaatcaattggcacaccagtgctactgcctgatgaagaaattcaaagagcgagagatgtattttttaatgtctatggtcaggataaataa

SEQ ID NO: 35207 - protein, 216 aa, Clostridium difficile 630
MLLEKLRKEVLQASLDLLNYNLVTLTGGNVSGRDEQTGYIAITPSGMDYRNLTPSDIVIVDVDGNIIDGKWKASVDLSDHLYIYKHREDINSIIHTHSTYSSCFAILNEPIECASTTLANEVGGSVPVAKFSPPTSKKMGKCVIEAIGDKRACLLANHGVIAVGPSVGHALTAAVMLEDSAKVYYLAKSIGTPVLLPDEEIQRARDVFFNVYGQDK

SEQ ID NO: 35208 - DNA, 765 bp, Thermotoga maritima MSB8
  CDS (1)..(765): transl_table=11
gtgaggagtacagacaggttactgtttatagattttctgttgaagtttgaaaacaaaaacggaactgtgataccttgttgtgtggataattttgactgtacgtttacccataaaggaggtaaaagcatgtacgaaaaagaaaggaaagagctatacaatgcccatcttctgttggaaaaatacggtcttgtcgcttacacaagcggtaacgtgagtgtgagaatcggtgatcatgttctgataaagccctccggtgttccatacaccgagctgaaaccagaggacttcgtcgtggtggaccttgaaggaaacgtgatcgagggagagaagaaaccctccgtcgatacagctacacatctgtatctctacaaacacctcgactgggcaaaatccgtgattcacactcattcaacattcgccatggtgtgggcaattctcgaaaaatcaatccccgttctttgcacggcacatgcggatgttttcggagaggagattcctcttacagaatacgctcctgtaggatccgaggcgattggaaaagctgtcgtgaaagtgattggaaaatccggtgctgttcttctcagaaaacacggtgttatgatcgtggggacctctgtggacgatgcagtgaaaaaggcgattttccttgaggaggtagcaaaggcagcgtactttgcgacacttgcaggaaaacccacaccattgccacctgacgaggtggatcatctctacaatcagtaccacaccaagtacggtcagaagtga

SEQ ID NO: 35209 - protein, 254 aa, Thermotoga maritima MSB8
MRSTDRLLFIDFLLKFENKNGTVIPCCVDNFDCTFTHKGGKSMYEKERKELYNAHLLLEKYGLVAYTSGNVSVRIGDHVLIKPSGVPYTELKPEDFVVVDLEGNVIEGEKKPSVDTATHLYLYKHLDWAKSVIHTHSTFAMVWAILEKSIPVLCTAHADVFGEEIPLTEYAPVGSEAIGKAVVKVIGKSGAVLLRKHGVMIVGTSVDDAVKKAIFLEEVAKAAYFATLAGKPTPLPPDEVDHLYNQYHTKYGQK

SEQ ID NO: 35210 - DNA, 693 bp, Vibrio cholerae O1 biovar eltor str. N16961
  CDS (1)..(693): transl_table=11
atgtacagcgaactgaaacagcgcgtattcaacgccaatctcaaattgcccaaatacggcttagtgacttttacttggggcaatgtgtcggaaattgaccgcgaacgcggcgtactggcgattaaaccgagcggcgtcgaatacgatgcgatgtgcgccgaagatatggtgattgtcgacctcacgggcaaagtggtggaaggcaaattgaacccatcgagcgataccgcaacccatattgaactttaccgcgcctttcccgacatcggcggcgtagtgcacacccattcgcgcagcgccacgatttgggctcaagcgggcattgatattcccgcgctcgggacaacccatgctgattacttttacggcgacattccctgcacgcgtaagctttcgcacagcgaaattgctggtgagtatgaaaaaaacaccggcctagtgatcgtcgaagagtttcgtcatcgtcatatcgatccgatggcggtaccgagtgtgattgtggccggacacgcgcctttctcttggggcaaaaatgccgaagatgcggtgcacaacgccgtggtgctggaagagatctccgcaatggcactcgccactcgctcgctcaatagcggcatcaaaattcagcccgaattgtccgataaacactacctgcgcaaacacggcgcgaacgcttactacggccagaggtaa

SEQ ID NO: 35211 - protein, 230 aa, Vibrio cholerae O1 biovar eltor str. N16961
MYSELKQRVFNANLKLPKYGLVTFTWGNVSEIDRERGVLAIKPSGVEYDAMCAEDMVIVDLTGKVVEGKLNPSSDTATHIELYRAFPDIGGVVHTHSRSATIWAQAGIDIPALGTTHADYFYGDIPCTRKLSHSEIAGEYEKNTGLVIVEEFRHRHIDPMAVPSVIVAGHAPFSWGKNAEDAVHNAVVLEEISAMALATRSLNSGIKIQPELSDKHYLRKHGANAYYGQR

SEQ ID NO: 35212 - DNA, 732 bp, Pasteurella multocida subsp. multocida str. Pm70
  CDS (1)..(732): transl_table=11
ttggatcgaacaaaaaatgaaagaaggtggtttccaatgttagaagaattgaaacaaaaagtgtttgaagccaatttggcattacccaaatacaagttagtgacctttacttggggtaacgtgagtggcatcgacagagaaaaaaatttggttgtgattaagccctccggcgtagagtatgacaccatgacagtggaggatatggtagtagttgatctctttacagggcaagtggtggaaggcaacaaaaaaccttcctcagataccgcgacccatttagaactttatcgtcaatttccaagcttaggcgggattgttcatactcactcacgccacgctacgatttgggcgcaagccggtgaagatttgattgcggcggggacgactcatgctgattatttctatggttcaattccttgtacacgtaaaatgacccctgccgaaattcaaggcgaatatgagcttgaaaccggcaaagtgattgtggaaacattccgtgtgagaggaatcgatccgaaagatgtaccagcagtattagtgcactcccatggtccttttgcttggggtaccgatcctgataatgccgtacataatgcagtggttctggaagagattggctatatgaatttatttagtcgtcaactgcgtccaaatttagcgtcgatgcagcaagaattgctagataaacactacttacgtaaacatgggaaaaacgcgtattacgggcaataa

SEQ ID NO: 35213 - protein, 243 aa, Pasteurella multocida subsp. multocida str. Pm70
MDRTKNERRWFPMLEELKQKVFEANLALPKYKLVTFTWGNVSGIDREKNLVVIKPSGVEYDTMTVEDMVVVDLFTGQVVEGNKKPSSDTATHLELYRQFPSLGGIVHTHSRHATIWAQAGEDLIAAGTTHADYFYGSIPCTRKMTPAEIQGEYELETGKVIVETFRVRGIDPKDVPAVLVHSHGPFAWGTDPDNAVHNAVVLEEIGYMNLFSRQLRPNLASMQQELLDKHYLRKHGKNAYYGQ

SEQ ID NO: 35214 - DNA, 732 bp, Mycoplasma pulmonis UAB CTIP
  CDS (1)..(732): transl_table=4
gtgaataaaaaatatgacttagatgaaattgaaaaattaaagcaaagtgtctatgatgcaaacatgcttttgcacaaatataaattagccattcacacttgaggaaatgtctcaggaattaccaaagaccgccgctttatggtaatcaagccttcagggctttcatatgaagccatgaaggctagtgacatggttattgttgatttagacaacaatgttattgatagtgagcttaatccttcttcagatactccaactcacactcttttgtataaagcaagctatcaaattcaagcaatagtacacactcattcacctaatgcagtagcttttgctcaagccggaaaagatattccttgctatggaaccactcatgcagataatttctatggatcagttccttgtactagagatttaagtgttgaagaaattaatggagaatatgaacacaacacagggcttgtaataattgaaaactttaaaaataacaatcgcgattttaaagctacaagtgcagttttagtcaaagaacatggtccttttgtttgatcaacaaaaaatccaattgatgcagttaatttagcccttactctagaggaaattgctaaaatggcaatcaaaacaattattattaatcctaatgctttacatgcaaaacaagagcttcaagacaagcactatctacgtaaacacggtaaaaatgcctactatggccaaagaccaaaaaaatag

SEQ ID NO: 35215 - protein, 243 aa, Mycoplasma pulmonis UAB CTIP
MNKKYDLDEIEKLKQSVYDANMLLHKYKLAIHTWGNVSGITKDRRFMVIKPSGLSYEAMKASDMVIVDLDNNVIDSELNPSSDTPTHTLLYKASYQIQAIVHTHSPNAVAFAQAGKDIPCYGTTHADNFYGSVPCTRDLSVEEINGEYEHNTGLVIIENFKNNNRDFKATSAVLVKEHGPFVWSTKNPIDAVNLALTLEEIAKMAIKTIIINPNALHAKQELQDKHYLRKHGKNAYYGQRPKK

SEQ ID NO: 35216 - DNA, 684 bp, Streptococcus pneumoniae TIGR4
  CDS (1)..(684): transl_table=11
atgcgtaaacgagtctgtgatgccaatcaatcattgccaaaacatggacttgtcaaatttacctgggggaatgtatctgaagttaatcgcgaactcggtgtcattgttatcaaaccatcaggcgtggattatgacgaattgacacctgaaaacatggtagtgactgatctagatggtaagatcctagaaggggatttaagaccatcttccgacctcccaactcatgtgcaattatataagacttggtcagaaattggtagtgtggttcacacccattcgacagaagctgttggttgggctcaggcaggtcgtgatattcctttctacggaacaacccatgcagattatttctacggttcaatcccttgcgcccgtagtttgaccaaggacgaagtagaagtggcctatgaaaaagatactggcctggttatcgtagaagagtttgaacatcgcggacttaacccggttgaagtaccaggaattgttgtacgcaatcacggtccattcacctggggcaaaaatccagagaatgctgtttatcactctgtcgtactagaggaagtatcaaagatgaatcgctttacagaacaaatcaatccaagagttggacctgctccccagtacatactagaaaaacactaccaacgtaaacatggaccaaatgcttattatggtcaaaagtaa

SEQ ID NO: 35217 - protein, 227 aa, Streptococcus pneumoniae TIGR4
MRKRVCDANQSLPKHGLVKFTWGNVSEVNRELGVIVIKPSGVDYDELTPENMVVTDLDGKILEGDLRPSSDLPTHVQLYKTWSEIGSVVHTHSTEAVGWAQAGRDIPFYGTTHADYFYGSIPCARSLTKDEVEVAYEKDTGLVIVEEFEHRGLNPVEVPGIVVRNHGPFTWGKNPENAVYHSVVLEEVSKMNRFTEQINPRVGPAPQYILEKHYQRKHGPNAYYGQK

SEQ ID NO: 35218 - DNA, 702 bp, Clostridium acetobutylicum ATCC 824
  CDS (1)..(702): transl_table=11
atgctagaagctttaaaacaagaagtattagaagcaaatcttatgttgcctaagtatgggttagttgtattcacctgggggaatgttagcggtattgatagagaaaaaggtcttatagtcataaaaccaagtggagttgagtatgatcaaatgaaagctagtgatatggtagttgtggatctaaatgggaaggttgtagaaggtgacttaaatccttctagtgatactccaactcatatagtgctatataaagagttttcagatattaagggaattgttcatacacattcaccttgggctacatcttttgcacaagcaggagtttctattccagctgcaggtacaacccatggagattatttttatggtaatattcctgtaacttcaagaatgaccaaagaggaaatagctacagattatgaaaaacaaacaggagatgttatagtaagaacctttagaaaagagaatattaacccaaatgatgttccagctgttcttgtgaatgatcatgctccttttacctggggaactgaccctaagaatgcagtgcataattctgttgtattagaagaggttgctaaaatgacatatcattctttacagcttaatccacataacattgaaatgagtcaggatttgttagataagcattttaaaagaaaacatggtgcaaatgcatattatggtcaaaaaacaaagtaa

SEQ ID NO: 35219 - protein, 233 aa, Clostridium acetobutylicum ATCC 824
MLEALKQEVLEANLMLPKYGLVVFTWGNVSGIDREKGLIVIKPSGVEYDQMKASDMVVVDLNGKVVEGDLNPSSDTPTHIVLYKEFSDIKGIVHTHSPWATSFAQAGVSIPAAGTTHGDYFYGNIPVTSRMTKEEIATDYEKQTGDVIVRTFRKENINPNDVPAVLVNDHAPFTWGTDPKNAVHNSVVLEEVAKMTYHSLQLNPHNIEMSQDLLDKHFKRKHGANAYYGQKTK

SEQ ID NO: 35220 - DNA, 696 bp, Salmonella typhimurium LT2
  CDS (1)..(696): transl_table=11
atgttagagcaactgaaagccgaggtgctggcggccaacctggccctcccggcgcacgggctggtcacctttacctggggcaacgtcagcgcggtcgatgagacgcgcaaactgatggtcatcaagccttccggcgttgaatatgaggtgatgaccgccgacgatatggtggtggtagagatcgccagcggtaaggtcgttgaaggccataaaaaaccgtcgtccgataccgcgacccatctggcgctctatcgccgctatccgcagatcggtgggatcgtgcatacccattcccgccatgcgacgatctggtcgcaggccgggctcgatctgcccgcctggggcaccacccacgccgactatttctatggcgcgatcccctgtacccggctgatgaccgttgaggaaattaacggcgagtacgagtatcagaccggcgaggtgattattaaaacctttgaagagcgcggtctcgatccggcgcaaatcccggcggtattggttcattcgcacggcccgtttgcctggggtaaaaatgccgccgatgccgtccacaacgccgtggtgcttgaggagtgtgcctatatggggctgttctcgcgccagctggccccgcagctaccggatatgcagcctgaactgctcgataaacactatctgcgtaaacacggcgcgaatgcctattacgggcagtaa

SEQ ID NO: 35221 - protein, 231 aa, Salmonella typhimurium LT2
MLEQLKAEVLAANLALPAHGLVTFTWGNVSAVDETRKLMVIKPSGVEYEVMTADDMVVVEIASGKVVEGHKKPSSDTATHLALYRRYPQIGGIVHTHSRHATIWSQAGLDLPAWGTTHADYFYGAIPCTRLMTVEEINGEYEYQTGEVIIKTFEERGLDPAQIPAVLVHSHGPFAWGKNAADAVHNAVVLEECAYMGLFSRQLAPQLPDMQPELLDKHYLRKHGANAYYGQ

SEQ ID NO: 35222 - DNA, 768 bp, Streptococcus pyogenes MGAS8232
  CDS (1)..(768): transl_table=11
ctgctatcaaagaagctcaggacttcctttacccacttattgagaaagcggggttggcataatatggcgaaaaacttgcaagaaatgcgtgaacgtgtctgtgcggctaacaagtctctaccacaacacggtcttgtcaaatttacgtggggcaatgtctctgaagtttgtcgtgaattaggacgtattgtcatcaagccttctggggtggactacgacctcttgacaccagaaaacatggttgttacagaccttgatgggaatgtggtcgaaggtgatttgaacccttcttcagatctgccaacccatgtggaactttataaagcttggccagaagtgggcggtattgtccacactcactccacagaagctgttggttgggctcaggcaggtcgtgatattccgttttatgggactacgcatgctgactacttctatggaccagttccgtgtgctcgttctctcacaaaagcagaagttgatggggcttacgagcaagaaactggcaacgtgattttagaagagtttagcaagcgaggcttagatcctatggcggttccaggaatcgtggttcgcaatcatggcccatttacgtgggggaaaaccccagagcaagccgtttaccactcggttgtcttagaagaagtggctaggatgaatcgcttgacagaacaaatcaatccacgcgtagagccagcgccacgatacattatggataagcattatttgcgtaaacatggcccaaatgcttattacggtcaaaaatga

SEQ ID NO: 35223 - protein, 255 aa, Streptococcus pyogenes MGAS8232
MLSKKLRTSFTHLLRKRGWHNMAKNLQEMRERVCAANKSLPQHGLVKFTWGNVSEVCRELGRIVIKPSGVDYDLLTPENMVVTDLDGNVVEGDLNPSSDLPTHVELYKAWPEVGGIVHTHSTEAVGWAQAGRDIPFYGTTHADYFYGPVPCARSLTKAEVDGAYEQETGNVILEEFSKRGLDPMAVPGIVVRNHGPFTWGKTPEQAVYHSVVLEEVARMNRLTEQINPRVEPAPRYIMDKHYLRKHGPNAYYGQK

SEQ ID NO: 35224 - DNA, 771 bp, Yersinia pestis KIM
  CDS (1)..(771): transl_table=11
atgacatcattcgaataccgaatgatgtttttcattatcgcctgcccatctgaatactatttcatgaggtgcacgatgttagaacagttaaaacaacaggtctttgaggctaacttggcactccccaaatataagttggtgacattcacgtgggggaatgttagcggcattgatcgcgaacatggattggtggtgattaagccctctggcgttgaatatgatgtcatgagcgtcaatgacatggtggtggtcgatttagcaaccggcaaggttgtggaaggggataaaaaaccctcgtcggatacggatacccatctggtgttatatcgagctttcgctgagattggcggcattgttcatacgcactcacgccatgccacgatttgggcgcaggcgggcaaatcattatctgcattgggaaccacccacgcagactatttttacgggccgatcccttgcacccgcttgatgaccgaggcagaaattaccggtgattatgagcatgagaccggtaaggtgattgtggagactttcgctgaacaggggctgcgagcggcagacattccggccgtcttggtcaatggtcacggccccttcgcgtgggggagcaatgcggctaatgcagtacacaatgccgtggtgttagaagagatagcctatatgaatctgtttactcatcagctaacgcccggcgtaggagatatgcagcagacgttgttggataagcattatttgcgtaagcatggggctgcggcgtattacggccaataa

SEQ ID NO: 35225 - protein, 256 aa, Yersinia pestis KIM
MTSFEYRMMFFIIACPSEYYFMRCTMLEQLKQQVFEANLALPKYKLVTFTWGNVSGIDREHGLVVIKPSGVEYDVMSVNDMVVVDLATGKVVEGDKKPSSDTDTHLVLYRAFAEIGGIVHTHSRHATIWAQAGKSLSALGTTHADYFYGPIPCTRLMTEAEITGDYEHETGKVIVETFAEQGLRAADIPAVLVNGHGPFAWGSNAANAVHNAVVLEEIAYMNLFTHQLTPGVGDMQQTLLDKHYLRKHGAAAYYGQ

SEQ ID NO: 35226 - DNA, 804 bp, Yersinia pestis KIM
  CDS (1)..(804): transl_table=11
gtgcaggatttccagccgatttgtacgcagtttttagctatttaccccataccggttatttcctgcggcgctgaaaatggaacaaattcagttattcaggatacgacgatgctcaacgaactgaagcagcaagttcttgccgctaatcttgctctaccgcgccataatctggtgacattcacttggggtaatgttagtgctatcgatcgccaaaagggtttactggtgattaagccttcaggtgtggaatatgcgtccatgacactggatgatatggtggtcgtggagttggagagcggcaacgtcgttgagggcagcaaaaaaccatcatcagacacggatactcaccgcgtgctgtatcttaatttcccccaaattgggggcatagtgcatacccactcccgtcatgcaactatttgggcgcaggcggggctagacttgcctgcttgggggacaacccatgctgattacttctatggatccatcccctgtacccgtttgatgacacatgaagaaattgcgggtcgttatgaatgggaaaccggtaatgtcatcgttgatactttccatgaaaggggcatcaccccagatgctgtacctgcggtgttggtgaactctcatgggccatttgcctggggtagcagtgcggagaatgcagtacacaatgcggtagtcttggaagagttagcgtatatgggcattttctcgcgtcaattgaacccgcagttgggcgatatgcaaccgcaactgctggataagcattacttacgtaaacatggcaaggatgcgtactacggccaataa

SEQ ID NO: 35227 - protein, 267 aa, Yersinia pestis KIM
MQDFQPICTQFLAIYPIPVISCGAENGTNSVIQDTTMLNELKQQVLAANLALPRHNLVTFTWGNVSAIDRQKGLLVIKPSGVEYASMTLDDMVVVELESGNVVEGSKKPSSDTDTHRVLYLNFPQIGGIVHTHSRHATIWAQAGLDLPAWGTTHADYFYGSIPCTRLMTHEEIAGRYEWETGNVIVDTFHERGITPDAVPAVLVNSHGPFAWGSSAENAVHNAVVLEELAYMGIFSRQLNPQLGDMQPQLLDKHYLRKHGKDAYYGQ

SEQ ID NO: 35228 - DNA, 717 bp, Streptococcus agalactiae 2603V/R
  CDS (1)..(717): transl_table=11
atggcaaaatcattgcaagaaatgcgtgaacgtgtgtgtgaagctaataaatcactaccagttcatagtttagttaaatttacttggggtaacgtttctgaagttgaccgcgaagcaggattgattgttatcaaaccttcaggagttgactatgaccaattgacacctgaaaatatggttgtcacagacttagagggaaatatagtggagggggatttgaatccatcatctgatcttccaactcatgttcaactttataaagcatggccagaagtcggtggtattgttcatactcattcaacagaagcagttggttgggcacaagcgggtcgcgatattccattttatggaacaacacatgcagattatttttatgggccagtaccatgtgctaggtcacttagtgaagatgaagttaacactgcttatgaaaaagaaacaggtagcgttattatagaggaatttgaacgtcgggatttagatccaatggctgttcctggtattgttgtacgtaatcatggaccatttacttgggggaaagatccagcacaagcagtttatcactcagtcgttcttgaagaagttgctaagatgaatcgtttcactgaacaaattaatccacgtgttgaaccagctccaaaatatattatggataaacactatttacgtaagcatggaccaaatgcttattatggtcaaaaaggacaagaacattaa

SEQ ID NO: 35229 - protein, 238 aa, Streptococcus agalactiae 2603V/R
MAKSLQEMRERVCEANKSLPVHSLVKFTWGNVSEVDREAGLIVIKPSGVDYDQLTPENMVVTDLEGNIVEGDLNPSSDLPTHVQLYKAWPEVGGIVHTHSTEAVGWAQAGRDIPFYGTTHADYFYGPVPCARSLSEDEVNTAYEKETGSVIIEEFERRDLDPMAVPGIVVRNHGPFTWGKDPAQAVYHSVVLEEVAKMNRFTEQINPRVEPAPKYIMDKHYLRKHGPNAYYGQKGQEH

SEQ ID NO: 35230 - DNA, 696 bp, Oceanobacillus iheyensis HTE831
  CDS (1)..(696): transl_table=11
atgttagaacaattaaaagaagaggtttttgaagcaaatttagatttgccgaaacaaggccttgttaaatatacatgggggaatgctagtgcctttgatcgtgaaagtggtttgtttgtcataaaacctagtggtgtggattacaaaacaatgaaagctagcgatatggttgttgttgatttagacggaaatgttgtcgaaggggaattaaatccttcatcagatacagcaactcacgcagtactttataagcgctaccctgaacttggcggaattgttcacacacactccacttgggcaactgtctgggcccaagcaggtctcgatgtaccggtgatgggtactacacacgcggatacgttttatggcgcggtaccttgtacccgatttttgactcaggaagagatcgaccgtggatatgaggcggaaactgggcgtgtaattatagaaacgtttgaagaacgaggtttagatgttttcgcaatcccaggtgttttgcttcacgggcacgctccttttacttggggaaaagatgttcaatcagcagttgtgaatagcgtggtactagaagaagtggcaaaaatgaatttatttgctcgagaattaaaccgatttgcaccggaattaccggatcggatcttagataaacattatttacgtaagcatggtggagatgcttattacggacaaaaataa

SEQ ID NO: 35231 - protein, 231 aa, Oceanobacillus iheyensis HTE831
MLEQLKEEVFEANLDLPKQGLVKYTWGNASAFDRESGLFVIKPSGVDYKTMKASDMVVVDLDGNVVEGELNPSSDTATHAVLYKRYPELGGIVHTHSTWATVWAQAGLDVPVMGTTHADTFYGAVPCTRFLTQEEIDRGYEAETGRVIIETFEERGLDVFAIPGVLLHGHAPFTWGKDVQSAVVNSVVLEEVAKMNLFARELNRFAPELPDRILDKHYLRKHGGDAYYGQK

SEQ ID NO: 35232 - DNA, 693 bp, Bifidobacterium longum NCC2705
  CDS (1)..(693): transl_table=11
atggcaactttggctgattacggccccgaggttcgcgccgaggtcaagcaggttcgtgaggtcgtctccaacctgcaccagcagctgatcaagtggaacctggtcgtgtggaccgcgggcaacgtttcccagcgtctgcacaccgccgacctgttcgtcatcaagccctccggcctgcgctacgagtacctgaccccgtcctccatggtcgtgtgcgaccttgacggcaacgtggtcgacggcaccgaagccccgtcctcggacaccgcttcccacgcctacatctaccgcaacatgcccgacgtctacggtgtcgtgcacacccactccacctacgccaccgcttgggctgccactggtcagaacatcccgtgcggcctgacgatgatgggtgacgagttcggcggcccggtgccggtcggcccgttccgtctgatcggctccgaggcgatcggcaagggtgtcgtcgagaccctcaagaagtacccgaagtccccggccgtcctcatgcagaaccatggccccttcaccatcggcaaggatgctgaaggcgccgtcaaggccgctgccatgaccgaggaagtcgctcacaccatgtgggccgcccgtcagctcggtgacatcatcgagatcgaccaggccgacatcgataagctcaacgaccgctaccagaacgtctacggtcagcactga

SEQ ID NO: 35233 - protein, 230 aa, Bifidobacterium longum NCC2705
MATLADYGPEVRAEVKQVREVVSNLHQQLIKWNLVVWTAGNVSQRLHTADLFVIKPSGLRYEYLTPSSMVVCDLDGNVVDGTEAPSSDTASHAYIYRNMPDVYGVVHTHSTYATAWAATGQNIPCGLTMMGDEFGGPVPVGPFRLIGSEAIGKGVVETLKKYPKSPAVLMQNHGPFTIGKDAEGAVKAAAMTEEVAHTMWAARQLGDIIEIDQADIDKLNDRYQNVYGQH

SEQ ID NO: 35234 - DNA, 711 bp, Streptococcus mutans UA159
  CDS (1)..(711): transl_table=11
atgttagtacctgaactgcgcgaacgcgtctacaaagctaatatggaactgccagaacatggtctggttaagtttacttggggaaatgtctcagctattgaccgcgaaggtggctatattgccattaaaccatctggagttgcttatgacaaattatcggcggaaaatatggtcattacagatcttgatggaaatatccttgaaggagacttgaatccttcatcagatttgccaacgcatgtcgaattgtacaaagctttcccggaagttggcggtattgtccatacacactcaacggaaggcgtgtcttgggcacaggccggccgtgatattccttgttacggaacaacacatgcagataccttctacggggcaattccatgtgcgcgtgctttgacgccgaaagaaatcaatggtgaatatgaaaaagaaaccggaaaagttatcattgaagaatttaaaaaacgcggtcttgaccctttagctgtttctggtgtcactgtccgcaatcacggaccatttgcttggggaaaagacgaaaagtcagctgtatacaatgcagttgtcttggaagaagcagctcgcatggcgagatatacagaaagtatcaatccagaagtggaagaggtaccgcaagcactcaaagataaacattatctccgtaagcatggtaagaatgcttactatggacaaaaaggcgatagtcattaa

SEQ ID NO: 35235 - protein, 236 aa, Streptococcus mutans UA159
MLVPELRERVYKANMELPEHGLVKFTWGNVSAIDREGGYIAIKPSGVAYDKLSAENMVITDLDGNILEGDLNPSSDLPTHVELYKAFPEVGGIVHTHSTEGVSWAQAGRDIPCYGTTHADTFYGAIPCARALTPKEINGEYEKETGKVIIEEFKKRGLDPLAVSGVTVRNHGPFAWGKDEKSAVYNAVVLEEAARMARYTESINPEVEEVPQALKDKHYLRKHGKNAYYGQKGDSH

SEQ ID NO: 35236 - DNA, 696 bp, Escherichia coli CFT073
  CDS (1)..(696): transl_table=11
atgttagaagatctcaaacgccaggtattagaagccaacctggcgctgccaaaacacaacctggtcacgctcacctggggcaatgtcagcgccgttgatcgcgggcgcggcgtcctggtgatcaaaccttccggcgtcgactacagcatcatgaccgctgacgatatggtcgtggtcagcatcgaaaccggtgaagtggttgaaggtacgaaaaagccctcctccgacacgccaactcaccggctgctctatcaggcattcccgtctattggcggcattgtgcacacacactcgcgccacgccaccatctgggcgcaggcgggccagtcgattccagcagccggcaccacccacgccgactatttctacggcaccattccctgcacccgcaaaatgaccgacgcagaaatcaacggtgaatatgagtgggaaaccggtaacgtcatcgtagaaaccttcgaaaaacagggtatcaatgcagcgcaaatgcccggcgtgctggtccattctcacggcccatttgcatggggaaaaaacgccgaagatgcggtgcataacgccatcgtgctggaagaagtcgcttatatggggatattctgccgtcagttagcgccgcagttaccggatatgcagcaaacgctgctggataaacactatctgcgtaagcatggcgcgaaggcatattacgggcagtaa

SEQ ID NO: 35237 - protein, 231 aa, Escherichia coli CFT073
MLEDLKRQVLEANLALPKHNLVTLTWGNVSAVDRGRGVLVIKPSGVDYSIMTADDMVVVSIETGEVVEGTKKPSSDTPTHRLLYQAFPSIGGIVHTHSRHATIWAQAGQSIPAAGTTHADYFYGTIPCTRKMTDAEINGEYEWETGNVIVETFEKQGINAAQMPGVLVHSHGPFAWGKNAEDAVHNAIVLEEVAYMGIFCRQLAPQLPDMQQTLLDKHYLRKHGAKAYYGQ

SEQ ID NO: 35238 - DNA, 696 bp, Escherichia coli CFT073
  CDS (1)..(696): transl_table=11
atgttagagcaactgaaagctgacgtgctggcggcaaacctggcgcttcccgttcatcatctggtgacgttcacctggggcaatgtcagcgcgatagacgaaacgcggcaatggatggtgattaagccttccggcgttgagtatgaggtaatgaccgccgacgatatggtggtggttgagatagccagcggcaaggtggtggaaggcagcaaaaagccctcttccgacacgccaacgcatctggcgctttaccgtcgctttgcggagattggcggcatagtgcatacccactcgcgccacgccaccatctggtcgcaggccggacttgatctccccgcctggggcactactcacgccgattatttttacggagccatcccctgcacgcgcctgatgaccgcagaagagatcaacggcgagtatgaataccagaccggcgaagtgatcattaaaaccttcgaagagcgtgggttgaacccggcacaaatcccggcggtactggtgcattctcacggcccgttcgcctggggaaaaaatgccgccgatgcggtgcataacgccgtggtactggaagagtgcgcctatatgggtctgttctcgcgccagcttgcgccacagctccctgcgatgcaaaacgaactgctggataagcactacctgcgtaagcatggggccaatgcctattacgggcagtag

SEQ ID NO: 35239 - protein, 231 aa, Escherichia coli CFT073
MLEQLKADVLAANLALPVHHLVTFTWGNVSAIDETRQWMVIKPSGVEYEVMTADDMVVVEIASGKVVEGSKKPSSDTPTHLALYRRFAEIGGIVHTHSRHATIWSQAGLDLPAWGTTHADYFYGAIPCTRLMTAEEINGEYEYQTGEVIIKTFEERGLNPAQIPAVLVHSHGPFAWGKNAADAVHNAVVLEECAYMGLFSRQLAPQLPAMQNELLDKHYLRKHGANAYYGQ

SEQ ID NO: 35240 - DNA, 735 bp, Escherichia coli CFT073
  CDS (1)..(735): transl_table=11
ttgggtgaaagcgcgcatggccaaagctggcatggtggaggcggcataatgcaaaagctgaaacagcaggtatttgaagccaacatggatctgccgcgctacgggctggtgacctttacctggggcaacgtcagcgccatcgaccgcgaacgcgggctggtggtgatcaagcccagcggcgtcgcctacgaaaccatgaaagcagacgatatggtggtggtcgatatgagcggcaaggtagtggaaggggagtatcgcccgtcttctgacaccgcgacgcatcttgaactctaccgtcgttatccgtcgcttggtggtattgtccatacccactccactcatgccaccgcatgggcgcaggcggggctggcgatcccggcgttaggcaccacgcacgccgattacttctttggcgacatcccgtgcacgcgcggattaagcgaagaagaggtgcagggtgagtacgaactgaataccggcaaagtaattatcgaaacgctgggtgacgccgagccgctgcatacgccgggaattgtggtgtatcagcacggaccgttcgcctgggggaaagatgcccacgacgcggtgcataacgcggtggtgatggaagaagtggcgaaaatggcgtggattgcgcgtagtattaacccacaactgaatcacatcgacagcttcctgatgaataaacacttcatgcgtaagcacggtcccaacgcttattacgggcagaagtaa

SEQ ID NO: 35241 - protein, 244 aa, Escherichia coli CFT073
MGESAHGQSWHGGGGIMQKLKQQVFEANMDLPRYGLVTFTWGNVSAIDRERGLVVIKPSGVAYETMKADDMVVVDMSGKVVEGEYRPSSDTATHLELYRRYPSLGGIVHTHSTHATAWAQAGLAIPALGTTHADYFFGDIPCTRGLSEEEVQGEYELNTGKVIIETLGDAEPLHTPGIVVYQHGPFAWGKDAHDAVHNAVVMEEVAKMAWIARSINPQLNHIDSFLMNKHFMRKHGPNAYYGQK

SEQ ID NO: 35242 - DNA, 732 bp, Mycoplasma penetrans HF-2
  CDS (1)..(732): transl_table=4
atgactttaaaagatattaatttacaagaattaaaagaacttaaagaaattgtgtatcaagctaatatgttactttctgaatatggattagtaatccatacttgaggtaatgttagtgctattagtaaagatagatcttattatgttattaaaccaagtggtgtaagttataaaactatgaaaccagatgatatggtagtaatggatttaaatgacaatgttatttctggaactttgaacccatcaactgatatgccaacacattctattttgtataaaacatttgataaaatacaagcaattgttcatacccacagtcctcatgctgtagcatttgcacaagctggaaaagatattccttgctttggaacaactcatgctgataacttctttggtccagtaccatgtgcaagagatttaactaaagaagaaattaattctgaatatgaaaaaaacactggtaaagtgattattgaaaaatttaaattaaataatttagattatgcagcaacacccgcttgtttagttaaagaacatggtccattctgttgaagtttaaaaaatgcaattgatgcatctaatttagcacttactttagaagaagttgctaaaatggcaatttatacaatgcaagttgataataaagctacagaagctaaaaaagagctacaattaaaacattattatagaaaacatggtcctaatgcatattatggacaaaataaaaagtaa

SEQ ID NO: 35243 - protein, 243 aa, Mycoplasma penetrans HF-2
MTLKDINLQELKELKEIVYQANMLLSEYGLVIHTWGNVSAISKDRSYYVIKPSGVSYKTMKPDDMVVMDLNDNVISGTLNPSTDMPTHSILYKTFDKIQAIVHTHSPHAVAFAQAGKDIPCFGTTHADNFFGPVPCARDLTKEEINSEYEKNTGKVIIEKFKLNNLDYAATPACLVKEHGPFCWSLKNAIDASNLALTLEEVAKMAIYTMQVDNKATEAKKELQLKHYYRKHGPNAYYGQNKK

SEQ ID NO: 35244 - DNA, 693 bp, Vibrio vulnificus CMCP6
  CDS (1)..(693): transl_table=11
atgtatagcgaactgaaacaacgcgtgctcgaagccaacctcaaactgcccaaatacggtttggtcacttttacctggggcaatgtctctgaaattgaccgtgaacgcggcgtgatcgcgattaagccatcaggcgttgagtacgagggaatgcaggtagaacatatcgttgtcgttgatctcgatggcaacatcattgagggcaacctgaacccatccagcgataccgcgacgcatctcgaaatctacaaagcgtttccagacgttggcggcgtggttcatacccactcacgcagcgcgacgatttgggcacaagcagggatcgacattccggcactcggtaccactcatgccgactatttttatggcgacattccctgcacgcgaaaactgtcgcaaagcgagattgcgcaagagtacgagaagaacaccgggttagtgattgtggaagagtttcgtcatcgtcgtatcgatccaatggctgtcccaagcgtgattgtcgcaggtcatgcacctttctcttggggtagcaatgccgatgatgcggtgcacaacgcagtggtactggaagagatttctgccatggctctcgccactcgctcgctcaacagcggcatcaagatccagccagaactgtcagacaaacattacctgcgtaagcacggtgaaaacgcctactacggacagaggtaa

SEQ ID NO: 35245 - protein, 230 aa, Vibrio vulnificus CMCP6
MYSELKQRVLEANLKLPKYGLVTFTWGNVSEIDRERGVIAIKPSGVEYEGMQVEHIVVVDLDGNIIEGNLNPSSDTATHLEIYKAFPDVGGVVHTHSRSATIWAQAGIDIPALGTTHADYFYGDIPCTRKLSQSEIAQEYEKNTGLVIVEEFRHRRIDPMAVPSVIVAGHAPFSWGSNADDAVHNAVVLEEISAMALATRSLNSGIKIQPELSDKHYLRKHGENAYYGQR

SEQ ID NO: 35246 - DNA, 729 bp, Lactobacillus plantarum WCFS1
  CDS (1)..(729): transl_table=11
atgctagaagcattaaaacaagaagtttatgaggctaacatgcagcttccaaagctgggcctggttacttttacctggggcaatgtctcgggcattgaccgggaaaaaggcctattcgtgatcaagccatctggtgttgattatggtgaattaaaaccaagcgatttagtcgttgttaacttacagggtgaagtggttgaaggtaaactaaatccgtctagtgatacgccgactcatacggtgttatataacgcttttcctaatattggcggaattgtccatactcattcgccatgggcagttgcctatgcagctgctcaaatggatgtgccagctatgaacacgacccatgctgatacgttctatggtgacgtgccggccgcggatgcgctgactaaggaagaaattgaagcagattatgaaggcaacacgggtaaaaccattgtgaagacgttccaagaacggggcctcgattatgaagctgtaccagcctcattagtcagccagcacggcccatttgcttggggaccaacgccagctaaagccgtttacaatgctaaagtgttggaagtggttgccgaagaagattatcatactgcgcaattgacccgtgcaagtagcgaattaccacaatatttattagataagcattatttacgtaagcatggtgcaagtgcctattatggtcaaaataatgcgcattctaaggatcatgcagttcgcaagtaa

SEQ ID NO: 35247 - protein, 242 aa, Lactobacillus plantarum WCFS1
MLEALKQEVYEANMQLPKLGLVTFTWGNVSGIDREKGLFVIKPSGVDYGELKPSDLVVVNLQGEVVEGKLNPSSDTPTHTVLYNAFPNIGGIVHTHSPWAVAYAAAQMDVPAMNTTHADTFYGDVPAADALTKEEIEADYEGNTGKTIVKTFQERGLDYEAVPASLVSQHGPFAWGPTPAKAVYNAKVLEVVAEEDYHTAQLTRASSELPQYLLDKHYLRKHGASAYYGQNNAHSKDHAVRK

SEQ ID NO: 35248 - DNA, 672 bp, Tropheryma whipplei str. Twist
  CDS (1)..(672): transl_table=11
atgttagaggatttgagggctcgcgtttgcgagggtaacctgcgccttcccagagagggcttggttacttggacctccggtaacttgtctgcgagagatcctgatactgggcttgttgttataaaaccttctggggtcctgtatgagaatatgactccggaggatatggttgttgtttccctcgacggtgaaattgttgaaggttctatgccgccttcgtccgataccgcgtcccatttgggcgtgtaccgcaagcgggatgatgttgtcagtattgtgcacactcattctaggtatgctactgcatttgctgcggttggaaaagagattccatgctgtataactgcagtcgctgatgaatttggtggtccaattccttgtggggattatgcggtcattggcggcgaagagattggcgaagagattgtcagaaagattggtcactctccggctatactcatgaaacagcatggagtttttaccgttggcgcgaccatacacgatgcgctcaaagctgcggttatggtcgaggatgtcgcaagaacaatctttgctgcgatgcagataggcgatattgagcctttgcctgaggtcgaaatcaggcgaaattatgagagatataaaaatagatacgggactatgtccgcgagtgatggggtaaaaagtgcctag

SEQ ID NO: 35249 - protein, 223 aa, Tropheryma whipplei str. Twist
MLEDLRARVCEGNLRLPREGLVTWTSGNLSARDPDTGLVVIKPSGVLYENMTPEDMVVVSLDGEIVEGSMPPSSDTASHLGVYRKRDDVVSIVHTHSRYATAFAAVGKEIPCCITAVADEFGGPIPCGDYAVIGGEEIGEEIVRKIGHSPAILMKQHGVFTVGATIHDALKAAVMVEDVARTIFAAMQIGDIEPLPEVEIRRNYERYKNRYGTMSASDGVKSA

SEQ ID NO: 35250 - DNA, 660 bp, Tropheryma whipplei TW08/27
  CDS (1)..(660): transl_table=11
ttgagggctcgcgtttgcgagggtaacctgcgccttcccagagagggcttggttacttggacctccggtaacttgtctgcgagagatcctgatactgggcttgttgttataaaaccttctggggtcctgtatgagaatatgactccggaggatatggttgttgtttccctcgacggtgaaattgttgaaggttctatgccgccttcgtccgataccgcgtcccatttgggcgtgtaccgcaagcgggatgatgttggcagtattgtgcacactcattctaggtatgctactgcatttgctgcggttggaaaagagattccatgctgtataactgcagtcgctgatgaatttggtggtccaattccttgtggggattatgcggtcattggcggcgaagagattggcgaagagattgtcagaaagattggtcactctccggctatactcatgaaacagcatggagtttttaccgttggcgcgaccatacacgatgcgctcaaagctgcggttatggtcgaggatgtcgcaagaacaatctttgctgcgatgcagataggcgatattgagcctttgcctgaggccgaaatcaggcgaaattatgagagatataaaaatagatacgggactatgtccgcgagtgatggggtaaaaagtgcctag

SEQ ID NO: 35251 - protein, 219 aa, Tropheryma whipplei TW08/27
MRARVCEGNLRLPREGLVTWTSGNLSARDPDTGLVVIKPSGVLYENMTPEDMVVVSLDGEIVEGSMPPSSDTASHLGVYRKRDDVGSIVHTHSRYATAFAAVGKEIPCCITAVADEFGGPIPCGDYAVIGGEEIGEEIVRKIGHSPAILMKQHGVFTVGATIHDALKAAVMVEDVARTIFAAMQIGDIEPLPEAEIRRNYERYKNRYGTMSASDGVKSA

SEQ ID NO: 35252 - DNA, 741 bp, Vibrio parahaemolyticus RIMD 2210633
  CDS (1)..(741): transl_table=11
atgtctgaacaaaccgtctggaatgatgcgaactcattagtcgaacgaatcaaaacgctgcgtcaccaagtctggcaagccaatatggatttacaacgtcataaccttgtgacgttcacgtggggcaatgtgtcaggcatcgatagagaatctggattggttgttatcaaacctagcggtgttgagtactgcgaactgaatgctgaaaacatggtggtggtcgatctgcacggccaagtggttgaagggaaactcaacccatcttccgacacggccacgcatctagagctttatcgccatttcccggagattggcggcatcgttcacacccactctcctcaggcaacggcatgggcacaagcaggcagagccattcccgcgttgggcacaactcatgcggattatttctacggacaaattgcgtgcactcgcgccttgagcgacgaagagatcgcgcacaactacgagctcaacactggcaaagtcatcgtcgaaaccatcggtgattcaaacgttatggcgtcacccggcattttggtcaaagaacacgcaccttttacttggggtaaaagccctgctcaagcggttcacaacgccgtagtggttgaagttgtcgctggcatggccttgcaaacactgcaaatcaatgccgaggtagacactcttaacccttcgcttctcgacaaacattatttacgtaagcacggcgcgaacgcctactacggtcaaagcaaaaaataa

SEQ ID NO: 35253 - protein, 246 aa, Vibrio parahaemolyticus RIMD 2210633
MSEQTVWNDANSLVERIKTLRHQVWQANMDLQRHNLVTFTWGNVSGIDRESGLVVIKPSGVEYCELNAENMVVVDLHGQVVEGKLNPSSDTATHLELYRHFPEIGGIVHTHSPQATAWAQAGRAIPALGTTHADYFYGQIACTRALSDEEIAHNYELNTGKVIVETIGDSNVMASPGILVKEHAPFTWGKSPAQAVHNAVVVEVVAGMALQTLQINAEVDTLNPSLLDKHYLRKHGANAYYGQSKK

SEQ ID NO: 35254 - DNA, 696 bp, Salmonella enterica subsp. enterica serovar Typhi Ty2
  CDS (1)..(696): transl_table=11
atgttagaagatctcaaacaccaggtactggaagccaatctggcgctgccaaaacacaacctggtcaccctcacctggggtaacgttagcgccgtcgatcgcgaacgcggcgtactggtgattaagccgtccggcgtcgattatagcgtcatgaccgctgacgatatggtggtggtcagcctggagaccggtgaagtcgttgaaggtcataagaaaccgtcgtccgatacgccaacccaccgtctgttatatcaggcatttccgactatcggcagcatcgtacacacccattcgcgccacgcgactatctgggcgcaggcgggtcagccgattccggcgacgggcaccacccacgccgactatttctacggtacgattccctgcactcgcaaaatgaccgaggcggaaattaatggcgagtatgaatgggaaacgggcaatgtcattgttgaagcctttgaaaaacaaggcattaacgccgctcaaatgcccggcgtgcttgtccattcgcacggcccgtttgcctggggtaaaaatgccgaggatgccgtgcataacgccatcgtgctggaagaagtggcctatatggggatcttctgccgccagcttgcgccgcagttgcccgacatgcagcaatccctgctggataaacactatttacgcaaacacggcgcaaaagcctattacgggcagtaa

SEQ ID NO: 35255 - protein, 231 aa, Salmonella enterica subsp. enterica serovar Typhi Ty2
MLEDLKHQVLEANLALPKHNLVTLTWGNVSAVDRERGVLVIKPSGVDYSVMTADDMVVVSLETGEVVEGHKKPSSDTPTHRLLYQAFPTIGSIVHTHSRHATIWAQAGQPIPATGTTHADYFYGTIPCTRKMTEAEINGEYEWETGNVIVEAFEKQGINAAQMPGVLVHSHGPFAWGKNAEDAVHNAIVLEEVAYMGIFCRQLAPQLPDMQQSLLDKHYLRKHGAKAYYGQ

SEQ ID NO: 35256 - DNA, 684 bp, Bacteroides thetaiotaomicron VPI-5482
  CDS (1)..(684): transl_table=11
atgctggaagaactgaaagaaaaagtatttcatgccaatctcgaattggtaaagcatggattagtcatctttacatggggaaatgtttctgccatcgaccgtgaaacggaactggtagtcatcaaacccagtggagtcagttatgatgatatgaaagcggaagatatggtagtagtggacctggatggcaaagtcgtcgaaggacggctgaagccatcctcagatactcctactcacgtggtactctacaaagcattccccgaaatcggcggagtggtgcatacccactctacttatgctaccgcatgggcgcaggccggttgtgatattcccaatatcgggacaactcacgctgactatttccatgatgcaatcccctgcacagcggatatgacggaagctgaagtaaaaggtgcctatgaactggaaaccggaaacgtgatcgtaaaacgtttcgaaggcctgaaccctgtacatacaccgggagtattggtcaagaatcatggtcctttctcttggggaaaagacgcacacgatgccgtacacaatgcagtagtgatggaacaagttgccaaaatggcaagcattgcttatgccgtgaatcccaatttaacaatgaacccgctgctggtagagaaacacttcagccgcaagcatggtccgaacgcttactacggacaataa

SEQ ID NO: 35257 - protein, 227 aa, Bacteroides thetaiotaomicron VPI-5482
MLEELKEKVFHANLELVKHGLVIFTWGNVSAIDRETELVVIKPSGVSYDDMKAEDMVVVDLDGKVVEGRLKPSSDTPTHVVLYKAFPEIGGVVHTHSTYATAWAQAGCDIPNIGTTHADYFHDAIPCTADMTEAEVKGAYELETGNVIVKRFEGLNPVHTPGVLVKNHGPFSWGKDAHDAVHNAVVMEQVAKMASIAYAVNPNLTMNPLLVEKHFSRKHGPNAYYGQ

SEQ ID NO: 35258 - DNA, 711 bp, Enterococcus faecalis V583
  CDS (1)..(711): transl_table=11
atgaacaataaagcgatcatccaagcaatgaaacaacgtgtttatgaagcgaatctggctttgccaaaactgggcttagtcaaattaacgtggggcaatgttagtgaaatcaatcggtcattagggattatcgtaattaaaccaagcggcgtcaagtatcaagaaatgaccaaggaacagatggtagtgactgatttaaagggacaactattggaaaccaatgcattaaagccgtcttctgatttacccacgcatctttatctttatcaaaaaatgccagaaattggagcgattgcgcacacgcactccctgaatagtgttacgtgggctcaagcagggcgagccttacctccttacggtaccacccatgcggatgctttttatggcgctgtaccttgcacaagagcgctctctgaaagtgaaattaaagaaaactatgaagaagagactggcaaagtcattgttgaaacatttcatgaacaagaattagatcctttagcagttccaggagtgttagtttatggacatggcccatttacttggggaatgactccggaaaaagcagttgaaaacagtttgattttagatgaaatctgttcaatggcacgtttgacggaaataattaatccagatgttgaaccaattgatcattttttattggataaacactatcttagaaaacatgggatttccgcttattatggtcagtga

SEQ ID NO: 35259 - protein, 236 aa, Enterococcus faecalis V583
MNNKAIIQAMKQRVYEANLALPKLGLVKLTWGNVSEINRSLGIIVIKPSGVKYQEMTKEQMVVTDLKGQLLETNALKPSSDLPTHLYLYQKMPEIGAIAHTHSLNSVTWAQAGRALPPYGTTHADAFYGAVPCTRALSESEIKENYEEETGKVIVETFHEQELDPLAVPGVLVYGHGPFTWGMTPEKAVENSLILDEICSMARLTEIINPDVEPIDHFLLDKHYLRKHGISAYYGQ

SEQ ID NO: 35260 - DNA, 714 bp, Haemophilus ducreyi 35000HP
  CDS (1)..(714): transl_table=11
atgttaactgaattatccgctaaactaaccgctatgcgtgagcgagtatttaacgctaatctagacttacctaaatataaactcatcacatttacttggggaaatgtcagcgaaatcgatcgcgaaacaggttatgttgctatcaagccttccggtgttgaatacgacaccatgacagtcgaagatatcgtattagttgatctagatggtaatcgcgtatttggcgacaaaaaaccctcttctgataccgccactcatttagccttttatcgtgcttttgccaatattggcggcgtagtgcatacccattcacgtcatgcaacagcttgggcacaaactggtcgcgatatcttggcactaggcacaactcaaggcgattatttttacggctcaatcccttgtacccgccaaatgacccctgctgaaattgcaggcgaatatgaattagaaaccggtaaagtagtcatcgaaacgttccgtacacgtaatattgatcctgatatggtccctggagtattggtgcattcgcatgggccatttacttggggaaaagatgctcacgatgcggtacataattctgtcgtcttagaagaagtcgcctatatgaattttgtcagccatcagctacagccgaatattagttcaatgcaacaagaattgctcgacaaacattacttgcgcaaacacggtaaaaatgcctattacggccaataa

SEQ ID NO: 35261 - protein, 237 aa, Haemophilus ducreyi 35000HP
MLTELSAKLTAMRERVFNANLDLPKYKLITFTWGNVSEIDRETGYVAIKPSGVEYDTMTVEDIVLVDLDGNRVFGDKKPSSDTATHLAFYRAFANIGGVVHTHSRHATAWAQTGRDILALGTTQGDYFYGSIPCTRQMTPAEIAGEYELETGKVVIETFRTRNIDPDMVPGVLVHSHGPFTWGKDAHDAVHNSVVLEEVAYMNFVSHQLQPNISSMQQELLDKHYLRKHGKNAYYGQ

SEQ ID NO: 35262 - DNA, 693 bp, Vibrio vulnificus YJ016
  CDS (1)..(693): transl_table=11
atgtatagcgaactgaaacaacgcgtgctcgaagccaacctcaaactgcccaaatacggtttggtcacttttacttggggcaatgtctctgagattgaccgtgaacgcggcgtgatcgcgattaagccatcaggcgttgagtacgagggaatgcgggtagaacatatcgttgtcgttgatctcgatggcaacatcattgagggcaacctgaacccatccagcgataccgcgacgcatctcgaaatctacaaagcgtttccagacgttgggggcgtggttcatacccactcacgcagcgcgacgatttgggcacaagcagggatcgacattccggcactcggtaccactcatgccgactatttttatggcgacattccttgcacgcgaaaactgtcgcaaagcgagattgcgcaagagtacgagaagaacaccgggttagtgattgtggaagagtttcgtcatcgtcgcatcgagccaatggctgtcccaagcgtgattgtcgcaggtcatgcacctttctcttggggtagcaatgccgatgatgcggtgcacaacgcagtggtactggaagagatttcggccatggctctcgccactcgctcgctcaacagcggcatcaagatccagccagaactgtcagacaaacattacctgcgtaagcacggtgaaaacgcctactacggacagaggtaa

SEQ ID NO: 35263 - protein, 230 aa, Vibrio vulnificus YJ016
MYSELKQRVLEANLKLPKYGLVTFTWGNVSEIDRERGVIAIKPSGVEYEGMRVEHIVVVDLDGNIIEGNLNPSSDTATHLEIYKAFPDVGGVVHTHSRSATIWAQAGIDIPALGTTHADYFYGDIPCTRKLSQSEIAQEYEKNTGLVIVEEFRHRRIEPMAVPSVIVAGHAPFSWGSNADDAVHNAVVLEEISAMALATRSLNSGIKIQPELSDKHYLRKHGENAYYGQR

SEQ ID NO: 35264 - DNA, 696 bp, Erwinia carotovora subsp. atroseptica SCRI1043
  CDS (1)..(696): transl_table=11
atgttagaaacgctaaaaaaacaggtgttggaagccaatctggccttgccgcagcaccatctggtgacgtttacttggggaaatgtcagtgcggtagaccgacagcgtggcctgatggtgatcaagccttccggcgtggagtattcggccatgacgttggaggatatggttgtcgttgagctggaaagcggcaaagtggtggaggggacgaagaaaccatcgtcagataccgatactcaccgtgtactgtatctggaatttgccgatatcggcggtattgtgcatacccattcccgccatgccacgatctgggcgcaagccggtaaagatatccccgcctggggaacgacgcatgcggactacttttatggccccattccctgcacgcgtctgatgacggacgaggaaatcaacggtcgctatgagtgggatacgggaacggtgatagttgaaactttccggcagcgcggcatttctcctgtggatgtccctgccgtgttggttaactcgcatggcccctttgcgtggggcaaagatgctgataacgcggtgcataatgccgtggttctggaagagcttgcctacatgggaattttttcgcgtcagttaacgcctcagttgggcgagatgcagcaaacgctgttggataaacactacttgcgtaagcacggtaagaacgcgtattacggacaataa

SEQ ID NO: 35265 - protein, 231 aa, Erwinia carotovora subsp. atroseptica SCRI1043
MLETLKKQVLEANLALPQHHLVTFTWGNVSAVDRQRGLMVIKPSGVEYSAMTLEDMVVVELESGKVVEGTKKPSSDTDTHRVLYLEFADIGGIVHTHSRHATIWAQAGKDIPAWGTTHADYFYGPIPCTRLMTDEEINGRYEWDTGTVIVETFRQRGISPVDVPAVLVNSHGPFAWGKDADNAVHNAVVLEELAYMGIFSRQLTPQLGEMQQTLLDKHYLRKHGKNAYYGQ

SEQ ID NO: 35266 - DNA, 669 bp, Propionibacterium acnes KPA171202
  CDS (1)..(669): transl_table=11
atgcttgaaaagctcaagacagacgtctgtcgaggcaacctcgaactgccccgtcatggacttgtgacgtggacctcgggcaacctgtccgctcgggaccctgagaccggccttgtcgtcatcaagccgtccgggatgctgtatgacgctatgaccccggacgatatggttgttgtcgaccttgacggcaaggtcgtggaggggcatcgaggagcgtcctcggataccgcctcacacttgtatgtctaccgacgtcgcgacgacattcggagcattatccacacccattccaccttcgccaccgcgtgggcggccactggccaggacatcccctgtgcagtgacggccatcgctgatgagtttggggggccagtgccgtgcggcgactacgcccagattggcactgaacagattggtgagcagatcatgcggttcattgaccagtcgccagcggtgctactcaaaaagcatggtgtcttcactgtcgggacctcgatcgagaaggccatcaaagcagctgtcatggttgaggacgtcgccaagaccctcacctacgccaaactcatcggcgagatctccccacttccacagtcggagatcgactccaaccacgatcgatacaccaatcgttacggcactgcggcagcatccacgggggtgacggcatga

SEQ ID NO: 35267 - protein, 222 aa, Propionibacterium acnes KPA171202
MLEKLKTDVCRGNLELPRHGLVTWTSGNLSARDPETGLVVIKPSGMLYDAMTPDDMVVVDLDGKVVEGHRGASSDTASHLYVYRRRDDIRSIIHTHSTFATAWAATGQDIPCAVTAIADEFGGPVPCGDYAQIGTEQIGEQIMRFIDQSPAVLLKKHGVFTVGTSIEKAIKAAVMVEDVAKTLTYAKLIGEISPLPQSEIDSNHDRYTNRYGTAAASTGVTA

SEQ ID NO: 35268 - DNA, 729 bp, Streptococcus pyogenes MGAS10394
  CDS (1)..(729): transl_table=11
ttgagaaagcggggttggcataatatggcgaaaaacttgcaagaaatgcgtgaacgtgtctgtgcggctaacaagtctctaccacaacacggtcttgtcaaatttacgtggggcaatgtctctgaagtttgtcgtgaattaggacgtattgtcatcaagccttctggggtggactacgacctcttgacaccagaaaacatggttgttacagaccttgatgggaatgtggtcgaaggtgatttgaacccttcttcagatctgccaacccatgtggaactttataaagcttggccagaagtgggcggtattgtccacactcactccacagaagctgttggttgggctcaggcaggtcgtgatattccgttttatgggactacgcatgctgactacttctatggaccagttccgtgtgctcgttctctcacaaaagcagaagttgatggggcttacgagcaagaaactggcaacgtgattttagaagagtttagcaagcgaggcttagatcctatggcggttccaggaatcgtggttcgcaatcatggcccatttacgtgggggaaaaccccagagcaagccgtttaccactcggttgtcttagaagaagtggctaggatgaatcgcttgacagaacaaatcaatccacgcgtagagccagcgccacgatacattatggataagcattatttgcgtaaacatggcccaaatgcttattacggtcaaaaatga

SEQ ID NO: 35269 - protein, 242 aa, Streptococcus pyogenes MGAS10394
MRKRGWHNMAKNLQEMRERVCAANKSLPQHGLVKFTWGNVSEVCRELGRIVIKPSGVDYDLLTPENMVVTDLDGNVVEGDLNPSSDLPTHVELYKAWPEVGGIVHTHSTEAVGWAQAGRDIPFYGTTHADYFYGPVPCARSLTKAEVDGAYEQETGNVILEEFSKRGLDPMAVPGIVVRNHGPFTWGKTPEQAVYHSVVLEEVARMNRLTEQINPRVEPAPRYIMDKHYLRKHGPNAYYGQK

SEQ ID NO: 35270 - DNA, 696 bp, Yersinia pseudotuberculosis IP 32953
  CDS (1)..(696): transl_table=11
atgttagaacagttaaaacaacaggtctttgaggctaacttggcactccccaaatataagttggtgacattcacgtgggggaatgtcagcggcattgatcgcgaacatggattggtggtgattaagccctctggcgttgaatatgatgtcatgagcgtcaatgacatggtggtggtcgatttagcaaccggcaaggtcgtggaaggggataaaaaaccctcgtcggatacggatacccatctggtgttatatcgagctttcgctgagattggcggcattgttcatacgcactcacgtcatgccacgatttgggcgcaggcgggcaaatcattatctgcattgggaaccacccacgcggactatttttacgggccgatcccttgcacccgcttgatgaccgaggcagaaattaccggtgattatgagcatgagaccggtaaggtgattgtggagactttcgctgaacaggggctgcgagcggcagacattccggccgtcttggtcaatggtcacggccccttcgcgtgggggagcaatgcggctaatgcagtacacaatgccgtggtgttagaagagatagcctatatgaatctgtttactcatcagctaacgcccggcgtaggagatatgcagcagacgttgttggataagcattatttgcgtaagcatggggctgcggcgtattacggccaataa

SEQ ID NO: 35271 - protein, 231 aa, Yersinia pseudotuberculosis IP 32953
MLEQLKQQVFEANLALPKYKLVTFTWGNVSGIDREHGLVVIKPSGVEYDVMSVNDMVVVDLATGKVVEGDKKPSSDTDTHLVLYRAFAEIGGIVHTHSRHATIWAQAGKSLSALGTTHADYFYGPIPCTRLMTEAEITGDYEHETGKVIVETFAEQGLRAADIPAVLVNGHGPFAWGSNAANAVHNAVVLEEIAYMNLFTHQLTPGVGDMQQTLLDKHYLRKHGAAAYYGQ

SEQ ID NO: 35272 - DNA, 696 bp, Yersinia pseudotuberculosis IP 32953
  CDS (1)..(696): transl_table=11
atgctcaacgaactgaagcagcaagttcttgccgctaatcttgctctaccacgccataatctggtgacattcacttggggtaatgttagtgctatcgatcgccaaaagggtttactggtgattaagccttcaggtgtggaatatgcgtccatgacactggatgatatggtggtcgtggagttggagagcggcaacgtcgttgagggcagcaaaaaaccatcatcagacacggatactcaccgcgtgctgtatcttaatttcccccaaattgggggcatagtgcatacccactcccgtcatgcaactatttgggcgcaggcggggctagacttgcctgcttgggggacaacccatgctgattacttctatggatccatcccctgtacccgtttgatgacacatgaagaaattgcgggtcgttatgaatgggaaaccggtaatgtcatcgttgatactttccatgaaaggggcatcaccccagatgctgtacctgcggtgttggtgaactctcatgggccatttgcctggggtagcagtgcggagaatgcagtacacaatgcggtagtcttggaagagttagcgtatatgggcattttctcgcgtcaattgaacccgcagttgggcgatatgcaaccgcaactgctggataagcattacttacgtaaacatggcaaggatgcgtactacggccaataa

SEQ ID NO: 35273 - protein, 231 aa, Yersinia pseudotuberculosis IP 32953
MLNELKQQVLAANLALPRHNLVTFTWGNVSAIDRQKGLLVIKPSGVEYASMTLDDMVVVELESGNVVEGSKKPSSDTDTHRVLYLNFPQIGGIVHTHSRHATIWAQAGLDLPAWGTTHADYFYGSIPCTRLMTHEEIAGRYEWETGNVIVDTFHERGITPDAVPAVLVNSHGPFAWGSSAENAVHNAVVLEELAYMGIFSRQLNPQLGDMQPQLLDKHYLRKHGKDAYYGQ

SEQ ID NO: 35274 - DNA, 696 bp, Bacillus licheniformis ATCC 14580
  CDS (1)..(696): transl_table=11
gtgctagaacaactgaaagaagaagtattacaagcgaatttggacctgcctaaatacggactcgtgaaatacacatggggaaatgcaagtgccattgaccgtgaaacaggtctattcgttatcaaaccgagcggtgttgattatgaaacgatgaaagctagtgatatggtggttgttgatttagatggcaatgttgttgaaggagagctgaggccttcatcagatacagcgactcacgcagtgctttataagcgctaccctgaaattggaggaattgtacacactcattcaacttgggcgacaatctgggctcaagcaggccttgatgttccagcgatggggaccactcatgcagacacattctatggttccgtaccatgtgcccgttacttgacacaagaggagattgatcgcggttacgaagcagaaacaggtcatgtgattatcgaaacatttgaggagcgagggttagatattttagctgttcccggtgtcttacttcacggtcatggtccatttacttggggcaaagatgtaaaatcagccgtattgaatagtgtggtgttggaggaagttgcgaaaatgaatttatttacaagagaattaaatctttttgcaaaagaattaccacaacgtattttagataaacattacttacgaaaacacggtaaaaatgcttattatggtcaaaagtaa

SEQ ID NO: 35275 - protein, 231 aa, Bacillus licheniformis ATCC 14580
MLEQLKEEVLQANLDLPKYGLVKYTWGNASAIDRETGLFVIKPSGVDYETMKASDMVVVDLDGNVVEGELRPSSDTATHAVLYKRYPEIGGIVHTHSTWATIWAQAGLDVPAMGTTHADTFYGSVPCARYLTQEEIDRGYEAETGHVIIETFEERGLDILAVPGVLLHGHGPFTWGKDVKSAVLNSVVLEEVAKMNLFTRELNLFAKELPQRILDKHYLRKHGKNAYYGQK

SEQ ID NO: 35276 - DNA, 687 bp, Bacillus licheniformis ATCC 14580
  CDS (1)..(687): transl_table=11
gtgctggaatctttgaaagaacaagtattaaaagcgaatttgcagcttgaagaataccggcttgtcacctttacatggggaaatgtcagcggtattgaccgggagaataagctggtcgtcatcaagccgagcggtgtcaaatacagcgatttgaaagccgaagatttagtggttctgaatatggacggcgagattgtggaaggggatctgaagccatcttccgatacgccgacacacctctatctttaccggcagtttcaatcgatcggcgggatcgtccatacgcattccccgtgggcgacaagctgggctcagtcagggaaggacattccgtcgctcggaacgactcatgccgactactaccacggcgacattccgtgtacacgggaaatggatcccgatgaaatcaggagtcaatacgagctgaatacaggaaaagtgattgtagagacgttccggcatcttgaccccctggcggtgcccgccgttctcgtgaacaatcacgggccgttttgctggggaaaagacgccttaactgccgtacacaatgccgtcgtcctggaagaagtcgccaagatggcgtaccgctccctgatgctgaatccgtctcttaagcggattaagagcgctttgcaggataagcattattttcgaaagcacggggcagacgcctattacggccaatag

SEQ ID NO: 35277 - protein, 228 aa, Bacillus licheniformis ATCC 14580
MLESLKEQVLKANLQLEEYRLVTFTWGNVSGIDRENKLVVIKPSGVKYSDLKAEDLVVLNMDGEIVEGDLKPSSDTPTHLYLYRQFQSIGGIVHTHSPWATSWAQSGKDIPSLGTTHADYYHGDIPCTREMDPDEIRSQYELNTGKVIVETFRHLDPLAVPAVLVNNHGPFCWGKDALTAVHNAVVLEEVAKMAYRSLMLNPSLKRIKSALQDKHYFRKHGADAYYGQ

SEQ ID NO: 35278 - DNA, 693 bp, Mannheimia succiniciproducens MBEL55E
  CDS (1)..(693): transl_table=11
atgttaaaagagttaagagaacgtgtactgcaagctaatcttgagttgccgaaacacaaattaattacctttacctggggtaatgtgagcgaaattgaccgcgaaaaaggtttagtcgccatcaaaccttcaggggtggattacgatgtgatgaccgttgatgatatcgtgattgtggatttggacggcaatcacgtttggggcgataaaaagccttcgtcagatacggcgacccatttagaactttatcgccaattccctgaaatcggcggcatcgtacatacccattcccgtcatgccaccgcctgggcgcaagcgggtgaagatctgattgccttaggtaccacccacggcgactatttctacggcgcaattccttgtacccgcaaaatgacagcggaggaaattgccggcgaatacgaactggaaacgggaaaagtgattgtggaaactttccgtaaacgcggcattaacccgacggatattccggcggtattggtgaattcccacggtccgttcgtatggggcaaagacggcttcaatgccgtacataattcggtggtattggaagaaatcgcttatatgaacgcattcagtaagcttatccgcccgaatgtgcagtcaatgcaacaggaattgctggataaacattatctgcgtaaacacggcaagaatgcctattacggtcagtaa

SEQ ID NO: 35279 - protein, 230 aa, Mannheimia succiniciproducens MBEL55E
MLKELRERVLQANLELPKHKLITFTWGNVSEIDREKGLVAIKPSGVDYDVMTVDDIVIVDLDGNHVWGDKKPSSDTATHLELYRQFPEIGGIVHTHSRHATAWAQAGEDLIALGTTHGDYFYGAIPCTRKMTAEEIAGEYELETGKVIVETFRKRGINPTDIPAVLVNSHGPFVWGKDGFNAVHNSVVLEEIAYMNAFSKLIRPNVQSMQQELLDKHYLRKHGKNAYYGQ

SEQ ID NO: 35280 - DNA, 708 bp, Bacillus clausii KSM-K16
  CDS (1)..(708): transl_table=11
atgttggacgttcttaagcgccacgtatgggaagcaaatcaaagtttgccgaaacacgggcttgtcacattcacgtggggaaatgccagtggcattgaccgtgaaaacaaccttgttgccattaaaccaagcggattagactacgacgagatgcatgtagaagatatcgttgtcgttacccttgatggtgaacttgttgaagggaagctcaacccctcatcggatcttgagacacatctcgttctatatcgaacctttccagatatacaagggattgtccacacccattctcggtgggcaacaagttgggcacaggcgggcatgtcccttcctccctttgggaccactcatgcggactatttttacggggaagtgccatgtacgcgaaaaatgacgccagaagaaatcaatggcgcttatgagaaagagacgggccatgtgattgccgagacattccgtcttcaagacccgcttgagacaccagctgttctcgtccacggccatgccccgtttacatgggggcgctcgccgaaagaagcggtctaccacgcggttgtgctcgaagaggtggcgcaaatggcagctcatacaatcgggcttaacgcaaatgccgaacgcatttcgcaacagcttcttgatcgccattatttgcgaaagcacggaaaacatgcttattacgggcaggaaaggggagatacaaaaggatga

SEQ ID NO: 35281 - protein, 235 aa, Bacillus clausii KSM-K16
MLDVLKRHVWEANQSLPKHGLVTFTWGNASGIDRENNLVAIKPSGLDYDEMHVEDIVVVTLDGELVEGKLNPSSDLETHLVLYRTFPDIQGIVHTHSRWATSWAQAGMSLPPFGTTHADYFYGEVPCTRKMTPEEINGAYEKETGHVIAETFRLQDPLETPAVLVHGHAPFTWGRSPKEAVYHAVVLEEVAQMAAHTIGLNANAERISQQLLDRHYLRKHGKHAYYGQERGDTKG

SEQ ID NO: 35282 - DNA, 717 bp, Streptococcus agalactiae A909
  CDS (1)..(717): transl_table=11
atggcaaaatcattgcaagaaatgcgtgaacgtgtgtgtgaagctaataaatcactaccagttcatggtttagttaaatttacttggggtaacgtttctgaagttgaccgcgaagcaggattgattgttatcaaaccttcaggagttgactatgaccaattgacacctgaaaatatggttgtcacagacttagagggaaatatagtggagggggatttgaatccatcatctgatcttccaactcatgttcaactttataaagcatggccagaagtcggtggtattgttcatactcattcaacagaagcagttggctgggcacaagcgggtcgcgatattccattttatggaacaacacatgcagattatttttatgggccagtaccatgtgctaggtcacttagtgaagatgaagttaacactgcttatgaaaaagaaacaggtagtgttattatagaggaatttgaacgtcggaatttagatccaatggctgttcctggtattattgtacgtaatcatggaccatttacttgggggaaagatccagcacaagcagtttatcactcagtcgttcttgaagaagttgccaagatgaatcgtttcactgaacaaattaatccacgtgttgaaccagctccaaaatatattatggataaacactatttacgtaagcatggaccaaatgcttattatggtcaaaaaggacaagaacattaa

SEQ ID NO: 35283 - protein, 238 aa, Streptococcus agalactiae A909
MAKSLQEMRERVCEANKSLPVHGLVKFTWGNVSEVDREAGLIVIKPSGVDYDQLTPENMVVTDLEGNIVEGDLNPSSDLPTHVQLYKAWPEVGGIVHTHSTEAVGWAQAGRDIPFYGTTHADYFYGPVPCARSLSEDEVNTAYEKETGSVIIEEFERRNLDPMAVPGIIVRNHGPFTWGKDPAQAVYHSVVLEEVAKMNRFTEQINPRVEPAPKYIMDKHYLRKHGPNAYYGQKGQEH

SEQ ID NO: 35284 - DNA, 693 bp, Saccharophagus degradans 2-40
  CDS (1)..(693): transl_table=11
gtgagctacttagagttaaagcgcgaagcttacgaagccaacatggaattgcagcgtcgcaatttaattatttatacatggggtaacgtttcgcaaatagatcgggctaagggcgttatggctataaaaccaagcggcgtaccctacgaagaattattaccagagcacatggttatagtggatatggaaaacaatattgtagaagggcaaatgcgaccttcttctgatactaaaacccatactcatttgtatcgtcatttcgaaaccattggcggtgttactcatacacactccacttacgccaccgcgtgggcgcaggcccaggtaagtattccctgcttcggtactactcacgccgattttgcctacggcgaaataccttgtactgcggtaatgagcgatgaacaaatagagcgcgactacgaagaagaaaccggcgtgcaaattaccgatgcatttgcaggtaaaaaccccgatgaagtgcctatggtaattgttgccgggcatgcgccatttacttggggcaaagatgcggctaaatcggtttatcacgctgtggtgctcgaagaaattgcgcgtatggcttacctgactaaaaccttaaatacccaacaagcttcccttaagcagggcattttagaaaaacattaccagcgcaagcacggcaagaacgcttattacgggcagtcttaa

SEQ ID NO: 35285 - protein, 230 aa, Saccharophagus degradans 2-40
MSYLELKREAYEANMELQRRNLIIYTWGNVSQIDRAKGVMAIKPSGVPYEELLPEHMVIVDMENNIVEGQMRPSSDTKTHTHLYRHFETIGGVTHTHSTYATAWAQAQVSIPCFGTTHADFAYGEIPCTAVMSDEQIERDYEEETGVQITDAFAGKNPDEVPMVIVAGHAPFTWGKDAAKSVYHAVVLEEIARMAYLTKTLNTQQASLKQGILEKHYQRKHGKNAYYGQS

SEQ ID NO: 35286 - DNA, 699 bp, Acidobacteria bacterium Ellin345
  CDS (1)..(699): transl_table=11
atgcttttattgcaactccgtgcagaagtccttgaagcgaacctcgagttggtgcggaaagggctcgttctatataccttcggcaatgtcagcggggtctcccgcgagcaaggcctgattgtgatcaagcccagcggcgttccctacgacacgatgaaacccgaacatctggtcgtcactgacatggaagggaagatcgtggaaggcgacctccgcccttcatccgacctcgcgacgcaccttgcgctctatcgcgcatttccggagatcggcggcgtcgcccactcgcattccgaatacgccactgcttgggcacaggcccggcgcccgattccctgcttcggcacaacgcatgccgactactatcacggttcagtcccagtcactgatcccatggcagacgaggaaatcacgggtgattatgagatgaataccggccacgccatcgtgcgcacgttacataaaactggcgcagcgcatgtcccgggaatccttgtggcgaaccacggtccatttgcctggggggccagtgcgatgaaggcggccgagagtgccgcgatcctcgaatacattgcgcgaattgcgtgtttcacgctgtcgatcaacggatcctcggcggcgattggacaagccctgcacgacaagcatttcctgcgcaaacacggagcaaattcttattacggccagaagaaggactga

SEQ ID NO: 35287 - protein, 232 aa, Acidobacteria bacterium Ellin345
MLLLQLRAEVLEANLELVRKGLVLYTFGNVSGVSREQGLIVIKPSGVPYDTMKPEHLVVTDMEGKIVEGDLRPSSDLATHLALYRAFPEIGGVAHSHSEYATAWAQARRPIPCFGTTHADYYHGSVPVTDPMADEEITGDYEMNTGHAIVRTLHKTGAAHVPGILVANHGPFAWGASAMKAAESAAILEYIARIACFTLSINGSSAAIGQALHDKHFLRKHGANSYYGQKKD

SEQ ID NO: 35288 - DNA, 648 bp, Rubrobacter xylanophilus DSM 9941
  CDS (1)..(648): transl_table=11
ttggggctgagggaggagatcgccggcgtctgccgccggatgagcgagtcggggctggtcgtggggacctcggggaacgtgagcgcccgcacggaggatggggtgctcgtgaccccgagcggcctggactacgcggtgctggagcccgaggacgtggtgctggtcgacctggaggggcgggtgctggagggggatctgctcccctccgtcgagaccccgatgcacaccgggatctaccgcgcccgcccggacgtctcgggcatcgtgcacacccactcgcgcttcgccaccacgctggcctgcctggggtgggagatccccccggtccactacatgctcgccgtgctctcggacgagggccgggtgccgctggcccgctacgccacctacggcacgccggagctcgcggcgaacgcggtggaggccctcggcgcctcccaccgcgcctgcctcctccgcaaccacggcaccatcgccgtcggctcctccccgggcgaggcctactcccgcaccgagctgctggaggagatggccgagctctactaccgcgcccgcctggccggggagccggtgctgctcgatcccgggcagctcgcggaggtctcggccaagatccacgactacggccagtccaagccctcccggtag

SEQ ID NO: 35289 - protein, 215 aa, Rubrobacter xylanophilus DSM 9941
MGLREEIAGVCRRMSESGLVVGTSGNVSARTEDGVLVTPSGLDYAVLEPEDVVLVDLEGRVLEGDLLPSVETPMHTGIYRARPDVSGIVHTHSRFATTLACLGWEIPPVHYMLAVLSDEGRVPLARYATYGTPELAANAVEALGASHRACLLRNHGTIAVGSSPGEAYSRTELLEEMAELYYRARLAGEPVLLDPGQLAEVSAKIHDYGQSKPSR

SEQ ID NO: 35290 - DNA, 699 bp, Clostridium perfringens ATCC 13124
  CDS (1)..(699): transl_table=11
atgttagagaacttaaaaaaagaagtttacgaagctaatatgcttcttccaaaatataatttagtaacttttacatgggggaatgtttctgccatagatagagaaaaaggacttgttgtaattaaaccatcaggagttgagtatgacacaatgaaaccagaagatatggttgtggttgatttagagggaaatattgttgaagggaaatataaaccttcatcagatacagatactcacttgaaactttacaaggagtttaagaatataggaggaatagttcatacacattctagatgggcaacaatatttgctcaagcaggaagaggaataaagccatatggaacaactcaggcagattattttgcagatgaaatcccttgtacaagagatatgactagagaagagattgaaggaaattatgaatataatacaggggttgtaattgttgaaagattcaaagacatgaatccagagaatattccagcagtacttgttaaaaatcatggtccatttacttggggaaaggatgctaaagatgctgttcataatgctgttgttctagaagaagtggcaatgatggcatataacacagaaatattagcaaataaaaatgtagatagtatgtctgatgacttattaaataaacacttttcaagaaagcatggtccaaatgcttactatggacaaacaggagcttaa

SEQ ID NO: 35291 - protein, 232 aa, Clostridium perfringens ATCC 13124
MLENLKKEVYEANMLLPKYNLVTFTWGNVSAIDREKGLVVIKPSGVEYDTMKPEDMVVVDLEGNIVEGKYKPSSDTDTHLKLYKEFKNIGGIVHTHSRWATIFAQAGRGIKPYGTTQADYFADEIPCTRDMTREEIEGNYEYNTGVVIVERFKDMNPENIPAVLVKNHGPFTWGKDAKDAVHNAVVLEEVAMMAYNTEILANKNVDSMSDDLLNKHFSRKHGPNAYYGQTGA

SEQ ID NO: 35292 - DNA, 696 bp, Haemophilus somnus 129PT
  CDS (1)..(696): transl_table=11
atgttagaacaattaaagcaaaaagtatttgaagcaaatttagcgttacctaaatatcatttagtgacatttacttggggtaatgtaagcggtattgatcgtgaaaaaaatctagtcgtgattaaaccttccggagtggaatatgaggtaatgacgcctgaagatatggtagttgtggatttattcacaggtcgagtagtggagggcaataaaaagccttcatctgatactgctacccatctaatactttaccgtgaatttccaacacttggtggtatcgttcatactcattctcgtcatgctactatatgggcacaagctggggaagatttgattgctgcaggcacaacccacgcagattatttttatggtgctattccttgtacacgcaaaatgacacctgtagaaattcagggtgactatgaacttgaaacagggaaggtaattgtagaaacatttcgtgtacgagggattgatcctaaagatgtgcctgcggtattagttcattcacatggtccttttgcatggggaaatgatccggataatgccgtacacaatgctgttgttttagaagagattggctatatgaatttatttagtcgccaacttcgtcctaatttatcttcgatgcaacaagagttgctggataagcattacttacgtaaacatggtaagaatgcttattacggacagtaa

SEQ ID NO: 35293 - protein, 231 aa, Haemophilus somnus 129PT
MLEQLKQKVFEANLALPKYHLVTFTWGNVSGIDREKNLVVIKPSGVEYEVMTPEDMVVVDLFTGRVVEGNKKPSSDTATHLILYREFPTLGGIVHTHSRHATIWAQAGEDLIAAGTTHADYFYGAIPCTRKMTPVEIQGDYELETGKVIVETFRVRGIDPKDVPAVLVHSHGPFAWGNDPDNAVHNAVVLEEIGYMNLFSRQLRPNLSSMQQELLDKHYLRKHGKNAYYGQ

SEQ ID NO: 35294 - DNA, 696 bp, Shewanella sp. MR-4
  CDS (1)..(696): transl_table=11
atgtcttttttagagctaaaacgcgaagtatacgaagccaacatggagcttgagaaacgcaaactggtgacttacaccttcggcaacgtttcacaaattgaccgccaactcggcgtgattggtatcaagcccagcggcgtgccctatgaagatttgaaggttgaagacattgtaattgttgaccttgagaatcaaatcgtagaagggcgcatgcgtccttcatccgataccaagacacacacctatttgtatcgccagtggcagagtattggtggcattacccatacccattcaacctatgccaccgcctgggcgcaagcgcagatagcgattccctgcttaggcacgacacaagccgattatgtgtacggtgaaatcccatgcacagcagtgatgcgaagcgatcagatcagccgcgactatgaagaagaaaccggcgtgcagatcctcgattgtttcgccgaccgagatcccaacgagtcgcccatggtgatagtggcaggccatgcaccgttcacttggggcgcgaatgcggctaaatctgtgtaccacgccgtgttgctcgaagaaatcgctcggatggcgtatctcaccaaaactttatcaccaggcattagtcagttaaaacaagagcttattgataagcattatttgcgtaagcatggaaaagacgcttattacggccaaagcaagtaa

SEQ ID NO: 35295 - protein, 231 aa, Shewanella sp. MR-4
MSFLELKREVYEANMELEKRKLVTYTFGNVSQIDRQLGVIGIKPSGVPYEDLKVEDIVIVDLENQIVEGRMRPSSDTKTHTYLYRQWQSIGGITHTHSTYATAWAQAQIAIPCLGTTQADYVYGEIPCTAVMRSDQISRDYEEETGVQILDCFADRDPNESPMVIVAGHAPFTWGANAAKSVYHAVLLEEIARMAYLTKTLSPGISQLKQELIDKHYLRKHGKDAYYGQSK

SEQ ID NO: 35296 - DNA, 696 bp, Shewanella sp. MR-7
  CDS (1)..(696): transl_table=11
atgtcttttttagagctaaaacgcgaagtatacgaagccaacatggagcttgagaaacgcaaactggtgacttacacctttggcaacgtttcacaaattgatcgccaactcggcgtgattggtatcaagcccagcggcgtgccctatgaagatttgaaggttgaagacattgtgattgttgaccttgagaatcaaatcgtagaagggcgcatgcgtccttcatccgataccaagacacacacctatttgtatcgccagtggcagagtattggtggcattacccatacccattcgacctatgccaccgcctgggcgcaggcgcagatagcgattccctgcttaggcacgacacaggccgattatgtgtacggtgaaatcccatgcacagcagtgatgcgcaacgatcagatcagccgcgactacgaagaagaaaccggcgtgcagatcctcgattgtttcgccgaccgagatcccaacgagtcacccatggtgatagtggcaggccatgcgccgttcacttggggcgcgaatgcggctaaatctgtgtatcacgccgtgttactcgaagaaatcgctcggatggcgtatctcaccaaaaccttatcaccaggtatcagtcagttaaaacaagagcttattgataagcattatttgcgtaagcatggaaaagacgcttattacggccaaagcaagtaa

SEQ ID NO: 35297 - protein, 231 aa, Shewanella sp. MR-7
MSFLELKREVYEANMELEKRKLVTYTFGNVSQIDRQLGVIGIKPSGVPYEDLKVEDIVIVDLENQIVEGRMRPSSDTKTHTYLYRQWQSIGGITHTHSTYATAWAQAQIAIPCLGTTQADYVYGEIPCTAVMRNDQISRDYEEETGVQILDCFADRDPNESPMVIVAGHAPFTWGANAAKSVYHAVLLEEIARMAYLTKTLSPGISQLKQELIDKHYLRKHGKDAYYGQSK

SEQ ID NO: 35298 - DNA, 729 bp, Pediococcus pentosaceus ATCC 25745
  CDS (1)..(729): transl_table=11
atgttagagaagttaaaacaggaagtttacgaagcaaacatgcaacttcctaaattagatttagttacctttacttggggtaacgtttcaggaattgaccgcgaaaaaggtctattcgttatcaaaccatctggagtcgactatgacaagttgaaaccagaagatatggtagtagtaaatttgaagggtgaagttgtggaaggtgaaatgaatccttctagtgacacaccaacgcatacggttttgtataacgaattcccagaaatcggtgggattgtacatacccattctccatgggctgtttcctttgccgctgcagaaattgatgtaccagctttaagtacaacccatgctgatacattctacggcgacgtgccggtaactccggcactcactaaagaagagattgaaggcggttatgaagaaaatactggtaaggtaattgttaagacattcaaggaacgtaagattgatccagaagcagttccagctgttttggttagccaacatggaccatttgcttggggtaagacgcctgacaaagcggtttacaatgcaaaggttttggaagttgcttcagaaattgattaccacgctcttcaaatgactagaagaaatattgaagttcctcaatatttgttagataaacattattaccgtaagcatggtaagaatgcctactacggtcaagaaaatgctaagtctaaagaacatgcagcaagaaaataa

SEQ ID NO: 35299 - protein, 242 aa, Pediococcus pentosaceus ATCC 25745
MLEKLKQEVYEANMQLPKLDLVTFTWGNVSGIDREKGLFVIKPSGVDYDKLKPEDMVVVNLKGEVVEGEMNPSSDTPTHTVLYNEFPEIGGIVHTHSPWAVSFAAAEIDVPALSTTHADTFYGDVPVTPALTKEEIEGGYEENTGKVIVKTFKERKIDPEAVPAVLVSQHGPFAWGKTPDKAVYNAKVLEVASEIDYHALQMTRRNIEVPQYLLDKHYYRKHGKNAYYGQENAKSKEHAARK

SEQ ID NO: 35300 - DNA, 729 bp, Leuconostoc mesenteroides subsp. mesenteroides ATCC 8293
  CDS (1)..(729): transl_table=11
atgttagaaaagcttaaaaatgaagtttataaggctaatgtggcgttgcctaaattaggattagtaacatttacatggggaaatgtctcaggcattgatcgtgaaaaagggctatttgtaataaaaccctctggcattgagtatgaccaattaaaaccttccgatatggttgtggttaatttggacggagaagttgtagaaggtaatctcaatccatctagtgacacgcccacacacgcctatctctaccaacactttttaaatataggtggtatcacgcatactcattcaccttggggcgtttcgtttgctgcggcaaaaatggacatcccagctgtcagcacaacgcatgctgatacattttatggggatattccttgtgcaccggccctaagtgaagaggaaattaagacggcctacgaactaaatactgggaaagttattgtatcagagtttgagcatcgtgggcttgatcccgacgcgacgcctgctgccttggtcagtcaacatggcccatttacatggggcgcgactccagaaaaatccgtatacaatgctaaagtgctcgaagtatcagcagaaattagttaccatgctttgcagtcaacaagatcagaaattcatgttccgcaatacttgttagacaaacattattataggaagcacggtgataatgcctattatggtcagtcatcaacacagtcaaaaaatcacattacgcacgcctaa

SEQ ID NO: 35301 - protein, 242 aa, Leuconostoc mesenteroides subsp. mesenteroides ATCC 8293
MLEKLKNEVYKANVALPKLGLVTFTWGNVSGIDREKGLFVIKPSGIEYDQLKPSDMVVVNLDGEVVEGNLNPSSDTPTHAYLYQHFLNIGGITHTHSPWGVSFAAAKMDIPAVSTTHADTFYGDIPCAPALSEEEIKTAYELNTGKVIVSEFEHRGLDPDATPAALVSQHGPFTWGATPEKSVYNAKVLEVSAEISYHALQSTRSEIHVPQYLLDKHYYRKHGDNAYYGQSSTQSKNHITHA

SEQ ID NO: 35302 - DNA, 690 bp, Solibacter usitatus Ellin6076
  CDS (1)..(690): transl_table=11
gtgctggaaacgctgcgagctgaagtcctggaagccaatctcgaactcgtccgccgcggcctggtggtctacaccttcggcaacgccagcgccgtatcgcgcgagcacggcctctgcgtgatcaaaccgagcggcgtcccgtacgagaagatgacccccgccgacatggtgatcacggaccttcacggcaagatcgtcgaaggagtcctgcgcccctcatcggatctggcgacccatgtcgcgctctatcgcgccttccccaccatcggcggcgtggttcacacgcactcccgccacgccaccgcatgggctcaggcccagcgcgagatcccctgcttcggcaccacccacgcggactacttccacggccccatcccgctgaccccgaccctgacccgtgaagagatcgaaggcgagtacgaggccaacaccggcaccgccatcattcgccgcatgcaaggcctggacccgctggcctgcccggcctgcctggtggccggccatgcccccttctgctgggacaagaccgtgaccgacgccgcccacatggccgtcatcgtcgaagaaatcgcggccatggcctggcaaaccgtcaccatcaacccccacgccgccgcaatcgccgagcctctccgcgacaaacaccacttccgcaaacacggccccaccgcctactacggccagaagtag

SEQ ID NO: 35303 - protein, 229 aa, Solibacter usitatus Ellin6076
MLETLRAEVLEANLELVRRGLVVYTFGNASAVSREHGLCVIKPSGVPYEKMTPADMVITDLHGKIVEGVLRPSSDLATHVALYRAFPTIGGVVHTHSRHATAWAQAQREIPCFGTTHADYFHGPIPLTPTLTREEIEGEYEANTGTAIIRRMQGLDPLACPACLVAGHAPFCWDKTVTDAAHMAVIVEEIAAMAWQTVTINPHAAAIAEPLRDKHHFRKHGPTAYYGQK

SEQ ID NO: 35304 - DNA, 654 bp, Mycobacterium avium 104
  CDS (1)..(654): transl_table=11
atgaagttcgtcgacgacccggaacaggcggtgctggacgccgccaaggacatgctgcgccgcggcctggtggagggcaccgccggcaacatctcggcgcgccgctccgacggcaacatcgtcatcacgccatcatcggtggactaccgcgacatgcagctcgacgacctggtgctgatcgaccccgccggttcggtgctgcaggccgcgcagggccgctcgccgtccacggagatgcagctgcacctggcctgcttcgccgcgttcgacgacatcggctgcgtcatccacagccatccggtgtgggcgaccatgttcgccattgcgcaccaatcgattccggcgtgcatcgacgagttcgcggtgtattgcggcggcgacgtgcgctgcgccgagtacgccgcctccggctcccccgacgtcggcgccaacgcggtcaaggcgctgcagggccgcggcgccgccctgatcgccaaccacggcctggtggcggtgggcccgcggcccgacaaggtcctgcacatcaccgcgctggtggagcggaccgcccaaatcgtctggggcgcaagggctctcggcggtccggtgccaattcccgaggacgtcaaccgcaacttcgccgcggtgtacggctatctgcgcgccaacccctga

SEQ ID NO: 35305 - protein, 217 aa, Mycobacterium avium 104
MKFVDDPEQAVLDAAKDMLRRGLVEGTAGNISARRSDGNIVITPSSVDYRDMQLDDLVLIDPAGSVLQAAQGRSPSTEMQLHLACFAAFDDIGCVIHSHPVWATMFAIAHQSIPACIDEFAVYCGGDVRCAEYAASGSPDVGANAVKALQGRGAALIANHGLVAVGPRPDKVLHITALVERTAQIVWGARALGGPVPIPEDVNRNFAAVYGYLRANP

SEQ ID NO: 35306 - DNA, 696 bp, Mycobacterium smegmatis str. MC2 155
  CDS (1)..(696): transl_table=11
atgagcgtcaccaccgagatcgatgccgtcatccggcaactgcgcaagcaggtatgtgatctgcacgccgagctgacccgctaccagctggtgatctggaccgccggaaacgtctccgcgcgtgtgcccgaccgcgacctgatgatcatcaaaccctctggcgtggactacgactcgatgacgcccgagcagatggtggtgtgtgacctccacggtgaactcgtcgacggtgatctcgcaccgtcgtcggacaccgcggcgcatgcctacgtgtaccggcacatgcccgaggtcggcggcgtcgtgcacacccactccacctatgccacggcgtgggcggcgcgcggcgaggcgatcccgtgcgtgctcacgatgatcgccgacgagttcggcggcgacatcccagtggggccgttcgcactgatcggcgacgactcgatcgggcggggaatcgtggagaccctgcagcacagcaactctcgcgccgtgctgatgcgcaaccacggtccgttcacggtcgggcgcgatgcgcgcgacgcggtcaaggccgccgtgatggtcgaggacgtcgcgcgcacggtccacatcagccgccaactcggcacccccgatgtgatccccccggccgatgtccgccggcttttcgaccgctatcagaacgtctacgggcaaccgcaggccagtcaggaagggtga

SEQ ID NO: 35307 - protein, 231 aa, Mycobacterium smegmatis str. MC2 155
MSVTTEIDAVIRQLRKQVCDLHAELTRYQLVIWTAGNVSARVPDRDLMIIKPSGVDYDSMTPEQMVVCDLHGELVDGDLAPSSDTAAHAYVYRHMPEVGGVVHTHSTYATAWAARGEAIPCVLTMIADEFGGDIPVGPFALIGDDSIGRGIVETLQHSNSRAVLMRNHGPFTVGRDARDAVKAAVMVEDVARTVHISRQLGTPDVIPPADVRRLFDRYQNVYGQPQASQEG

SEQ ID NO: 35308 - DNA, 717 bp, Nocardioides sp. JS614
  CDS (1)..(717): transl_table=11
atgaacgccgtcgtcagcgccgagtcccgcgaggcggtacgccggctgcaggcggaggtcgccgcgctgcacgccgagctgacccgcaaccggctggtcgtgtggaccgccggcaacgtgtccgcgcgggtgccgggcaccgacctgttcgtgatcaagccgtcgggggtctcctacgacgagctggacgccgacacgatggtcgtctgcgacctcgacggcaccctggtcgagggggcgcgacagccgagctccgacaccgccgcccacgcctacgtctaccgccacctgcccgaggtcggcggggtcgtgcacacccactcgacgtacgcgaccgcgtgggccgcccgcggcgagccgatcccgtgcgtgctcacgatggcggccgacgagttcggcggcgagatcccgatcgggccgttcgcgctgatcggggacgactcgatcggccgcgggatcgtcgagacgctgcgcgagagccgctcgcgcgccgtactcatgcagaaccacggcccgttcaccgtcgggcccgatgcccggtccgccgtcaaggcggccgtgatggtcgaggacgtcgctcgcacggtgcacgtcgcccgccagctcggtgcgccgctcccgatcgcccaggagcacgtcgacgccctctacgaccgctaccagaacgtgtacggccagacccagcagacccagcaacagaccggaggagtcgcgtga

SEQ ID NO: 35309 - protein, 238 aa, Nocardioides sp. JS614
MNAVVSAESREAVRRLQAEVAALHAELTRNRLVVWTAGNVSARVPGTDLFVIKPSGVSYDELDADTMVVCDLDGTLVEGARQPSSDTAAHAYVYRHLPEVGGVVHTHSTYATAWAARGEPIPCVLTMAADEFGGEIPIGPFALIGDDSIGRGIVETLRESRSRAVLMQNHGPFTVGPDARSAVKAAVMVEDVARTVHVARQLGAPLPIAQEHVDALYDRYQNVYGQTQQTQQQTGGVA

SEQ ID NO: 35310 - DNA, 714 bp, Actinobacillus pleuropneumoniae serovar 1 str. 4074
  CDS (1)..(714): transl_table=11
atgctaacagaattatctccaaaattacttgcgatgcgtgatcgcgtatttaaagcgaatcttgaattaccaaaatataaattagccacctttacttggggtaacgtgagtgaaatcgaccgtgaaaccggttatgtagcgatcaaaccttccggtgtggaatatgcaacgatgaagccggaagacattgtctttgtcgatttacaaggtaatcgcatattcggcgataaaaaaccgtcgtcggatactccgacccacttagaattttaccgccaattcccgaatatcggcggtgtggtgcatactcattcacgtcacgcgaccgcatgggcgcaagccggtgaagatattcttgctttaggtacaacacaaggcgactacttctacggttcggtaccttgtacacgccgaatgacaccggaagaaatcgccggcgaatacgaattagaaaccggtaaagtagtggtggaaaccttccgtaaacgcggtattgatccggatatggtgccgggtgtattagttcactcgcacgggccgttcacttggggtaaagatgcgcatgatgcggtacataattccgtagtgctggaagaagtagcgtatatgaacttcgttagccaccaaattcgtccgaatatcggctcaatgcaacaagaattactcgataaacactatttacgtaaacacggtgcaaacgcctattacggacaataa

SEQ ID NO: 35311 - protein, 237 aa, Actinobacillus pleuropneumoniae serovar 1 str. 4074
MLTELSPKLLAMRDRVFKANLELPKYKLATFTWGNVSEIDRETGYVAIKPSGVEYATMKPEDIVFVDLQGNRIFGDKKPSSDTPTHLEFYRQFPNIGGVVHTHSRHATAWAQAGEDILALGTTQGDYFYGSVPCTRRMTPEEIAGEYELETGKVVVETFRKRGIDPDMVPGVLVHSHGPFTWGKDAHDAVHNSVVLEEVAYMNFVSHQIRPNIGSMQQELLDKHYLRKHGANAYYGQ

SEQ ID NO: 35312 - DNA, 717 bp, Streptococcus suis 89/1591
  CDS (1)..(717): transl_table=11
atgccaaaagatttacaggaaatgcgtcaacgggtctatgaagccaatatcgccctgcctgctcatgggctcgtcaagtttacctggggcaacgtatcagaagtctgccgtgaacttggtcgcatcgtcatcaagccgtctggtgtggactatgagaaattgtcaccagaaaatatggtcattacggacttggacggaaatgtggtagaaggtgacctcaatccttcgtctgatttggcgacccacgttgccctctacaaggcttggccaaatgtccatgccgttgtgcatacacattcgacagaagcagtgggttgggctcaggcaggtcgtgacattccattttatgggacgacccatgcggactatttctatggtccggtaccatgtgctcgttctttgacggctgaggaagtgaactcggcctatgaaaaagaaacaggagcagtcatcatcgaggaatttgaacgccgaggtattgatccagtggccgttccgggtattgttgtccgtaaccacggaccatttacctggggcaaggatcccgctcaggcagtttaccatagcgttgtccttgaggaagtggctcggatgaaccgctataccgaacaaatcaatccacgggtggagccagcgccaagctatatcatggacaagcactacctccgtaaacatggtcccaatgcctactatggacaaaagggtgatgaacattaa

SEQ ID NO: 35313 - protein, 238 aa, Streptococcus suis 89/1591
MPKDLQEMRQRVYEANIALPAHGLVKFTWGNVSEVCRELGRIVIKPSGVDYEKLSPENMVITDLDGNVVEGDLNPSSDLATHVALYKAWPNVHAVVHTHSTEAVGWAQAGRDIPFYGTTHADYFYGPVPCARSLTAEEVNSAYEKETGAVIIEEFERRGIDPVAVPGIVVRNHGPFTWGKDPAQAVYHSVVLEEVARMNRYTEQINPRVEPAPSYIMDKHYLRKHGPNAYYGQKGDEH

SEQ ID NO: 35314 - DNA, 705 bp, Streptococcus pneumoniae TIGR4
  CDS (1)..(705): transl_table=11
atgaatcaagtaatcaatgctatgcgtaaacgagtctgtgatgccaatcaatcattgccaaaacatggacttgtcaaatttacctgggggaatgtatctgaagttaatcgcgaactcggtgtcattgttatcaaaccatcaggcgtggattatgacgaattgacacctgaaaacatggtagtgactgatctagatggtaagatcctagaaggggatttaagaccatcttccgacctcccaactcatgtgcaattatataagacttggtcagaaattggtagtgtggttcacacccattcgacagaagctgttggttgggctcaggcaggtcgtgatattcctttctacggaacaacccatgcagattatttctacggttcaatcccttgcgcccgtagtttgaccaaggacgaagtagaagtggcctatgaaaaagatactggcctggttatcgtagaagagtttgaacatcgcggacttaacccggttgaagtaccaggaattgttgtacgcaatcacggtccattcacctggggcaaaaatccagagaatgctgtttatcactctgtcgtactagaggaagtatcaaagatgaatcgctttacagaacaaatcaatccaagagttggacctgctccccagtacatactagaaaaacactaccaacgtaaacatggaccaaatgcttattatggtcaaaagtaa

SEQ ID NO: 35315 - protein, 234 aa, Streptococcus pneumoniae TIGR4
MNQVINAMRKRVCDANQSLPKHGLVKFTWGNVSEVNRELGVIVIKPSGVDYDELTPENMVVTDLDGKILEGDLRPSSDLPTHVQLYKTWSEIGSVVHTHSTEAVGWAQAGRDIPFYGTTHADYFYGSIPCARSLTKDEVEVAYEKDTGLVIVEEFEHRGLNPVEVPGIVVRNHGPFTWGKNPENAVYHSVVLEEVSKMNRFTEQINPRVGPAPQYILEKHYQRKHGPNAYYGQK

SEQ ID NO: 35316 - DNA, 699 bp, Klebsiella pneumoniae
  CDS (1)..(699): transl_table=11
atgttagaacagttaaaagccgaggtgctggcggccaacctggcgctcccggcgcaccagctggtgacgtttacctggggcaacgtcagcgcggttgatgaaacgcgcacgctgatggtgattaaaccttccggcgtggaatacgacgtgatgaccgccgaggatatggtcgtggtcgaaatcgccagcggcaaggtggtggccggcggcaaaaaaccgtcatcagatagcccgacccatctggcgctttaccgccgctatccgcagatcggcgggatcgtgcatacccactcccgccacgccacgatctggtcgcaggcgggtctcgatctgcccgcctggggcaccacccacgccgactacttctatggcgcgatcccctgtacccgcctgatgaccgaagaggaaattaacggggaatatgagtatcagactggcgaagtgattattcagacctttgaagaacggcgcctcgatccggcgcaaatcccggcggtacttgtccattcacacggtccgttcgcctggggaaaagacgccgccgacgccgtacataacgccgtggtgctggaggagtgcgcgtatatggggctgttctcacgccagctctcgcctcagctgccggagatgcagtcggtattgctggataaacactatctgcgcaagcacggcgccaacgcctattacggacaaggctga

SEQ ID NO: 35317 - protein, 232 aa, Klebsiella pneumoniae
MLEQLKAEVLAANLALPAHQLVTFTWGNVSAVDETRTLMVIKPSGVEYDVMTAEDMVVVEIASGKVVAGGKKPSSDSPTHLALYRRYPQIGGIVHTHSRHATIWSQAGLDLPAWGTTHADYFYGAIPCTRLMTEEEINGEYEYQTGEVIIQTFEERRLDPAQIPAVLVHSHGPFAWGKDAADAVHNAVVLEECAYMGLFSRQLSPQLPEMQSVLLDKHYLRKHGANAYYGQG

SEQ ID NO: 35318 - DNA, 702 bp, Listeria seeligeri
  CDS (1)..(702): transl_table=11
atgattttaggagtggaaaaaataaaaatacttaagcgtgcagtatttcaagcaagtatggttttagttcatcaaggtctaataaattcaaactggggaaacgttagcgcaattgatcgagaattagagataattgttattaagccgaatggggtggcgattaatcaaatgtctgttgacgatatggttatgacagatttggatggcaaagtcttgggagggaagtggggtccttcatctgatatactaacacatgttgttttgtatcaaaattttaaaaaagttcaatcaatcgctcatagccactcaaaatatgctgtagcattttcgcagtctggtcgggatatacctgtttatggaactacacacgcagatatgttttatgggccagttccttgtactagacaacttactaagcttgaaacggaacgagcatatgaagtggagtcgggaaaagtaattgtggaaacatttaaggaaagaaagttaaatgaaaatgcgttacaaggtgttctagttgcgggacacggaccatacagttggggagcgaatgttgaggaagccgttgaaaatagtactattttagaggaagtttctgggatggcgttacatacagaaattcttcttagaggtaaggcgcgacaagaaatcccaaaatgtcttcaaaataaacgctatttccgcaaaaatagatcaaattaa

SEQ ID NO: 35319 - protein, 233 aa, Listeria seeligeri
MILGVEKIKILKRAVFQASMVLVHQGLINSNWGNVSAIDRELEIIVIKPNGVAINQMSVDDMVMTDLDGKVLGGKWGPSSDILTHVVLYQNFKKVQSIAHSHSKYAVAFSQSGRDIPVYGTTHADMFYGPVPCTRQLTKLETERAYEVESGKVIVETFKERKLNENALQGVLVAGHGPYSWGANVEEAVENSTILEEVSGMALHTEILLRGKARQEIPKCLQNKRYFRKNRSN

SEQ ID NO: 35320 - DNA, 729 bp, Lactobacillus reuteri
  CDS (1)..(729): transl_table=11
atgttagaagatttaaagaaagaagtttataaagcaaatatgcggcttcctaaactaggccttgtttcctttacatggggcaatgtttcagggattgaccgtgaaaaaggattgtttgttattaaaccttctggagttccatatgaagagatgaagccggaagacatggttgttgtcaacttggatggtgaggtagtcgagggtgacttgaatccatccagtgatactcctactcacacttacctttataatcacttcccaaagattggtggagtcgttcatactcattcaccatgggcagtagcgtttgcagctgcacggatggatgttccagcaatgaataccactcacgctgatactttctatactgatgtcccagctgctgatgctttgacgaaggaagaaattgaagaagactatgaaggtaatacaggaaaggtaatcgttcgttcattcaaggaacggggtttggactatgaagcaaccccagcggcattagtaatgcaacatggtccatttacctgggggccaacacctgacaaagcagtttataatgctaaggtgttagaagttgtggcagaagaagattatcatgcaatgcaattaacgcaccaagaccttcacttacctcaatacttgttggacaaacactattaccgcaagcatggtgcgaatgcatattacggacaaaataatgcgcattcaaaagatcatgcagctcacgcttaa

SEQ ID NO: 35321 - protein, 242 aa, Lactobacillus reuteri
MLEDLKKEVYKANMRLPKLGLVSFTWGNVSGIDREKGLFVIKPSGVPYEEMKPEDMVVVNLDGEVVEGDLNPSSDTPTHTYLYNHFPKIGGVVHTHSPWAVAFAAARMDVPAMNTTHADTFYTDVPAADALTKEEIEEDYEGNTGKVIVRSFKERGLDYEATPAALVMQHGPFTWGPTPDKAVYNAKVLEVVAEEDYHAMQLTHQDLHLPQYLLDKHYYRKHGANAYYGQNNAHSKDHAAHA

SEQ ID NO: 35322 - DNA, 702 bp, Listeria seeligeri
  CDS (1)..(702): transl_table=11
atgattttaggagtggaaaaaataaaaatacttaagcgtgcagtatttcaagcaagtatggttttagttcatcaaggtctaataaattcaaactggggaaacgttagcgcaattgatcgagaattagagataattgttattaagccgaatggggtggcgattaatcaaatgtctgttgacgatatggttatgacagatttggatggcaaagtcttgggagggaagtggggtccttcatctgatatactaacacatgttgttttgtatcaaaattttaaaaaagttcaatcaatcgctcatagccactcaaaatatgctgtagcattttcgcagtctggtcgggatatacctgtttatggaactacacacgcagatatgttttatgggccagttccttgtactagacaacttactaagcttgaaacggaacgagcatatgaagtggagtcgggaaaagtaattgtggaaacatttaaggaaagaaagttaaatgaaaatgcgttacaaggtgttctagttgcgggacacggaccatacacttggggagcgaatgttgaggaagccgttgaaaatagtactattttagaggaagtttctgggatggcgttacatacagaaattcttcttagaggtaaggcgcgacaagaaatcccaaaatgtcttcaaaataaacgctatttccgcaaaaatagatcaaattaa

SEQ ID NO: 35323 - protein, 233 aa, Listeria seeligeri
MILGVEKIKILKRAVFQASMVLVHQGLINSNWGNVSAIDRELEIIVIKPNGVAINQMSVDDMVMTDLDGKVLGGKWGPSSDILTHVVLYQNFKKVQSIAHSHSKYAVAFSQSGRDIPVYGTTHADMFYGPVPCTRQLTKLETERAYEVESGKVIVETFKERKLNENALQGVLVAGHGPYTWGANVEEAVENSTILEEVSGMALHTEILLRGKARQEIPKCLQNKRYFRKNRSN

SEQ ID NO: 35324 - DNA, 693 bp, Propionibacterium freudenreichii subsp
  CDS (1)..(693): transl_table=11
atggcaacactcaaggacttctcgcaggccactcgggcggaggtccgtgccgtgcgcgaggtcgtcgccgcactgcacgaccagttggtggcctggaacctcgtgatgtggaccgcgggcaatgtctcgcagcgcctccactcggccgacctcctggtgatcaagccctccggcgtgcgctacgagcacctgacccccgaatcgatggtggtcaccgacctgcagggcaacctcgtggacggcgccggctcgccctcctccgacacctcctcgcatgcctacatctatcggcacatgcccgaggtcttcggcgtatgccacacccactccacctatgccaccgcctgggcggccaccgggaagtcgatcccctgcgcgctgaccatgatgggcgacgaattcggtggccccgtgcccgtgggacccttccgcctcatcggatcggaggcgatcggagccggtgtcgtcgacacgctcaagcagttccccaggtcgcccgccgtcctcatgcagaaccatgggccattcaccatcgggcgcgacgccgaggccgcggtcaaggccgccgcgatgaccgaggaggtggcgcacacgatgtgggccgcccaacaactcggtggggtgatcgaaatcgcccccgacgacgtcgacaagctcaacgaccgttaccagaatgtctacgggcagcattga

SEQ ID NO: 35325 - protein, 230 aa, Propionibacterium freudenreichii subsp
MATLKDFSQATRAEVRAVREVVAALHDQLVAWNLVMWTAGNVSQRLHSADLLVIKPSGVRYEHLTPESMVVTDLQGNLVDGAGSPSSDTSSHAYIYRHMPEVFGVCHTHSTYATAWAATGKSIPCALTMMGDEFGGPVPVGPFRLIGSEAIGAGVVDTLKQFPRSPAVLMQNHGPFTIGRDAEAAVKAAAMTEEVAHTMWAAQQLGGVIEIAPDDVDKLNDRYQNVYGQH

SEQ ID NO: 35326 - DNA, 717 bp, Klebsiella oxytoca
  CDS (1)..(717): transl_table=11
atgttagaacaactgaaagccgaggtactggcggcaaacctggccctccccgcacacggcctggtcacctttacctggggcaacgtcagcgcggtcgatgaaacgcgcaagctgatggtcattaagccttccggcgtcgaatatgaggtgatgaccgccgacgatatggtggtcgtagagatggccagcggtaaagtcgttgaaggcggtaaaaaaccctcttcagatacgccaacgcatctggcgctttatcgccgctatccgcagatcggcgggatcgtgcatacccactcccgccacgcgacgatctggtcgcaggccgggctcgatctccccgcctggggcaccacccacgccgactacttctatggcgcgatcccctgtacccgacggatgaccgttgaggagattaacggcgagtatgagtatcagaccggcgaggtgattatcaaaacctttgaacagcgcggcctggatccggcgcaaatcccggcggtattggtccattcacacggcccctttgcctggggtaaagacgccgccgacgccgtacataacgccgtggtgctggaggagtgcgcctacatgggcctcttctcgcgccagtggccacagctgccggatatgcagtctgaactgctcgataaacactatctgcgtaaacacggcgcgaacgctattacgggcaaaactagtcccgcggaactccccggataa

SEQ ID NO: 35327 - protein, 238 aa, Klebsiella oxytoca
MLEQLKAEVLAANLALPAHGLVTFTWGNVSAVDETRKLMVIKPSGVEYEVMTADDMVVVEMASGKVVEGGKKPSSDTPTHLALYRRYPQIGGIVHTHSRHATIWSQAGLDLPAWGTTHADYFYGAIPCTRRMTVEEINGEYEYQTGEVIIKTFEQRGLDPAQIPAVLVHSHGPFAWGKDAADAVHNAVVLEECAYMGLFSRQWPQLPDMQSELLDKHYLRKHGANAITGKTSPAELPG

SEQ ID NO: 35328 - DNA, 696 bp, Bacillus halodurans
  CDS (1)..(696): transl_table=11
ttgttagagcaattgaaagaaacggtgtttaaagcgaatctttatttgcctaaatatcaactcgtaacgtttacatggggaaatgtaagcggtatcgaccgggaaaaaggcttggtcgtcattaaaccgagtggagtggaatacttcgaaatgaaaagcaaagacatggtcgttgttgatttagagggcaatatagtcgaaggtgatttgaaaccgtcttcagacacgccaacccatttagcgctttatcgggcatttgacaaagtaggggggattgtccatacccattcggtctgggcgacggcttgggcgcaagccggaaaggaaatcccggcctatggaacgacgcatgctgattattttcatgggacgatcccttgtacccgtccaatgacagagacagaaattctaggagactatgaaaaggaaacagggaacgtgatcgttgagacgtttcgtaataaagacccgatgtcgatccctggcgtcctcgttcattcacacgctcctttcgtctgggggaaagatccgatggaggcagtccatcatgcagtcgtccttgaagaagtggcgaaaatggcgcaaaaaacgctatcaatctctgagaggacactaccaatggattcagtactactagatcgacacttttatcggaagcatgggcaagcagcttactacggtcaagagaagagataa

SEQ ID NO: 35329 - protein, 231 aa, Bacillus halodurans
MLEQLKETVFKANLYLPKYQLVTFTWGNVSGIDREKGLVVIKPSGVEYFEMKSKDMVVVDLEGNIVEGDLKPSSDTPTHLALYRAFDKVGGIVHTHSVWATAWAQAGKEIPAYGTTHADYFHGTIPCTRPMTETEILGDYEKETGNVIVETFRNKDPMSIPGVLVHSHAPFVWGKDPMEAVHHAVVLEEVAKMAQKTLSISERTLPMDSVLLDRHFYRKHGQAAYYGQEKR

SEQ ID NO: 35330 - DNA, 687 bp, Bacillus stearothermophilus
  CDS (1)..(687): transl_table=11
atgcttgaggagttgaaacaagccgtattagaggccaacttgcagctcccgcaataccgcctcgtgacatttacgtggggaaacgtgagcgggattgaccgggagcgcgggttggttgtcattaagccaagcggggtggcgtatgacaagttgaccattgatgatatggtggtcgtggatttaactggaaatgtggtggaaggggacttaaaaccgtcgtcggacacccctacccatctttggttgtataagcaatttccggggatcggaggaattgttcatacccattcgacttgggcgactgtttgggcgcaggccggaaaaggaattccggcattaggaacgacgcacgcggactatttttatggggaaattccgtgcacccgtccgatgaccaatgaagaaattcaaggagcttatgaactagagaccggaaaggtcattacggaaacgtttcgttttctcgatccgctgcaaatgccaggtgtcttggtgcacggccacggcccgtttgcttgggggaaagatccagcgaacgcggttcataatgccgttgtcttggaagaagtggcgaaaatggcggcaagaacgtacatgctcaatccaaatgcaaagccgatcagccaaacgttgcttgatcgccactatttgcgcaagcatggcgcaaacgcttactatgggcagtaa

SEQ ID NO: 35331 - protein, 228 aa, Bacillus stearothermophilus
MLEELKQAVLEANLQLPQYRLVTFTWGNVSGIDRERGLVVIKPSGVAYDKLTIDDMVVVDLTGNVVEGDLKPSSDTPTHLWLYKQFPGIGGIVHTHSTWATVWAQAGKGIPALGTTHADYFYGEIPCTRPMTNEEIQGAYELETGKVITETFRFLDPLQMPGVLVHGHGPFAWGKDPANAVHNAVVLEEVAKMAARTYMLNPNAKPISQTLLDRHYLRKHGANAYYGQ

SEQ ID NO: 35332 - DNA, 690 bp, Bacillus subtilis
  CDS (1)..(690): transl_table=11
atgcttgaaacattaaaaaaagaagtgctggctgccaacctgaagcttcaagagcatcagctggtaacctttacgtggggaaatgtcagcggcattgaccgtgaaaaagaaagaattgtcatcaaacctagcggagtcgaatacagcgacctgacagccgatgacttggttgttttgaaccttgatggagaggtcgtcgaaggctcgcttaaaccttcttcagatacacctacccatgtttatctatataaagcctttccgaatatcgggggaattgtccatacccattctcaatgggcgacaagctgggcgcaatcgggcagagacatccctccgttaggcacgacccatgctgattattttgacagtgcgattccatgtactcgagaaatgtacgatgaagaaatcattcatgactacgaactgaatacaggaaaagtcatagcggaaacctttcagcatcataattacgaacaggtgccgggtgtgctcgtgaataatcacggaccgttctgctggggcactgacgccttaaatgccattcataacgcagttgtattagaaacggttgccgaaatggcctatcactccattatgctgaacaaggatgtaaccccaatcaatacagtcctgcatgaaaagcatttttatcgaaaacacggagcaaatgcgtattatggccagtcatga

SEQ ID NO: 35333 - protein, 229 aa, Bacillus subtilis
MLETLKKEVLAANLKLQEHQLVTFTWGNVSGIDREKERIVIKPSGVEYSDLTADDLVVLNLDGEVVEGSLKPSSDTPTHVYLYKAFPNIGGIVHTHSQWATSWAQSGRDIPPLGTTHADYFDSAIPCTREMYDEEIIHDYELNTGKVIAETFQHHNYEQVPGVLVNNHGPFCWGTDALNAIHNAVVLETVAEMAYHSIMLNKDVTPINTVLHEKHFYRKHGANAYYGQS

SEQ ID NO: 35334 - DNA, 696 bp, Salmonella typhimurium
  CDS (1)..(696): transl_table=11
atgttagaagatctcaaacgccaggtactggaagctaatctggcgctgccaaaacacaacctggtcacccttacctggggtaacgttagcgccgtcgatcgcgaacgcggcgtactggtgattaagccgtccggcgtcgattatagcgtcatgaccgctgacgatatggtggtggtcagcctggagagcggtgaagtcgttgaaggtcataagaaaccgtcgtccgatacgccaacccaccgtctgttgtaccaggcatttccgactatcggcggcatcgtacacacccattcgcgccacgcgactatctgggcgcaggcgggtcagccaattccggcgacgggaaccacccatgccgactatttctacggtacgattccctgcactcgcaaaatgaccgaggcggaaattaatggcgagtatgaatgggaaacgggcaatgtcattgttgaaacctttgaaaaacaaggcattgacgccgctcaaatgcccggcgtgcttgtccattcgcacggcccgtttgcctggggtaaaaatgccgaggatgcagtgcataacgccatcgtgctggaagaagtggcctatatggggatcttctgccgccagcttgcgccgcagttgcccgacatgcagcaatccctgctggataaacactatctacgcaaacacggcgcaaaagcctattacgggcagtaa

SEQ ID NO: 35335 - protein, 231 aa, Salmonella typhimurium
MLEDLKRQVLEANLALPKHNLVTLTWGNVSAVDRERGVLVIKPSGVDYSVMTADDMVVVSLESGEVVEGHKKPSSDTPTHRLLYQAFPTIGGIVHTHSRHATIWAQAGQPIPATGTTHADYFYGTIPCTRKMTEAEINGEYEWETGNVIVETFEKQGIDAAQMPGVLVHSHGPFAWGKNAEDAVHNAIVLEEVAYMGIFCRQLAPQLPDMQQSLLDKHYLRKHGAKAYYGQ

SEQ ID NO: 35336 - DNA, 696 bp, Escherichia coli
  CDS (1)..(696): transl_table=11
atgttagagcaactgaaagccgacgtgctggcggcgaatctggcgcttcccgctcaccatctggtgacgttcacctggggcaatgtcagcgcggtagacgaaacgcggcaatggatggtaatcaaaccttccggcgtcgagtacgacgtgatgaccgccgacgatatggtggtggttgagatagccagcggtaaggtggtggaaggcagcaaaaaaccctcttccgatacaccaacgcatctggcgctctaccgtcgctatgccgaaattggcggtattgtgcatacccactcgcgccacgccaccatctggtcacaggccgggctggatctccccgcctggggcaccacccacgccgattatttttacggtgccatcccctgcacgcgacagatgaccgcagaggagattaacggcgaatatgaatatcagaccggcgaagtgatcattgaaaccttcgaagaacgtggcaggagtccggcacaaatcccggcggtgctggtgcattctcacggcccgttcgcatggggtaaaaacgccgccgatgccgtgcataacgccgtagtactcgaagaatgcgcctatatgggtctattctcgcgccagcttgcgccgcagctccctgcgatgcaaaacgaactgctggataagcactacctgcgtaagcatggggccaatgcctattacgggcagtaa

SEQ ID NO: 35337 - protein, 231 aa, Escherichia coli
MLEQLKADVLAANLALPAHHLVTFTWGNVSAVDETRQWMVIKPSGVEYDVMTADDMVVVEIASGKVVEGSKKPSSDTPTHLALYRRYAEIGGIVHTHSRHATIWSQAGLDLPAWGTTHADYFYGAIPCTRQMTAEEINGEYEYQTGEVIIETFEERGRSPAQIPAVLVHSHGPFAWGKNAADAVHNAVVLEECAYMGLFSRQLAPQLPAMQNELLDKHYLRKHGANAYYGQ

SEQ ID NO: 35338 - DNA, 696 bp, Haemophilus influenzae
  CDS (1)..(696): transl_table=11
atgttagcacaattaaaaaaagaggtttttgaagccaatttagcattacccaaacatcatttagtgacttttacttggggtaatgtttcagcaattgatcgtgaaaaaaatttagtcgtcattaaaccatctggtgtagattatgatgtaatgacagaaaatgatatggttgtcgtagatttatttacaggaaatattgttgaaggcaataaaaaaccttcttctgacacaccaactcatcttgagctttatcgacaatttcctcatattggtggtattgttcatacacattctcgacatgccacaatttgggctcaggctggcttagatattattgaggtgggaactacacatggcgattatttttacggtacgattccttgtacccgtcaaatgacaacaaaggaaataaaaggtaattacgaattagaaactggaaaagtgattgtcgaaacttttctttcgagaggaattgaacctgataatattccggcggtattagtgcatagtcatggcccatttgcttggggaaaagatgcaaataatgcggtacataatgccgttgttttagaagaagttgcttatatgaacttattttctcagcaacttaatccttatctatctcctatgcaaaaagatctattggataaacattatctacgcaaacatggtcaaaatgcctattatggtcaatga

SEQ ID NO: 35339 - protein, 231 aa, Haemophilus influenzae
MLAQLKKEVFEANLALPKHHLVTFTWGNVSAIDREKNLVVIKPSGVDYDVMTENDMVVVDLFTGNIVEGNKKPSSDTPTHLELYRQFPHIGGIVHTHSRHATIWAQAGLDIIEVGTTHGDYFYGTIPCTRQMTTKEIKGNYELETGKVIVETFLSRGIEPDNIPAVLVHSHGPFAWGKDANNAVHNAVVLEEVAYMNLFSQQLNPYLSPMQKDLLDKHYLRKHGQNAYYGQ

SEQ ID NO: 35340 - DNA, 687 bp, Escherichia coli O157
  CDS (1)..(687): transl_table=11
atgcaaaagctaaaacagcaggtgtttgaagccaacatggatctgccgcgctatgggctggtgacctttacctggggcaacgtcagcgctatcgaccgcgaacgcgggctggtggtgatcaagcccagcggcgtcgcctacgaaaccatgaaagcagacgatatggtggtggtcgatatgagcggtaaggtggtggaaggggaatatcgtccgtcttccgacaccgcgacgcatctcgaactctaccgtcgttatccgtcgcttggcggcattgtccatacccactccactcatgctaccgcatgggcgcaggcggggctggcgatcccggcgttaggcaccacgcacgctgactacttctttggtgatatcccgtgtacgcgtggattaagcgaagaagaggtgcagggtgagtatgaactgaacactggcaaagtgattatcgaaacgctgggcaacgccgagccgctgcatacgccgggaattgtggtgtatcagcacggaccgttcgcctgggggaaagatgcccacgacgcggtgcataacgcggtagtgatggaagaagtggcgaaaatggcgtggattgcgcgcagtattaatccacaactcaatcacatcgacagcttcctgatgaataaacacttcatgcgtaagcacggccccaacgcttattacgggcagaagtag

SEQ ID NO: 35341 - protein, 228 aa, Escherichia coli O157
MQKLKQQVFEANMDLPRYGLVTFTWGNVSAIDRERGLVVIKPSGVAYETMKADDMVVVDMSGKVVEGEYRPSSDTATHLELYRRYPSLGGIVHTHSTHATAWAQAGLAIPALGTTHADYFFGDIPCTRGLSEEEVQGEYELNTGKVIIETLGNAEPLHTPGIVVYQHGPFAWGKDAHDAVHNAVVMEEVAKMAWIARSINPQLNHIDSFLMNKHFMRKHGPNAYYGQK

SEQ ID NO: 35342 - DNA, 687 bp, Escherichia coli O6
  CDS (1)..(687): transl_table=11
atgcaaaagctgaaacagcaggtatttgaagccaacatggatctgccgcgctacgggctggtgacctttacctggggcaacgtcagcgccatcgaccgcgaacgcgggctggtggtgatcaagcccagcggcgtcgcctacgaaaccatgaaagcagacgatatggtggtggtcgatatgagcggcaaggtagtggaaggggagtatcgcccgtcttctgacaccgcgacgcatcttgaactctaccgtcgttatccgtcgcttggtggtattgtccatacccactccactcatgccaccgcatgggcgcaggcggggctggcgatcccggcgttaggcaccacgcacgccgattacttctttggcgacatcccgtgcacgcgcggattaagcgaagaagaggtgcagggtgagtacgaactgaataccggcaaagtaattatcgaaacgctgggtgacgccgagccgctgcatacgccgggaattgtggtgtatcagcacggaccgttcgcctgggggaaagatgcccacgacgcggtgcataacgcggtggtgatggaagaagtggcgaaaatggcgtggattgcgcgtagtattaacccacaactgaatcacatcgacagcttcctgatgaataaacacttcatgcgtaagcacggtcccaacgcttattacgggcagaagtaa

SEQ ID NO: 35343 - protein, 228 aa, Escherichia coli O6
MQKLKQQVFEANMDLPRYGLVTFTWGNVSAIDRERGLVVIKPSGVAYETMKADDMVVVDMSGKVVEGEYRPSSDTATHLELYRRYPSLGGIVHTHSTHATAWAQAGLAIPALGTTHADYFFGDIPCTRGLSEEEVQGEYELNTGKVIIETLGDAEPLHTPGIVVYQHGPFAWGKDAHDAVHNAVVMEEVAKMAWIARSINPQLNHIDSFLMNKHFMRKHGPNAYYGQK

SEQ ID NO: 35344 - DNA, 687 bp, Escherichia coli
  CDS (1)..(687): transl_table=11
atgcaaaagctaaaacagcaggtatttgaagccaacatggagctgccgcgctacgggctggtgacctttacctggggcaacgtcagcgctatcgaccgcgaacgcgggctggtggtgatcaagcccagcggcgttgcctacgaaaccatgaaagcggccgatatggtggtggttgatatgagcggcaaggtggtggaaggggagtatcgcccatcttccgacactgcgacgcatctcgaactctaccgtcgttacccgtcgcttggtggcattgtccatacccactccactcatgccaccgcatgggcgcaggcggggctggcgatcccggcgttaggcaccacgcacgccgactacttctttggcgacattccgtgtacgcgcgggttaagcgaagaagaggtgcagggcgagtatgaactgaacaccggcaaagtgattatcgaaacgctgggcaacgccgagccgctgcatacgccgggaattgtggtgtatcagcacgggccgttcgcctgggggaaagatgctcacgatgcggtgcataacgcggtggtgatggaagaagtggcgaaaatggcgtggattgcccgcggcattaacccacaactcaatcacatcgacagcttcctgatgaataaacacttcatgcgtaaacacggtcctaacgcttattacgggcagaagtag

SEQ ID NO: 35345 - protein, 228 aa, Escherichia coli
MQKLKQQVFEANMELPRYGLVTFTWGNVSAIDRERGLVVIKPSGVAYETMKAADMVVVDMSGKVVEGEYRPSSDTATHLELYRRYPSLGGIVHTHSTHATAWAQAGLAIPALGTTHADYFFGDIPCTRGLSEEEVQGEYELNTGKVIIETLGNAEPLHTPGIVVYQHGPFAWGKDAHDAVHNAVVMEEVAKMAWIARGINPQLNHIDSFLMNKHFMRKHGPNAYYGQK

SEQ ID NO: 35346 - DNA, 729 bp, Mycoplasma pneumoniae
  CDS (1)..(729): transl_table=4
atggatcaaaaaatgataaatgacctcaaagaacaggtttttcaaacgaatttattactacccaaatatggcttagtcatccacacttggggtaatgtttcgatgattgccccgaaccgtcagttctttgtcattaaaccaagtggtgtgagctatgacaagatgcgtgcccaagatatggtagtggtcgatttggacaacaatgttctagataccaacggcctcaaaccatcaagtgataccccaacccatgcgttaatgtacaaacattgtccagatattaaagctattgtgcacacccactctactttcgcgacatcgtttgctcaagccgataagccgattccttgtcttggtactacccatgctgataacttctttggaccaatcccgtgtactagggctttaagtgacagtgaaattaatggagcttatgaacataatactggtttagtcattctggaacacctcaaaaacaaccaggttgatgtcaatgcttgtgcggccatcttagtcaaagaacacggttcgtttgtttggtccaataagaatggcaaggatgcagtggaccgggcgttaactttagaacaagtggcccaaatggccttatatacccaaatgatcaatccccacatgaaagaagcaaacccagcgttacaacaaaagcactataaccgcaaacatggtaaagatgcttactatggacaagatactaagcaagaagattaa

SEQ ID NO: 35347 - protein, 242 aa, Mycoplasma pneumoniae
MDQKMINDLKEQVFQTNLLLPKYGLVIHTWGNVSMIAPNRQFFVIKPSGVSYDKMRAQDMVVVDLDNNVLDTNGLKPSSDTPTHALMYKHCPDIKAIVHTHSTFATSFAQADKPIPCLGTTHADNFFGPIPCTRALSDSEINGAYEHNTGLVILEHLKNNQVDVNACAAILVKEHGSFVWSNKNGKDAVDRALTLEQVAQMALYTQMINPHMKEANPALQQKHYNRKHGKDAYYGQDTKQED

SEQ ID NO: 35348 - DNA, 687 bp, Salmonella choleraesuis
  CDS (1)..(687): transl_table=11
atgcaaaagctcaagcagcaggtatttgacgctaacatggatttgccccgttatggactggtgacgtttacctggggcaacgtcagcgctatcgatcgcgaacgcggattggtggtgattaagccaagcggtgtcgcctatgaaaccatgaaggtagatgacatggtggtagtggatatggatggcaaagtggtggagggaggttatcgtccttcttccgataccgctacccatctggcgctgtatcaacgctatccgtcgcttggcggcgtcgttcatacccactccacccacgccacggcatgggcgcaggcggggatggctattccggcgctcggtaccacgcacgcggactatttctttggcgatattccttgtaccagggcgttaagcgaagaagaagtgcagggcgagtacgagctgaacaccggtaaggtgatcatcgaaacgctgggcgaggtggaaccgctgcatacgccaggcattgtcgtgtatcaacacgggccattcgcctgggggaaagatgcgcacgatgcggtacataacgcggtggtcatggaggaagtggcaaaaatggcgtggattgcgcgcggcattaacccggcgctgaatcccatcgacgattatctgatgaataaacacttcatgcgtaagcatggcccgaatgcgtattacgggcagaagtga

SEQ ID NO: 35349 - protein, 228 aa, Salmonella choleraesuis
MQKLKQQVFDANMDLPRYGLVTFTWGNVSAIDRERGLVVIKPSGVAYETMKVDDMVVVDMDGKVVEGGYRPSSDTATHLALYQRYPSLGGVVHTHSTHATAWAQAGMAIPALGTTHADYFFGDIPCTRALSEEEVQGEYELNTGKVIIETLGEVEPLHTPGIVVYQHGPFAWGKDAHDAVHNAVVMEEVAKMAWIARGINPALNPIDDYLMNKHFMRKHGPNAYYGQK

SEQ ID NO: 35350 - DNA, 687 bp, Salmonella paratyphi
  CDS (1)..(687): transl_table=11
atgcaaaagctcaagcagcaggtatttgacgctaacatggatttgccccgttatggactggtgacgtttacttggggcaacgtcagcgctatcgatcgcgaacgcgggctggtggtgattaagccaagcggtgtcgcctatgaaaccatgaaggtagatgacatggtggtggtggatatggatggcaaagtggtggagggacgttatcgtccttcttccgataccgctacccatctggcgctgtatcaacgctatccgtcgcttggcggcgtcgttcatacccattcaacccacgccacggcatgggcgcaggcggggatggctattccggcgctcggtaccacgcacgcggactatttctttggcgatattccttgtaccagggcgttaagcgaagaagaagtgcagggcgagtacgagctgaacactggtaaggtgatcatcgaaacgctgggcgaggtggaaccgctgcatacgccaggcattgtcgtgtatcaacacgggccgttcgcctgggggaaagatgcgcacgatgcggtacataacgcggtggtcatggaggaagtggcgcgaatggcgtggattgcgcgcggtattaaccctggcctcaaccccatcgacgattatctgatgaacaagcacttcatgcgtaagcatggcccgaatgcgtattacgggcagaagtga

SEQ ID NO: 35351 - protein, 228 aa, Salmonella paratyphi
MQKLKQQVFDANMDLPRYGLVTFTWGNVSAIDRERGLVVIKPSGVAYETMKVDDMVVVDMDGKVVEGRYRPSSDTATHLALYQRYPSLGGVVHTHSTHATAWAQAGMAIPALGTTHADYFFGDIPCTRALSEEEVQGEYELNTGKVIIETLGEVEPLHTPGIVVYQHGPFAWGKDAHDAVHNAVVMEEVARMAWIARGINPGLNPIDDYLMNKHFMRKHGPNAYYGQK

SEQ ID NO: 35352 - DNA, 687 bp, Salmonella typhimurium
  CDS (1)..(687): transl_table=11
atgcaaaagctcaagcagcaggtatttgacgctaacatggatttgccccgttatgggctggtgacctttacctggggcaacgtcagcgctatcgatcgcgaacgcgggctggtggtgattaagccaagcggtgtcgcctatgaaaccatgaaggtagatgacatggtggtggtggatatggatggcaaagtggtggagggacgttatcgtccttcttccgataccgctacccatctggcgctgtatcaacgctatccgtcgcttggcggcgtcgttcatacccactccacccacgccacggcatgggcgcaggcggggatggctattccagcgctcggcaccacgcacgcggactatttctttggcgatattccttgtaccagagcgttaagcgaagaagaagtgcagggcgagtacgagctgaacaccggcaaggtgatcatcgaaacgctgggcgaggtggaaccgctgcatacgccaggtattgtcgtgtatcaacacgggccgttcgcctgggggaaagatgcgcacgatgcggtacataacgcggtcgtcatggaggaagtggcgcgaatggcgtggattgcgcgcggtattaacccggcgctgaatcccatcgacgattatctgatgaataaacacttcatgcgtaagcatggcccgaatgcgtattacgggcagaagtga

SEQ ID NO: 35353 - protein, 228 aa, Salmonella typhimurium
MQKLKQQVFDANMDLPRYGLVTFTWGNVSAIDRERGLVVIKPSGVAYETMKVDDMVVVDMDGKVVEGRYRPSSDTATHLALYQRYPSLGGVVHTHSTHATAWAQAGMAIPALGTTHADYFFGDIPCTRALSEEEVQGEYELNTGKVIIETLGEVEPLHTPGIVVYQHGPFAWGKDAHDAVHNAVVMEEVARMAWIARGINPALNPIDDYLMNKHFMRKHGPNAYYGQK

SEQ ID NO: 35354 - DNA, 687 bp, Shigella flexneri
  CDS (1)..(687): transl_table=11
atgcaaaagctaaaacagcaggtgtttgaagccaacatggatctgccgcgctatgggctggtgacctttacttggggcaacgtcagcgctatcgaccgcgaacgcgggctggtggtgatcaagcccagcggcgttgcctacgaaaccatgaaagcagacgatatggtggtggtcgatatgagcggcaaggtggtggaaggggagtatcgcccatcttccgacactgcgacgcatctcgaactctaccgtcgttacccgtcgcttggcggcattgtccatacccactccactcatgccaccgcatgggcgcaggcggggctggcgatcccggcattaggcaccacgcacgctgactacttctttggtgatatcccgtgtacgcgtggattaagcgaagaagaggtgcagggtgagtatgaactgaacactggcaaagtgattatcgaaacgctgggcaacgccgagccgctgcatacgccgggaattgtggtgtatcagcacggaccgttcgcctgggggaaagatgcccacgacgcggtgcataacgcggtagtgatggaagaagtggcgaaaatggcgtggattgcgcgcagtattaatccacaactcaatcatatcgacagctacctgatgaataaacacttcatgcgtaagcacggtcctaacgcttattacgggcagaagtaa

SEQ ID NO: 35355 - protein, 228 aa, Shigella flexneri
MQKLKQQVFEANMDLPRYGLVTFTWGNVSAIDRERGLVVIKPSGVAYETMKADDMVVVDMSGKVVEGEYRPSSDTATHLELYRRYPSLGGIVHTHSTHATAWAQAGLAIPALGTTHADYFFGDIPCTRGLSEEEVQGEYELNTGKVIIETLGNAEPLHTPGIVVYQHGPFAWGKDAHDAVHNAVVMEEVAKMAWIARSINPQLNHIDSYLMNKHFMRKHGPNAYYGQK

SEQ ID NO: 35356 - DNA, 23 bp, Artificial sequence
  primer
atgttagaagatctcaaacgcca

SEQ ID NO: 35357 - DNA, 24 bp, Artificial sequence
  primer
ttactgcccgtaatatgccttcgc

SEQ ID NO: 35358 - protein, 239 aa, Artificial sequence
  consensus sequence
  Variant (2)..(4): Xaa in position 2 to 4 is any amino acid
  Variant (5)..(11): Xaa in position 5 to 11 is any or no amino acid
  Variant (13)..(14): Xaa in position 13 to 14 is any amino acid
  Variant (17)..(18): Xaa in position 17 to 18 is any amino acid
  Variant (20)..(23): Xaa in position 20 to 23 is any amino acid
  Variant (26)..(27): Xaa in position 26 to 27 is any amino acid
  Variant (34)..(40): Xaa in position 34 to 40 is any amino acid
  Variant (41)..(42): Xaa in position 41 to 42 is any or no amino acid
  Variant (50)..(50): Xaa in position 50 is any amino acid
  Variant (52)..(59): Xaa in position 52 to 59 is any amino acid
  Variant (61)..(65): Xaa in position 61 to 65 is any amino acid
  Variant (66)..(66): Xaa in position 66 is any or no amino acid
  Variant (68)..(70): Xaa in position 68 to 70 is any amino acid
  Variant (73)..(75): Xaa in position 73 to 75 is any amino acid
  Variant (76)..(77): Xaa in position 76 to 77 is any or no amino acid
  Variant (82)..(83): Xaa in position 82 to 83 is any amino acid
  Variant (86)..(87): Xaa in position 86 to 87 is any amino acid
  Variant (90)..(95): Xaa in position 90 to 95 is any amino acid
  Variant (97)..(98): Xaa in position 97 to 98 is any amino acid
  Variant (104)..(105): Xaa in position 104 to 105 is any amino acid
  Variant (107)..(109): Xaa in position 107 to 109 is any amino acid
  Variant (114)..(116): Xaa in position 114 to 116 is any amino acid
  Variant (118)..(119): Xaa in position 118 to 119 is any amino acid
  Variant (126)..(126): Xaa in position 126 is any amino acid
  Variant (128)..(128): Xaa in position 128 is any amino acid
  Variant (130)..(131): Xaa in position 130 to 131 is any amino acid
  Variant (134)..(137): Xaa in position 134 to 137 is any amino acid
  Variant (138)..(140): Xaa in position 138 to 140 is any or no amino acid
  Variant (142)..(145): Xaa in position 142 to 145 is any amino acid
  Variant (148)..(148): Xaa in position 148 is any amino acid
  Variant (149)..(149): Xaa in position 149 is any or no amino acid
  Variant (152)..(153): Xaa in position 152 to 153 is any amino acid
  Variant (155)..(161): Xaa in position 155 to 161 is any amino acid
  Variant (162)..(168): Xaa in position 162 to 168 is any or no amino acid
  Variant (170)..(172): Xaa in position 170 to 172 is any amino acid
  Variant (174)..(175): Xaa in position 174 to 175 is any amino acid
  Variant (180)..(180): Xaa in position 180 is any amino acid
  Variant (183)..(187): Xaa in position 183 to 187 is any amino acid
  Variant (188)..(188): Xaa in position 188 is any or no amino acid
  Variant (191)..(196): Xaa in position 191 to 196 is any amino acid
  Variant (198)..(199): Xaa in position 198 to 199 is any amino acid
  Variant (201)..(221): Xaa in position 201 to 221 is any amino acid
  Variant (222)..(224): Xaa in position 222 to 224 is any or no amino acid
  Variant (227)..(228): Xaa in position 227 to 228 is any amino acid
  Variant (233)..(234): Xaa in position 233 to 234 is any amino acid
LXXXXXXXXXXVXXANXXLXXXXLVXXTWGNVSXXXXXXXXXVIKPSGVXYXXXXXXXXVXXXXXXGXXXEGXXXXXPSSDXXTHXXLYXXXXXXGXXVHTHSXXAXXXAQAGXXXPXXGTTHADXFXGXXPCXXXXXXXEXXXXYEXXTGXXIXXXXXXXXXXXXXXPXXXVXXHGPFXWGXXXXXXAVXXXXXXEXXAXXXXXXXXXXXXXXXXXXXXXXXXKHXXRKHGXXAYYGQ

SEQ ID NO: 35359 - protein, 41 aa, Artificial sequence
  protein pattern
  Variant (5)..(6): Xaa in position 5 to 6 is any or no amino acid
  Variant (8)..(9): Xaa in position 8 to 9 is any or no amino acid
  Variant (11)..(12): Xaa in position 11 to 12 is any amino acid
  Variant (13)..(13): Xaa in position 13 is Phe, Ile, Leu, Met or Val
  Variant (15)..(19): Xaa in position 15 to 19 is any amino acid
  Variant (20)..(20): Xaa in position 20 is Ile, Leu or Val
  Variant (21)..(21): Xaa in position 21 is any amino acid
  Variant (22)..(22): Xaa in position 22 is Ala, Gly or Ser
  Variant (23)..(23): Xaa in position 23 is Ile or Val
  Variant (29)..(30): Xaa in position 29 to 30 is any amino acid
  Variant (31)..(31): Xaa in position 31 is Ala or Gly
  Variant (32)..(32): Xaa in position 32 is Thr or Val
  Variant (33)..(33): Xaa in position 33 is any amino acid
  Variant (34)..(34): Xaa in position 34 is Phe, Trp or Tyr
  Variant (35)..(35): Xaa in position 35 is Ala or Ser
  Variant (36)..(36): Xaa in position 36 is Ala or Gln
  Variant (37)..(40): Xaa in position 37 to 40 is any amino acid
  Variant (41)..(41): Xaa in position 41 is Ile, Leu or Val
PSSDXXTXXHXXXYXXXXXXXXXVHTHSXXXXXXXXXXXXX

SEQ ID NO: 35360 - protein, 14 aa, Artificial sequence
  protein pattern
  Variant (2)..(2): Xaa in position 2 is Ala or Thr
  Variant (4)..(4): Xaa in position 4 is Ala or Gly
  Variant (6)..(8): Xaa in position 6 to 8 is any amino acid
  Variant (9)..(9): Xaa in position 9 is Asp, Glu, Gly, Ser or Thr
  Variant (10)..(10): Xaa in position 10 is any amino acid
  Variant (11)..(11): Xaa in position 11 is Ile or Val
  Variant (12)..(12): Xaa in position 12 is Ala or Pro
  Variant (13)..(13): Xaa in position 13 is any amino acid
  Variant (14)..(14): Xaa in position 14 is Ala or Thr
TXHXDXXXXXXXXX

SEQ ID NO: 35361 - protein, 17 aa, Artificial sequence
  protein pattern
  Variant (3)..(4): Xaa in position 3 to 4 is any or no amino acid
  Variant (6)..(6): Xaa in position 6 is any amino acid
  Variant (7)..(8): Xaa in position 7 to 8 is any or no amino acid
  Variant (13)..(16): Xaa in position 13 to 16 is any amino acid
  Variant (17)..(17): Xaa in position 17 is Asp, Glu, Gly, Asn, Gln, Ser or Thr
LVXXTXXXGNVSXXXXX

SEQ ID NO: 35362 - protein, 21 aa, Artificial sequence
  protein pattern
  Variant (7)..(7): Xaa in position 7 is any amino acid
  Variant (9)..(12): Xaa in position 9 to 12 is any amino acid
  Variant (13)..(16): Xaa in position 13 to 16 is any or no amino acid
  Variant (18)..(18): Xaa in position 18 is Ile or Val
  Variant (19)..(19): Xaa in position 19 is Cys, Thr or Val
  Variant (20)..(20): Xaa in position 20 is Asp, Glu, Asn or Ser
  Variant (21)..(21): Xaa in position 21 is Ile, Leu or Met
IKPSGVXYXXXXXXXXVXXXX

SEQ ID NO: 35363 - protein, 14 aa, Artificial sequence
  protein pattern
  Variant (2)..(2): Xaa in position 2 is Phe, His or Tyr
  Variant (3)..(3): Xaa in position 3 is any amino acid
  Variant (8)..(9): Xaa in position 8 to 9 is any amino acid
HXXRKHGXXAYYGQ

SEQ ID NO: 35364 - protein, 10 aa, Artificial sequence
  protein pattern
  Variant (2)..(2): Xaa in position 2 is any amino acid
  Variant (3)..(3): Xaa in position 3 is Asp, Glu, Gly, Asn, Gln or Ser
  Variant (5)..(5): Xaa in position 5 is Ala or Gly
  Variant (6)..(6): Xaa in position 6 is Pro or Ser
  Variant (8)..(8): Xaa in position 8 is Ala, Cys, Ser, Thr or Val
  Variant (10)..(10): Xaa in position 10 is Asp, Gly or Ser
VXXHXXFXWX

SEQ ID NO: 35365 - protein, 19 aa, Artificial sequence
  protein pattern
  Variant (2)..(5): Xaa in position 2 to 5 is any amino acid
  Variant (6)..(6): Xaa in position 6 is any or no amino acid
  Variant (9)..(9): Xaa in position 9 is any amino acid
  Variant (10)..(10): Xaa in position 10 is Asp, Glu, Asn or Gln
  Variant (13)..(14): Xaa in position 13 to 14 is any amino acid
  Variant (15)..(15): Xaa in position 15 is Ile or Val
  Variant (16)..(18): Xaa in position 16 to 18 is any amino acid
  Variant (19)..(19): Xaa in position 19 is Phe, Ile, Leu or Met
EXXXXXYEXXTGXXXXXXX

SEQ ID NO: 35366 - DNA, 1893 bp, Escherichia coli
  CDS (1)..(1893): transl_table=11
atggctatcgaaatcaaagtaccggacatcggggctgatgaagttgaaatcaccgagatcctggtcaaagtgggcgacaaagttgaagccgaacagtcgctgatcaccgtagaaggcgacaaagcctctatggaagttccgtctccgcaggcgggtatcgttaaagagatcaaagtctctgttggcgataaaacccagaccggcgcactgattatgattttcgattccgccgacggtgcagcagacgctgcacctgctcaggcagaagagaagaaagaagcagctccggcagcagcaccagcggctgcggcggcaaaagacgttaacgttccggatatcggcagcgacgaagttgaagtgaccgaaatcctggtgaaagttggcgataaagttgaagctgaacagtcgctgatcaccgtagaaggcgacaaggcttctatggaagttccggctccgtttgctggcaccgtgaaagagatcaaagtgaacgtgggtgacaaagtgtctaccggctcgctgattatggtcttcgaagtcgcgggtgaagcaggcgcggcagctccggccgctaaacaggaagcagctccggcagcggcccctgcaccagcggctggcgtgaaagaagttaacgttccggatatcggcggtgacgaagttgaagtgactgaagtgatggtgaaagtgggcgacaaagttgccgctgaacagtcactgatcaccgtagaaggcgacaaagcttctatggaagttccggcgccgtttgcaggcgtcgtgaaggaactgaaagtcaacgttggcgataaagtgaaaactggctcgctgattatgatcttcgaagttgaaggcgcagcgcctgcggcagctcctgcgaaacaggaagcggcagcgccggcaccggcagcaaaagctgaagccccggcagcagcaccagctgcgaaagcggaaggcaaatctgaatttgctgaaaacgacgcttatgttcacgcgactccgctgatccgccgtctggcacgcgagtttggtgttaaccttgcgaaagtgaagggcactggccgtaaaggtcgtatcctgcgcgaagacgttcaggcttacgtgaaagaagctatcaaacgtgcagaagcagctccggcagcgactggcggtggtatccctggcatgctgccgtggccgaaggtggacttcagcaagtttggtgaaatcgaagaagtggaactgggccgcatccagaaaatctctggtgcgaacctgagccgtaactgggtaatgatcccgcatgttactcacttcgacaaaaccgatatcaccgagttggaagcgttccgtaaacagcagaacgaagaagcggcgaaacgtaagctggatgtgaagatcaccccggttgtcttcatcatgaaagccgttgctgcagctcttgagcagatgcctcgcttcaatagttcgctgtcggaagacggtcagcgtctgaccctgaagaaatacatcaacatcggtgtggcggtggataccccgaacggtctggttgttccggtattcaaagacgtcaacaagaaaggcatcatcgagctgtctcgcgagctgatgactatttctaagaaagcgcgtgacggtaagctgactgcgggcgaaatgcagggcggttgcttcaccatctccagcatcggcggcctgggtactacccacttcgcgccgattgtgaacgcgccggaagtggctatcctcggcgtttccaagtccgcgatggagccggtgtggaatggtaaagagttcgtgccgcgtctgatgctgccgatttctctctccttcgaccaccgcgtgatcgacggtgctgatggtgcccgtttcattaccatcattaacaacacgctgtctgacattcgccgtctggtgatgtaa

SEQ ID NO: 35367 - protein, 630 aa, Escherichia coli
MAIEIKVPDIGADEVEITEILVKVGDKVEAEQSLITVEGDKASMEVPSPQAGIVKEIKVSVGDKTQTGALIMIFDSADGAADAAPAQAEEKKEAAPAAAPAAAAAKDVNVPDIGSDEVEVTEILVKVGDKVEAEQSLITVEGDKASMEVPAPFAGTVKEIKVNVGDKVSTGSLIMVFEVAGEAGAAAPAAKQEAAPAAAPAPAAGVKEVNVPDIGGDEVEVTEVMVKVGDKVAAEQSLITVEGDKASMEVPAPFAGVVKELKVNVGDKVKTGSLIMIFEVEGAAPAAAPAKQEAAAPAPAAKAEAPAAAPAAKAEGKSEFAENDAYVHATPLIRRLAREFGVNLAKVKGTGRKGRILREDVQAYVKEAIKRAEAAPAATGGGIPGMLPWPKVDFSKFGEIEEVELGRIQKISGANLSRNWVMIPHVTHFDKTDITELEAFRKQQNEEAAKRKLDVKITPVVFIMKAVAAALEQMPRFNSSLSEDGQRLTLKKYINIGVAVDTPNGLVVPVFKDVNKKGIIELSRELMTISKKARDGKLTAGEMQGGCFTISSIGGLGTTHFAPIVNAPEVAILGVSKSAMEPVWNGKEFVPRLMLPISLSFDHRVIDGADGARFITIINNTLSDIRRLVM

SEQ ID NO: 35368 - DNA, 1899 bp, Pasteurella multocida subsp. multocida str. Pm70
  CDS (1)..(1899): transl_table=11
atgtcaaaacaaattcaagtaccagatattggtggtgatgaagtgactgtgacagaagtcatggtaaaagcgggtgatacggttgcagttgatcaaagcgtaatcaatgtagaaggtgataaagcctcaatggaagtcccttcaccagaagcgggtgtgatcaaagaagtgttagtgaaagtgggtgacaaagtgtcaacgggttcaccgatgtttgtgttagaaacgggtgatgcaaaacctgctgaaacgccaaaagctgaaacagcaccagtatctgcgccagcgccagcagcaagcgcagtggttgaagtacatgtccccgatattggtggtgatgaagttaacgtgacagaaattatggtcaaagtgggtgataaagttgaggttgagcaatcgatcatcaatgtagaaggtgataaagcctcaatggaagtcccagccccaatcgcaggtgttgttaaagaaattctaatcaatgttggtgacaaagtatcaacaggatcattgattatgaaatttgaaacgggtgatgcgccagcagtagcgacaccagcacaagcgccaacagctgcgccatcagcacctgcacaaagtgcggtaaaagatgtgaacgtgccagatattggtggtgacgaagtcaacgtgacggaaatcatggtgaacgtgggtgacacgatcacagaagaacaatcattaattactgttgaaggtgataaagcctcaatggaagtgcctgcgccatttgccggtgtggtaaaagaaattttagtgaaatctggcgacaaagtctctacgggttcattaattatgcgctttgaagtagcgggagccgcaccttcagcagcaccagcacaacctgcacctgctgcacaagcggcagcaccacaagcagcaacgccagcacctgttgcaagcgcgccagcgggtgatgcagaagtaacaggtagttctgtatttgcttatgccacaccggttgtacgtcgtttagcacgtgaatttggtgtgaacctcgataaagtgaaaggtactggtcgtaaaggtcgtatcttaaaagaagacgttcaagcatatgtgaaagcagcaatcaaagcggttgaatcaggttctgtatctgcagcgccagcgggcagcggtgtagcaaatggtgcaggcttaggcttattgccatggccgaaagtggatttcagcaagtttggtgaagtggaagaagtagaactcacccgtattaacaaaatttcgggtgcaaacttacaccgtaactgggtgatgatcccgcatgttacacatttcgatcgtgccgatatcactgacttagaagcgttccgtaaagaacaaaatgtgttagcggaaaaacaaaaatggggtgtgaaaatcacgccagtggtgtttatcatgaaagcggctgccaaagcattagaagcgtatccacgtttcaatagctcaatttctgaagatggtcaacgtttaaccttgaaaaaatatgtcaatattggtgtggcagtggatacaccaaacggcttagtcgtgcctgtctttaaagatgtcaacaaaaaaggcattatcgaactttctcgtgaattaatggaagtgtcgaaaaaagcacgtgacggcaaattaactgcttcagatatgcaagggggttgtttcacgatttcaagcttagggggcttaggtacgacacactttgcgccaatcgtgaatgcgccagaagtcgcaattctaggtgtgtctaaatcagaaatggcgccagtttggaacggtaaagaatttacgccacgcttaatgttgccattatcattgtctttcgaccaccgtgtgatcgatggtgcggatggcgcacgtttcattagctatatcaatggcgtgttatctgatcttcgtcgtttagttatgtaa

SEQ ID NO: 35369 - protein, 632 aa, Pasteurella multocida subsp. multocida str. Pm70
MSKQIQVPDIGGDEVTVTEVMVKAGDTVAVDQSVINVEGDKASMEVPSPEAGVIKEVLVKVGDKVSTGSPMFVLETGDAKPAETPKAETAPVSAPAPAASAVVEVHVPDIGGDEVNVTEIMVKVGDKVEVEQSIINVEGDKASMEVPAPIAGVVKEILINVGDKVSTGSLIMKFETGDAPAVATPAQAPTAAPSAPAQSAVKDVNVPDIGGDEVNVTEIMVNVGDTITEEQSLITVEGDKASMEVPAPFAGVVKEILVKSGDKVSTGSLIMRFEVAGAAPSAAPAQPAPAAQAAAPQAATPAPVASAPAGDAEVTGSSVFAYATPVVRRLAREFGVNLDKVKGTGRKGRILKEDVQAYVKAAIKAVESGSVSAAPAGSGVANGAGLGLLPWPKVDFSKFGEVEEVELTRINKISGANLHRNWVMIPHVTHFDRADITDLEAFRKEQNVLAEKQKWGVKITPVVFIMKAAAKALEAYPRFNSSISEDGQRLTLKKYVNIGVAVDTPNGLVVPVFKDVNKKGIIELSRELMEVSKKARDGKLTASDMQGGCFTISSLGGLGTTHFAPIVNAPEVAILGVSKSEMAPVWNGKEFTPRLMLPLSLSFDHRVIDGADGARFISYINGVLSDLRRLVM

SEQ ID NO: 35370 - DNA, 1893 bp, Escherichia coli O157:H7 EDL933
  CDS (1)..(1893): transl_table=11
atggctatcgaaatcaaagtaccggacatcggggctgatgaagttgaaatcaccgagatcctggtcaaagtgggcgacaaagttgaagccgaacagtcgctgatcaccgtagaaggcgacaaagcttctatggaagttccgtctccgcaggcgggtatcgttaaagagatcaaagtctctgttggcgataaaactcagaccggcgcactgattatgattttcgattccgccgacggtgcagcagacgctgcacctgctcaggcagaagagaagaaagaagcagctccggcagcagtccccgaggctgccgcggcaaaagacgttaacgttccggatatcggcagcgacgaagttgaagtgaccgaaatcctggtgaaagttggcgacaaagttgaagctgagcagtcgctgatcaccgtagaaggcgataaagcttctatggaagttccggctccgtttgcaggcaccgtgaaagaaatcaaagtgaacaccggcgacaaagtgtctaccggctcgctgattatggtcttcgaagtggcgggtgaagcaggcgcggcagctccggcggctaaacaggaagcggctccggcagcggcccctgcaccagcggctggcgtgaaagaagttaacgttccggatatcggcggtgacgaagttgaagtgaccgaagtgatggtgaaagtgggcgacaaagttgccgctgaacagtcactgattaccgtagaaggcgataaagcttctatggaagttccggctccgtttgcaggcgtcgtgaaggaactgaaagtcaacgttggcgataaagtgaaaactggctcgctgattatgatcttcgaagttgaaggcgcagcgcctgcggcagctcctgcgaaacaggaagcagcagcgccggctccggcagcaaaagctgaagccccggcagcagcaccggctgcgaaagcggaaggcaaatctgaatttgctgaaaatgacgcttacgttcacgcgaccccgctgatccgccgtctggcacgcgagtttggcgttaaccttgcgaaagtgaagggcactggccgtaaaggtcgtatcctgcgcgaagacgttcaggcttacgtgaaagaagctatcaaacgtgcagaagcagctccggcagcgactggcggtggtatccctggcatgctgccgtggccgaaggtggacttcagcaagtttggtgaaatcgaagaagtggaactgggccgtatccagaaaatttctggtgcgaacctgagccgtaactgggtgatgatcccgcatgttactcacttcgacaaaaccgatatcaccgagctggaagcgttccgtaaacagcagaacgaagaagcggcgaaacgtaagctggatgtgaagatcaccccggttgtcttcatcatgaaagccgttgctgcagcgcttgagcagatgcctcgcttcaacagttcgctgtcggaagacggtcagcgtctgaccctgaagaaatacatcaacatcggtgtggcggtggataccccgaacggtctggttgttccggtattcaaagacgtcaacaagaaaggcatcatcgaactgtctcgcgagctgatgactatttctaagaaagcgcgtgacggtaagctgactgcgggcgaaatgcagggcggttgcttcaccatctccagcatcggcggcctgggtactacccacttcgcgccgattgtgaacgcgccggaagtggctatcctcggcgtttccaagtccgcgatggagccggtgtggaatggtaaagagttcgtgccgcgtctgatgctgccgatttctctctccttcgaccaccgcgtgatcgacggtgctgatggtgcccgtttcattaccatcattaacaacacgctgtctgacattcgccgtctggtgatgtaa

SEQ ID NO: 35371 - protein, 630 aa, Escherichia coli O157:H7 EDL933
MAIEIKVPDIGADEVEITEILVKVGDKVEAEQSLITVEGDKASMEVPSPQAGIVKEIKVSVGDKTQTGALIMIFDSADGAADAAPAQAEEKKEAAPAAVPEAAAAKDVNVPDIGSDEVEVTEILVKVGDKVEAEQSLITVEGDKASMEVPAPFAGTVKEIKVNTGDKVSTGSLIMVFEVAGEAGAAAPAAKQEAAPAAAPAPAAGVKEVNVPDIGGDEVEVTEVMVKVGDKVAAEQSLITVEGDKASMEVPAPFAGVVKELKVNVGDKVKTGSLIMIFEVEGAAPAAAPAKQEAAAPAPAAKAEAPAAAPAAKAEGKSEFAENDAYVHATPLIRRLAREFGVNLAKVKGTGRKGRILREDVQAYVKEAIKRAEAAPAATGGGIPGMLPWPKVDFSKFGEIEEVELGRIQKISGANLSRNWVMIPHVTHFDKTDITELEAFRKQQNEEAAKRKLDVKITPVVFIMKAVAAALEQMPRFNSSLSEDGQRLTLKKYINIGVAVDTPNGLVVPVFKDVNKKGIIELSRELMTISKKARDGKLTAGEMQGGCFTISSIGGLGTTHFAPIVNAPEVAILGVSKSAMEPVWNGKEFVPRLMLPISLSFDHRVIDGADGARFITIINNTLSDIRRLVM

SEQ ID NO: 35372 - DNA, 1374 bp, Agrobacterium tumefaciens str. C58
  CDS (1)..(1374): transl_table=11
ttggggggactagtcatgcctatcaacattaccatgcctgccctttccccgacgatggaagagggcaatctgaccaagtggctggtcaaggaaggcgacaaggtcgcccccggtgacgtgatcgccgagatcgagaccgacaaggcgaccatggaagtggaagccgtcgatgaaggcaccgtcgccaagctggttgttccggccggcaccgaagccgtcaaggtcaacgccctgatcgcgatcctcgcagcagaaggagaagatgtggccgaggcggcgaagggcggcgatgccgttcctgccaaggcggaagctcccaagccggaagccgcaaaggctgaagcgccgaaggaagaagctgctccagtcaaggctgaaaagccggtagccgatcaggcggccgcatcttccacaccggccccggttgccaagtccggcgagcgcattttcgcatcgccacttgcccgccgtcttgccaaggaagccggtctcgacctttcggccgtctccggttccggcccgcatggccgtatcgtcaagaccgatgtggaaaaggctgccgcttccggcggtgcaaaggctgctcccgccgctgctgcatccgcaggcgcaccggccccggcactcgccaagggccagtccgacgaagccgttctcaagctgttcgaacagggctcctacgagcttgtgccgcatgacggcatgcgcaaggtcatcgccaagcgtctggtcgaatccaagcagacggttccgcatttctacgtttccgtggattgcgaactggatacgcttctggcgctgcgcgcccagctcaacgccgctgctcccgaaaaggacggcaagccggtctacaagctgtcggtcaacgacatggtcatcaaggcgctggcgctggcgctgcgtgacgttcctgacgccaacgtctcctggacggaaagcgccatggtcaagcacaagcacgcggatgtcggcgttgccgtttccattccgggtggcctgatcacgccgatcatccgcaaagcggaagaaaagtcgctctccaccatctccaacgagatgaaggactacggcaagcgcgcgaaagagcgcaagctgaagcccgaggaatatcagggcggtacgactgccgtgtccaacatgggcatgatgggcgtgaaaagcttctccgccgtcatcaacccgccgcacgccaccattctggctgtcggtgcgggcgaacagcgtgccgtcgtgaagaacggcgagatcaagatcgccaacgtcatgacggtcacgctttccaccgaccatcgctgcgtcgatggcgcgctcggagccgaactgatcggcgcgttcaagcgctacatcgaaaacccgatgggcatgctggtttga

SEQ ID NO: 35373 - protein, 457 aa, Agrobacterium tumefaciens str. C58
MGGLVMPINITMPALSPTMEEGNLTKWLVKEGDKVAPGDVIAEIETDKATMEVEAVDEGTVAKLVVPAGTEAVKVNALIAILAAEGEDVAEAAKGGDAVPAKAEAPKPEAAKAEAPKEEAAPVKAEKPVADQAAASSTPAPVAKSGERIFASPLARRLAKEAGLDLSAVSGSGPHGRIVKTDVEKAAASGGAKAAPAAAASAGAPAPALAKGQSDEAVLKLFEQGSYELVPHDGMRKVIAKRLVESKQTVPHFYVSVDCELDTLLALRAQLNAAAPEKDGKPVYKLSVNDMVIKALALALRDVPDANVSWTESAMVKHKHADVGVAVSIPGGLITPIIRKAEEKSLSTISNEMKDYGKRAKERKLKPEEYQGGTTAVSNMGMMGVKSFSAVINPPHATILAVGAGEQRAVVKNGEIKIANVMTVTLSTDHRCVDGALGAELIGAFKRYIENPMGMLV

SEQ ID NO: 35374 - DNA, 1233 bp, Agrobacterium tumefaciens str. C58
  CDS (1)..(1233): transl_table=11
atggccactgaaatccgcgtaccaaccctcggcgaatccgtcagcgaagcgaccgtcggcacctggttcaagaaggtcggcgataccgtcaaggccgacgaacctctcgttgaactcgaaaccgacaaggttaccgtcgaagtcccggcccctgcgtcaggcgttctcaccgaaatcgttgcgcagaacggcgagaccgttggtctcgacgcgcttctcggccagatcgccgaaggtgctgccggcgctgcgacttctgcacctgcggcaaagcctgctgcgcccgccgccgcaccggcacctgccgcagccgtagccgccgctccgggtggcagcgccatgccaccggcacctgccgctggcaagctgcttgccgaaaacaacctgtctgccgatcaggttgacggttcgggcaagcgtggtcaggttctgaagggcgacgttcttgccgctgtcgccaagggcgtttcggcacctgccgccgcaccggcaccggttgccgccccccgtccggtttcggccgagcaggatcaggttcgcgaagagcgcgtcaagatgacccgtctgcgccagacgatcgcccgccgcctgaaggacgcgcagaacaccgccgccatgctcaccacttacaacgaagtggacatgagcgcggtcatggaccttcgtaaccgctacaaggacgtgtttgaaaagaagcacggcgtcaagcttggcttcatgggcttcttcaccaaagccgtgacccacgcgctgaaggagctgcctgctgtcaacgctgaaatcgacggcacggacatcatctacaagaactattgtcacgtcggcatggctgtcggcaccgacaagggcctcgtcgttcctgttatccgtgatgccgaccagctctccatcgccggcgtcgaaaaggaactcggtcgccttgccaaggcagcccgtgacggttcgctcggcatggcggacatgcagggcggcaccttcaccatcaccaatggtggcgtctacggttcactaatgtcttcgccgatcctcaacgcaccgcagtcgggcattctcggcatgcacaagatccaggagcgcccggtcgccatcggcggtcaggtcgtcatccgcccgatgatgtatcttgcgctctcctacgatcaccgtatcgttgacggcaaggaagccgtgaccttcctcgttcgcgtcaaggagagcctcgaggatccggaacgtctggttctcgatctctga

SEQ ID NO: 35375 - protein, 410 aa, Agrobacterium tumefaciens str. C58
MATEIRVPTLGESVSEATVGTWFKKVGDTVKADEPLVELETDKVTVEVPAPASGVLTEIVAQNGETVGLDALLGQIAEGAAGAATSAPAAKPAAPAAAPAPAAAVAAAPGGSAMPPAPAAGKLLAENNLSADQVDGSGKRGQVLKGDVLAAVAKGVSAPAAAPAPVAAPRPVSAEQDQVREERVKMTRLRQTIARRLKDAQNTAAMLTTYNEVDMSAVMDLRNRYKDVFEKKHGVKLGFMGFFTKAVTHALKELPAVNAEIDGTDIIYKNYCHVGMAVGTDKGLVVPVIRDADQLSIAGVEKELGRLAKAARDGSLGMADMQGGTFTITNGGVYGSLMSSPILNAPQSGILGMHKIQERPVAIGGQVVIRPMMYLALSYDHRIVDGKEAVTFLVRVKESLEDPERLVLDL

SEQ ID NO: 35376 - DNA, 1890 bp, Salmonella typhimurium LT2
  CDS (1)..(1890): transl_table=11
atggctatcgaaatcaaagtaccggacatcgggacagatgaagttgaaatcaccgagattctggtcaaagtgggcgacaaagtggaagctgaacagtcgctgatcaccgtagaaggcgacaaagcctctatggaagtcccgtctccgcaggctggcgtcgtgaaagagatcaaagtctctgtcggcgacaaaaccgagaccggtgcacttatcatgattttcgattccgccgaaggtgcagccgacgctgcacctgctaaggcagaagagaagaaagaagcggcgccggcagcagcacctgctgcggcagcggcgaaagacgttcacgttccggatatcggcagtgacgaagttgaagtgactgaagtgatggtgaaagtgggcgacaccgtagaagctgaacagtcgctgatcaccgtcgaaggcgacaaggcctctatggaagttcctgctccgtttgcaggcaccgtgaaagagatcaaagtgaacaccggtgataaagtctctaccggctctctgattatggtcttcgaagtggcgggtgaagcaggcgcagcagcaccagcgaaagcggaagccgctccggctgcggctgctccagcagcagcgacgggcgtgaaagacgttaacgtaccggacatcggcggcgacgaagttgaagtcaccgaagtgatggtcaaagtcggcgataaagttaccgctgaacagtcgctgatcaccgtagaaggcgacaaagcctctatggaagttccggctccgttcgcgggtaccgtgaaagaaatcaagatcagcaccggcgataaagtgaaaaccggttctctgattatggtcttcgaagtagaaggcgcagcgcctgcggccgctccggctaaacaggaagcggcggcgccggctccggcggcgaaagctgagaagcctgctgccccggctgcaaaagcggaaggcaaatctgagttcgctgaaaacgacgcgtacgttcacgctactccgctgattcgccgtctggcgcgcgagtttggcgtcaacctggcgaaagtgaaaggcaccggtcgtaaaggccgtattctgcgcgaagacgttcaggcttacgtgaaagacgctatcaaacgcgcggaacgtgcgccggctgctgcgggcggcggtatcccgggtatgctgccgtggccgaaagtggacttcagcaagtttggtgaagttgaagaagtggaactgggccgtatccagaaaatctctggcgcgaacctgagccgtaactgggtgatgatcccgcacgttacgcacttcgacaaaaccgatatcaccgatctggaagcgttccgtaaacagcagaacgccgaagctgagaagcgcaaactggatgtgaaatacacgccagtggtcttcatcatgaaagcggttgccgctgctctggaacagatgccgcgcttcaacagctctctgtccgaagacggtcagcgtctgaccctgaagaaatacatcaacatcggcgtggcggttgataccccgaatggcctggtggttccggtctttaaagacgtgaataagaagagcgtgaccgagctgtctcgtgaactgaccaccatctccaaaaaagcgcgtgatggtaagctgaccgctggcgaaatgcagggtggttgcttcactatctccagcatcggcggcctgggaactacccacttcgcgccgattgttaacgcgccggaagtggctatcctcggcgtttctaagtcggcgatggaaccggtgtggaatgggaaagagtttgtgccgcgtctgatgatgcctatctctctttccttcgaccaccgtgtgatcgatggtgctgatggtgcgcgtttcattaccattatcaacaatatgttgtctgacattcgccgtctggtgatgtaa

SEQ ID NO: 35377 - protein, 629 aa, Salmonella typhimurium LT2
MAIEIKVPDIGTDEVEITEILVKVGDKVEAEQSLITVEGDKASMEVPSPQAGVVKEIKVSVGDKTETGALIMIFDSAEGAADAAPAKAEEKKEAAPAAAPAAAAAKDVHVPDIGSDEVEVTEVMVKVGDTVEAEQSLITVEGDKASMEVPAPFAGTVKEIKVNTGDKVSTGSLIMVFEVAGEAGAAAPAKAEAAPAAAAPAAATGVKDVNVPDIGGDEVEVTEVMVKVGDKVTAEQSLITVEGDKASMEVPAPFAGTVKEIKISTGDKVKTGSLIMVFEVEGAAPAAAPAKQEAAAPAPAAKAEKPAAPAAKAEGKSEFAENDAYVHATPLIRRLAREFGVNLAKVKGTGRKGRILREDVQAYVKDAIKRAERAPAAAGGGIPGMLPWPKVDFSKFGEVEEVELGRIQKISGANLSRNWVMIPHVTHFDKTDITDLEAFRKQQNAEAEKRKLDVKYTPVVFIMKAVAAALEQMPRFNSSLSEDGQRLTLKKYINIGVAVDTPNGLVVPVFKDVNKKSVTELSRELTTISKKARDGKLTAGEMQGGCFTISSIGGLGTTHFAPIVNAPEVAILGVSKSAMEPVWNGKEFVPRLMMPISLSFDHRVIDGADGARFITIINNMLSDIRRLVM

SEQ ID NO: 35378 - DNA, 2028 bp, Corynebacterium glutamicum ATCC 13032
  CDS (1)..(2028): transl_table=11
atggcgttctccgtagagatgcccgagctgggcgaatcagtaaccgaaggcacgatcacccagtggttgaagtctgttggtgacactgttgaggtagatgagccgttgctcgaggtctcaactgacaaggtcgacaccgagattccctctcctgtcgccggtgtcatcctagagattaaggctgaagaggatgacaccgtcgacgtcggcggtgtcattgcaataatcggcgatgctgatgagactcctgccaacgaagctcctgccgacgaggcaccagctcctgccgaagaggaagaaccagttaaggaagagccaaagaaggaggcagctcctgaagctccagcagcaactggcgccgcaaccgatgtggaaatgccagaactcggcgaatccgtcaccgaaggcaccattacccagtggctcaaggctgtcggcgacaccgtcgaagtagacgaaccacttcttgaggtctccaccgacaaggtcgacaccgaaatcccatccccagtagcaggcaccatcgtggagatccttgcagacgaagacgacaccgtcgacgtcggcgcagtcatcgcccgcatcggtgacgcaaacgcagctgcagcacctgccgaagaggaagcagctcctgccgaagaggaagaaccagttaaggaagagccaaagaaggaggcagctcctgaagctccagcagcaactggcgccgcaaccgatgtggaaatgccagaactcggcgaatccgtcaccgaaggcaccattacccagtggctcaaggctgtcggcgacaccgtcgaagtagacgaaccacttcttgaggtctccaccgacaaggtcgacaccgaaatcccatccccagtagcaggcaccatcgtggagatccttgcagacgaagacgacaccgtcgacgtcggcgcagtcatcgcccgcatcggtgacgcaaacgcagctgcagcacctgccgaagaggaagcagctcctgccgaagaggaggaaccagttaaggaagagccaaagaaggaagagcccaagaaggaagagcccaagaaggaagcagctactacacctgctgcggcatccgcaactgtgtccgcttctggcgacaacgttccatacgtcaccccactggtgcgcaagcttgctgaaaagcacggcgttgacttgaacaccgtgaccggtaccggtatcggtggccgtatccgcaagcaggatgttttggctgctgcgaacggcgaggctgcacctgctgaggctgctgctcctgtttccgcttggtccactaagtctgttgaccctgagaaggctaagctccgtggtaccactcagaaggtcaaccgcatccgtgagatcaccgcgatgaagaccgtcgaggctctgcagatttctgctcagctcacccagctgcacgaggtcgatatgactcgcgttgctgagctgcgtaagaagaacaagcccgcgttcatcgagaagcacggtgtgaacctcacttacctgccattcttcgtgaaggcagttgtcgaggctttggtttcccatccaaacgtcaacgcgtctttcaacgcgaagaccaaggagatgacctaccactcctccgttaacctctccatcgctgttgataccccagctggtctgttgaccccagtcattcacgatgctcaggatctctccatcccagagatcgcaaaggcaattgttgacctggctgatcgttcacgcaacaacaagctgaagccaaacgatctgtccggtggcaccttcaccatcaccaacattggttctgaaggcgcactgtctgataccccaatcctggttccaccacaggctggcatcttgggcaccggcgcgatcgtgaagcgtccagttgtcatcaccgaggatggaattgattccatcgcgatccgtcagatggtcttcctaccactgacctacgaccaccaggttgtagatggcgcagatgctggtcgcttcctgaccaccatcaaggaccgccttgagaccgctaacttcgaaggcgatctgcagctctaa

SEQ ID NO: 35379 - protein, 675 aa, Corynebacterium glutamicum ATCC 13032
MAFSVEMPELGESVTEGTITQWLKSVGDTVEVDEPLLEVSTDKVDTEIPSPVAGVILEIKAEEDDTVDVGGVIAIIGDADETPANEAPADEAPAPAEEEEPVKEEPKKEAAPEAPAATGAATDVEMPELGESVTEGTITQWLKAVGDTVEVDEPLLEVSTDKVDTEIPSPVAGTIVEILADEDDTVDVGAVIARIGDANAAAAPAEEEAAPAEEEEPVKEEPKKEAAPEAPAATGAATDVEMPELGESVTEGTITQWLKAVGDTVEVDEPLLEVSTDKVDTEIPSPVAGTIVEILADEDDTVDVGAVIARIGDANAAAAPAEEEAAPAEEEEPVKEEPKKEEPKKEEPKKEAATTPAAASATVSASGDNVPYVTPLVRKLAEKHGVDLNTVTGTGIGGRIRKQDVLAAANGEAAPAEAAAPVSAWSTKSVDPEKAKLRGTTQKVNRIREITAMKTVEALQISAQLTQLHEVDMTRVAELRKKNKPAFIEKHGVNLTYLPFFVKAVVEALVSHPNVNASFNAKTKEMTYHSSVNLSIAVDTPAGLLTPVIHDAQDLSIPEIAKAIVDLADRSRNNKLKPNDLSGGTFTITNIGSEGALSDTPILVPPQAGILGTGAIVKRPVVITEDGIDSIAIRQMVFLPLTYDHQVVDGADAGRFLTTIKDRLETANFEGDLQL

SEQ ID NO: 35380 - DNA, 1539 bp, Drosophila melanogaster
  CDS (1)..(1539)
atgctgcgctcccttgcaacaacacgaaacgaacttggggcccttcgctccgtgctcctgcgatcgaataacgccacctatgtccgccgatcgacgggaaatgtggttgtgcgcgccctcagcagccagctgatcaactcccggaaactccagagcatcaggtcgaaacttaacactagccagtcaccggtcacatggagctacaacttcgcccgtgcctatgccaaccttccggaacacatcagggtgccactgcccgcactttccccgactatggagcgcggatcgattgtcagctgggagaagaaggagggcgataagctcaacgaaggtgacttgctgtgcgagattgagacggataaggccaccatgggctttgagacgcccgaggagggctttctggctaagattctcatccagggcggcaccaaggacgttcccgttggccagctgctgtgcattatcgtgccggaccaaggcagcgtagctgctttcgcgaacttcaaggacgacggtgccgccgcagcaccagctgctccggcagcagctccagctccagcaccggcagcagcagcagctccgccaccaccaccaccacccgccgcagctccagcagccgctgcgcctccaccagctcccgccgctgctccagctgcagcaggtacgggccgtgtatatgccagtcccatggccaagcgactagccgaggcacaacagctgcgtctacaaggcaagggcagtggagtccatggctcaattaaatctggtgatcttgcaggccagaaagcagcagccaagccagctgctgcggcacctgccaaggcccccagggcagctggagcgcgctacgaggacattccggtgaccaacatgcgcgcagtgattgccaaacgtctgctggagtccaagacacaactgcctcactactacgtcaccgtgcaatgccaagtggataagctgctgaagttccgcgcgaaggtgaacaagaagtacgagaagcagggtgcccgcgtctctgtaaacgacttcattatcaaggccgtggccattgccagtcttaaggttcccgaagcgaactccgcctggatggacacagtaattcgcaagtacgacgacgtcgatgtttcggttgctgtctccacagacaagggtctgattaccccgattgttttcaatgccgaccgcaagggtgtcctggagatctctaaggatgtcaaggcgctggcagccaaggcgcgcgacaacaaacttcagccccacgaattccagggtggcaccatctcggtttctaatctgggcatgttcggtgtgaaccagtttgccgctgtcatcaaccctcctcaatcgtgcatccttgccattggcaccacaacgaaacagttggttgctgatcccgacagtctcaagggcttcaaggaggtcaacatgctgacggtcaccctgagtgctgatcatcgtgttgtggatggtgctgttgctgccaggtggctgcagcacttccgcgactacatggaggatccttccaatatggtattgtaa

SEQ ID NO: 35381 - protein, 512 aa, Drosophila melanogaster
MLRSLATTRNELGALRSVLLRSNNATYVRRSTGNVVVRALSSQLINSRKLQSIRSKLNTSQSPVTWSYNFARAYANLPEHIRVPLPALSPTMERGSIVSWEKKEGDKLNEGDLLCEIETDKATMGFETPEEGFLAKILIQGGTKDVPVGQLLCIIVPDQGSVAAFANFKDDGAAAAPAAPAAAPAPAPAAAAAPPPPPPPAAAPAAAAPPPAPAAAPAAAGTGRVYASPMAKRLAEAQQLRLQGKGSGVHGSIKSGDLAGQKAAAKPAAAAPAKAPRAAGARYEDIPVTNMRAVIAKRLLESKTQLPHYYVTVQCQVDKLLKFRAKVNKKYEKQGARVSVNDFIIKAVAIASLKVPEANSAWMDTVIRKYDDVDVSVAVSTDKGLITPIVFNADRKGVLEISKDVKALAAKARDNKLQPHEFQGGTISVSNLGMFGVNQFAAVINPPQSCILAIGTTTKQLVADPDSLKGFKEVNMLTVTLSADHRVVDGAVAARWLQHFRDYMEDPSNMVL

SEQ ID NO: 35382 - DNA, 1773 bp, Streptomyces coelicolor A3(2)
  CDS (1)..(1773): transl_table=11
atggcggtttccgtaacccttccggcgctcggcgagagcgtcaccgagggcaccgtcacccgctggctgaaggccgagggtgagcgcgtcgaggccgacgagccgttgctcgaggtctcgaccgacaaggtcgacaccgagatcccggcccccgcctcgggcgtgctgtcctccatcaaggtcgccgaggacgagaccgtcgaggtcggcgccgagctggcgctgatcgacgacggcagcggcgcccccgccgccgccccggccccgcaggccgagcaggtcgccgagccggcccccgagcccgccccggccgccccttccaccgagcaggccgccccggcgcccgctcccaccgccgacgccgccgccggcggctccgcgcagggcacggacgtggtcctgcccgcgctcggcgagtccgtcaccgagggcaccgtcacccgctggctgaagtcggtcggtgacagcgtcgaggaggacgagccgctgctcgaggtctcgaccgacaaggtcgacaccgagatcccggcccccgcctccggcaccctgctggagatcgtggtcggcgaggacgagacggccgaggtcggcgccaagctcgccgtcatcggtgcggcgggtgccgccccggcggctgccccggccgcccccgcggccccggcccaggaggccccggccgccccggcccagcccgagcccaccccggccccggctcccgcgcaggccgctccggctccggccccgcaggcgccggcggctccggccccgcagcccgccgctccggcgcccgcaccggccccggccgccgctccggctgccccggccgccgcccagccggtggacgacggcgcctacgtcaccccgctggtgcgcaagctcgccgccgagaacggcgtcgacctgtccaccgtcaagggcaccggcgtcggcggccgcatccgcaagcaggacgtcgccgccgccgccgaggccgcgaaggccgccgccccggctccggccgccgcccccgccgcgcccgccgcgaagaaggcccccgtcctggaggcctccccgctgcgtggccagaccgtcaagatgccgcgcatccgcaaggtcatcggcgacaacatggtcaaggcgctgcacgagcaggcccagctgtcgtcggtcgtcgaggtcgacgtcacccgtctgatgaagctgcgcgcccgtgccaaggacgcgttcgcggcgcgcgagggcgtcaagctctccccgatgccgttcttcgtcaaggccgcggcccaggccctcaaggcccacgccccggtcaacgccaagatcaacgaggccgaggggaccatcacctacttcgacaccgagaacatcggtatcgcggtggactccgagaagggcctgatgaccccggtcatcaagaacgccggtgacctgaacctggccggcatcgccaaggcgaccgccgacctggcgggcaaggtgcgggccagcaagatcagcccggacgagctggccggtgcgaccttcaccatcagcaacaccggttcgcgcggcgcgctgttcgacacgatcatcgtgccgccgggccaggtcgccatcctcggcatcggtgccacggtcaagcgtccggccgtcatcgagacggaggacggcccggtcatcggcgtccgcgacatgacgtacctgaccctgtcctacgaccaccgtctggtggacggcgccgacgccgcccgctacctgacggcggtcaaggcgatcctggaggcgggcgagttcgaggtcgagctcggcctgtag

SEQ ID NO: 35383 - protein, 590 aa, Streptomyces coelicolor A3(2)
MAVSVTLPALGESVTEGTVTRWLKAEGERVEADEPLLEVSTDKVDTEIPAPASGVLSSIKVAEDETVEVGAELALIDDGSGAPAAAPAPQAEQVAEPAPEPAPAAPSTEQAAPAPAPTADAAAGGSAQGTDVVLPALGESVTEGTVTRWLKSVGDSVEEDEPLLEVSTDKVDTEIPAPASGTLLEIVVGEDETAEVGAKLAVIGAAGAAPAAAPAAPAAPAQEAPAAPAQPEPTPAPAPAQAAPAPAPQAPAAPAPQPAAPAPAPAPAAAPAAPAAAQPVDDGAYVTPLVRKLAAENGVDLSTVKGTGVGGRIRKQDVAAAAEAAKAAAPAPAAAPAAPAAKKAPVLEASPLRGQTVKMPRIRKVIGDNMVKALHEQAQLSSVVEVDVTRLMKLRARAKDAFAAREGVKLSPMPFFVKAAAQALKAHAPVNAKINEAEGTITYFDTENIGIAVDSEKGLMTPVIKNAGDLNLAGIAKATADLAGKVRASKISPDELAGATFTISNTGSRGALFDTIIVPPGQVAILGIGATVKRPAVIETEDGPVIGVRDMTYLTLSYDHRLVDGADAARYLTAVKAILEAGEFEVELGL

SEQ ID NO: 35384 - DNA, 1410 bp, Streptomyces coelicolor A3(2)
  CDS (1)..(1410): transl_table=11
atgacggacagctccgtgcgtgagttcaagatgcccgacgtgggcgaggggctcaccgaggccgagatcctcaagtggtacgtccagcccggtgacacggtcaccgacggccaggtggtgtgcgaggtcgagacggccaaggccgccgtcgaactgcccatcccctacgacggcgtggtccgcgagctgcacttccccgagggcaccacggtcgacgtgggtacgtcgatcatcgcggtggccgtcggcgacggcgcggcggcggccgcggagccggtgcaggaggccgtggcggaggagcccaagccggagggccgccagccggtcctggtcgggtacggggtctccacctcctcgaccaagcgccgtccccgcaaaggcgcggaggccccggccgccgcgcagacaccggcggcggcgatccaggccgagctgaacggccacggccaggcagcgcccgcggcgcccgcgacaccggccgcgccggtcaccggcgaccgcccgctggccaagcctccggtgcgcaagctcgccaaggacctgggcgtcgacctggcgaccgtggtcccgtccggcccggacggcatcatcacccgcgaggacgtgcacgcggcggtgtcggcgcccgagccggcccaggcggcggccccgcgttccgagcaggccgcgcccgctccgtccccgtcggccccgtcgtcgtacgacacgacgcgcgagacccgtgtcccggtcaagggcgtgcgcaaggcgacggcggcggcgatggtcggttcggcgttcaccgcgccgcacgtcaccgagttcgtgacggtcgacgtgacgcgcacgatgaagctggtcgaggagctgaagcaggacaaggagtacacgggcctgcgggtgaacccgctgctcctgatcgccaaggccctcctcgtcgcgatcaggcgcaacccggacgtcaacgcgtcctgggacgaggcggcccaggagatcgtggtcaagcactacgtcaacctgggcatcgccgccgccaccccgcgcggtctgatcgtcccgaacatcaaggacgcccacgcgcagaccctgccgcagctggcgggttcgctgggcgagctggtgtcgacggccagggagggcaagacctccccggccgccatgcagggcggcacggtgaccatcaccaacgtcggcgtcttcggcgtcgacaccggcacgccgatcctcaacccgggcgagtccgcgatcctggcggtcggtgcgatcaagctccagccgtgggtccacaagggcaaggtgaagccccgccaggtcaccaccctcgcgctgagcttcgaccaccgcctggtcgacggcgagctgggctccaaggtcctcgccgacgtcgcggcggtcctggagcagccgaagcggttgatcagctgggcctga

SEQ ID NO: 35385 - protein, 469 aa, Streptomyces coelicolor A3(2)
MTDSSVREFKMPDVGEGLTEAEILKWYVQPGDTVTDGQVVCEVETAKAAVELPIPYDGVVRELHFPEGTTVDVGTSIIAVAVGDGAAAAAEPVQEAVAEEPKPEGRQPVLVGYGVSTSSTKRRPRKGAEAPAAAQTPAAAIQAELNGHGQAAPAAPATPAAPVTGDRPLAKPPVRKLAKDLGVDLATVVPSGPDGIITREDVHAAVSAPEPAQAAAPRSEQAAPAPSPSAPSSYDTTRETRVPVKGVRKATAAAMVGSAFTAPHVTEFVTVDVTRTMKLVEELKQDKEYTGLRVNPLLLIAKALLVAIRRNPDVNASWDEAAQEIVVKHYVNLGIAAATPRGLIVPNIKDAHAQTLPQLAGSLGELVSTAREGKTSPAAMQGGTVTITNVGVFGVDTGTPILNPGESAILAVGAIKLQPWVHKGKVKPRQVTTLALSFDHRLVDGELGSKVLADVAAVLEQPKRLISWA

SEQ ID NO: 35386 - DNA, 1476 bp, Streptomyces coelicolor A3(2)
  CDS (1)..(1476): transl_table=11
atggcacacgcttctgacgggcatgttctggagttcaagctgcccgacctcggcgaggggctcaccgaggcggagatcgtgcgctggctggtcgaggtcggcgacgtggtcgccgtggaccagccggtggtcgaggtcgagacggccaaggcgatggtcgaggtgccctgcccctacggcggtgtggtcaccgcccgcttcggcgaggagggcaccgagctgcccgtgggggcgccgctggtgaccgtgacggtgggcggcggcggagcggccgccgacggcccggcgcgagactccgggacggatgccggtgccgccgggacaccggtcgccgggacgcccgccgcggcggcggccgagacgtcccccgccgcggagacgaaggcggagggctccgggaacgtcctggtcggctacggcacctccgaggcgcccgcgcggcggcgcagggtgcggcccgggcgccaggccgcgaccggcgcgtccgggcgggcgaacggccgggtccgcggcgccggtgcggtggacggaccggtgcgcaccgccgagccggccgacggaccggtcccggtcatctccccgctggtgcgcaggctggcccggcagcacgacctggacctgcgtgagctgaccggttcgggaccggacgggctgatcctgcgcgcggacgtcgagtacgcgctgcgtgccgccgccgcacagggcggtcgtacggcggatcccgaggccgggacgggccgggtgccggatgccgcgcccgccgccgtgtcctccgccccgcgctccgacggcacccgcgtccccctcaagggcgtgcgcggagccgtcgccgacaagctctcccgcagccggcgcgagatcccggacgcgacctgctgggtggacgccgacgcgaccgagctgatgcgggcgcgcaccgcgatgaacgcgtccggcggcccgaagatctccctggtcgccctgctggcccggatctgcacggccgccctggcccgcttcccggagctgaactcgacggtcgacaccgacgcccgggaggtcgtccggctcgaccgggtccacctcggcttcgccgcccagacggaccggggcctggtcgtgcccgtcgtccgggacgcccacacgcgggacgccgaagcgctcaccgcggagttcgcccggttgaccgaggcggcccgcgcgggccggctgacgccgggcgagctgaccggcggcaccttcacgctgaacaactacggcgtgttcggcgtcgacggctccacgccgatcatcaaccaccccgaggctgccatgctcggcgtcggccgcatcgtccccaagccgtgggtgcacgagggcgagttggcggtgcgtcaggtcgtgcagctctcgctcaccttcgaccaccgggtgtgcgacggcggtacggcaggcggtttcctgcggtacgtggcggattgcgtggaacagccggcggtgctgctgcggaccctgtga

SEQ ID NO: 35387 - protein, 491 aa, Streptomyces coelicolor A3(2)
MAHASDGHVLEFKLPDLGEGLTEAEIVRWLVEVGDVVAVDQPVVEVETAKAMVEVPCPYGGVVTARFGEEGTELPVGAPLVTVTVGGGGAAADGPARDSGTDAGAAGTPVAGTPAAAAAETSPAAETKAEGSGNVLVGYGTSEAPARRRRVRPGRQAATGASGRANGRVRGAGAVDGPVRTAEPADGPVPVISPLVRRLARQHDLDLRELTGSGPDGLILRADVEYALRAAAAQGGRTADPEAGTGRVPDAAPAAVSSAPRSDGTRVPLKGVRGAVADKLSRSRREIPDATCWVDADATELMRARTAMNASGGPKISLVALLARICTAALARFPELNSTVDTDAREVVRLDRVHLGFAAQTDRGLVVPVVRDAHTRDAEALTAEFARLTEAARAGRLTPGELTGGTFTLNNYGVFGVDGSTPIINHPEAAMLGVGRIVPKPWVHEGELAVRQVVQLSLTFDHRVCDGGTAGGFLRYVADCVEQPAVLLRTL

SEQ ID NO: 35388 - DNA, 1530 bp, Yersinia pestis KIM
  CDS (1)..(1530): transl_table=11
atgtctatagaaattaatgtaccagacatcggtgcagatgaagtggaagtcaccgaaattatggtgaaagtgggcgataccgttgaagcggaacagtcgctaatcaccgttgaaggcgataaagcttccatggaagttccttcacctcaggcgggcgtggttaaagagatcaaaattgcggttggcgataaagtggctaccggttctctgatcatggtcttcgacgctacgggtgccgctgcggcaccggttaaagcagaagaaaaaccggcggcgcctgctcaggtagcggctccggcagcctctgcggcgaaaaatgttgaagtgccagatatcggtgatgacgaagttgaagtgactgaagtgatggtgaaagtgggcgataaagttgacgccgaacaatcactgattacggttgaaggcgacaaagcgtcgatggaagtgcccgcaccgtttgctggtatcgtgaaagaaatcaaaatcagtaccggcgacaaagtgaaaaccggctctctgattatggtcttcgaagttgaaggtgcagcgccagcgccagccgccgcacctgccgccaaagcagaaagcaaaggcgagtttgccgagaatgacgcttacgtgcatgccacgccggttatccgtcgtctggcgcgtgagttcggtgtgaacctggcgaaggtgaaagggacaggccgtaagggccgtatcctgcgcgaagacattcaagcttacgtgaaagatgccgtgaaacgtgccgaagctgcaccagcagcggctggcggcggcctgccgggcatattgccttggccaaaagttgatttcagtaaatttggtgaaatcgaagaagtcgaattgggccgtatccagaaaatttctggtgcgaacctgagccgtaactgggtcatgatcccacatgtgacgcaattcgatgaagcggatatcactgaagttgaagccttccgtaagcaacagaacatcgaagctgagaagaaaaaacaagacctgaaaatcaccccgctggtgttcctgatgaaggccgccgctaaagcactggaagaattcccacgctttaacagctccatttccgaagatggtcagaaactgacgctgaagaaatacatcaatatcggtgtggcggttgatacgcctaacggcttggtagttccagtattccgtgacgtcaacaaaaagggtattgtcgagttgtctcgtgagctatctgtcatctccaagaaagcacgtgatggcaagctgacagcatctgacatgcaaggcggctgtttcactatctccagtctgggcggtatcggcggtacggcatttacgccaatcgtcaatgcgccagaagtggctatcttgggtgtatcaaaatcatccatgaaacctgtctggaatggtaaagagtttgctccacgcctgatgttaccgctgtctctgtccttcgatcaccgtgtgattgatggtgccgcgggtgcacgcttcgccgcgtatatcgctaccattatggcggatattcgccgtctggtgatgtaa

SEQ ID NO: 35389 - protein, 509 aa, Yersinia pestis KIM
MSIEINVPDIGADEVEVTEIMVKVGDTVEAEQSLITVEGDKASMEVPSPQAGVVKEIKIAVGDKVATGSLIMVFDATGAAAAPVKAEEKPAAPAQVAAPAASAAKNVEVPDIGDDEVEVTEVMVKVGDKVDAEQSLITVEGDKASMEVPAPFAGIVKEIKISTGDKVKTGSLIMVFEVEGAAPAPAAAPAAKAESKGEFAENDAYVHATPVIRRLAREFGVNLAKVKGTGRKGRILREDIQAYVKDAVKRAEAAPAAAGGGLPGILPWPKVDFSKFGEIEEVELGRIQKISGANLSRNWVMIPHVTQFDEADITEVEAFRKQQNIEAEKKKQDLKITPLVFLMKAAAKALEEFPRFNSSISEDGQKLTLKKYINIGVAVDTPNGLVVPVFRDVNKKGIVELSRELSVISKKARDGKLTASDMQGGCFTISSLGGIGGTAFTPIVNAPEVAILGVSKSSMKPVWNGKEFAPRLMLPLSLSFDHRVIDGAAGARFAAYIATIMADIRRLVM

SEQ ID NO: 35390 - DNA, 1881 bp, Shigella flexneri 2a str. 301
  CDS (1)..(1881): transl_table=11
atggctatcgaaatcaaagtaccggacatcggggctgatgaagttgaaatcaccgagatcctggtcaaagtgggcgacaaagttgaagccgaacagtcgctgatcaccgtagaaggcgacaaagcctctatggaagttccatctccgcaggcgggtatcgttaaagagatcaaagtctctgttggcgataaaacccagaccggcgcactgattatgattttcgattccgccgacggtgcagcagacgctgcacctgctcaggcagaagagaagaaagaagcagctccggcagcagcacccgcggctgcggcggcaaaagacgttaacgttccggatatcggcagcgacgaagttgaagtgaccgaaatcctggtgaaagttggcgataaagttgaagctgaacagtcgctgatcaccgtagaaggcgacaaggcttctatggaagttccggctccgtttgcaggtaccgtgaaagagatcaaagtgaacgtgggtgacaaagtgtctaccggctcgctgattatggtcttcgaagtcgcgggtgaagcaggcgcggcagctccggcggctaaacaggaagcgactccggcagcgacccctgcaccagcagctggcgtgaaagaagttaacgttccggatatcggcggtgacgaagttgaagtgaccgaagtgatggtgaaagtgggcgacaaagttgccgctgaacagtcactgattaccgtagaaggcgataaagcttctatggaagttccggctccgtttgcaggcgtcgtgaaggaactgaaagtcaacgttggcgataaagtgaaaactggttcgctgattatgatcttcgaagttgaaggcgcagcgcctgcggcagctcctgcgaaacaggaagcggcagcgccggctccggcagcaaaagctgaagctccggctgcgaaagcggaaggcaaatctgaatttgctgaaaacgactcttacgttcacgcgaccccgctgatccgccgtctggcacgcgagtttggcgttaacctggcgaaagtgaagggcactggccgtaaaggtcgtatcctgcgcgaagacgttcaggcttacgtgaaagaagctatcaaacgtgcagaagcagctccggcggcgactggcggtggtatccctggcatgctgccgtggccgaaggtggacttcagcaagtttggcgaaatcgaagaagtggaactgggccgtatccagaaaatttctggtgctaacctgagccgtaactgggtgatgatcccgcatgttacccacttcgacaaaaccgatatcaccgagctggaagcgttccgtaaacagcagaacgaagaagcggcgaaacgtaagctggatgtgaagatcaccccggttgtcttcatcatgaaagccgttgctgcagctcttgagcagatgcctcgcttcaatagttcgctgtcggaagacggtcagcgtctgaccctgaagaaatacatcaacatcggtgtggcggtggataccccgaacggtctggttgttccggtattcaaagacgtcaacaagaaaggcatcatcgagctgtctcgcgagctgatgactatttctaagaaagcgcgtgacggtaagctgactgcgggcgaaatgcagggcggttgcttcaccatctccagcatcggcggcctgggtactacccacttcgcgccgattgtgaacgcgccggaagtggctatcctcggcgtttccaagtccgcgatggagccggtgtggaatggtaaagagttcgtgccgcgtctgatgctgccgatttctctctccttcgaccaccgcgtgatcgacggtgctgatggtgcccgtttcattaccatcattaacaacacgctgtctgacattcgccgtctggtgatgtaa

SEQ ID NO: 35391 - protein, 626 aa, Shigella flexneri 2a str. 301
MAIEIKVPDIGADEVEITEILVKVGDKVEAEQSLITVEGDKASMEVPSPQAGIVKEIKVSVGDKTQTGALIMIFDSADGAADAAPAQAEEKKEAAPAAAPAAAAAKDVNVPDIGSDEVEVTEILVKVGDKVEAEQSLITVEGDKASMEVPAPFAGTVKEIKVNVGDKVSTGSLIMVFEVAGEAGAAAPAAKQEATPAATPAPAAGVKEVNVPDIGGDEVEVTEVMVKVGDKVAAEQSLITVEGDKASMEVPAPFAGVVKELKVNVGDKVKTGSLIMIFEVEGAAPAAAPAKQEAAAPAPAAKAEAPAAKAEGKSEFAENDSYVHATPLIRRLAREFGVNLAKVKGTGRKGRILREDVQAYVKEAIKRAEAAPAATGGGIPGMLPWPKVDFSKFGEIEEVELGRIQKISGANLSRNWVMIPHVTHFDKTDITELEAFRKQQNEEAAKRKLDVKITPVVFIMKAVAAALEQMPRFNSSLSEDGQRLTLKKYINIGVAVDTPNGLVVPVFKDVNKKGIIELSRELMTISKKARDGKLTAGEMQGGCFTISSIGGLGTTHFAPIVNAPEVAILGVSKSAMEPVWNGKEFVPRLMLPISLSFDHRVIDGADGARFITIINNTLSDIRRLVM

SEQ ID NO: 35392 - DNA, 1266 bp, Drosophila melanogaster
  CDS (1)..(1266)
atggagcgcggatcgattgtcagctgggagaagaaggagggcgataagctcaacgaaggtgacttgctgtgcgagattgagacggataaggccaccatgggctttgagacgcccgaggagggctttctggctaagattctcatccagggcggcaccaaggacgttcccgttggccagctgctgtgcattatcgtgccggaccaaggcagcgtagctgctttcgcgaacttcaaggacgacggtgccgccgcagcaccagctgctccggcagcagctccagctccagcaccggcagcagcagcagctccgccaccaccaccaccacccgccgcagctccagcagccgctgcgcctccaccagctcccgccgctgctccagctgcagcaggtacgggccgtgtatatgccagtcccatggccaagcgactagccgaggcacaacagctgcgtctacaaggcaagggcagtggagtccatggctcaattaaatctggtgatcttgcaggccagaaagcagcagccaagccagctgctgcggcacctgccaaggcccccagggcagctggagcgcgctacgaggacattccggtgaccaacatgcgcgcagtgattgccaaacgtctgctggagtccaagacacaactgcctcactactacgtcaccgtgcaatgccaagtggataagctgctgaagttccgcgcgaaggtgaacaagaagtacgagaagcagggtgcccgcgtctctgtaaacgacttcattatcaaggccgtggccattgccagtcttaaggttcccgaagcgaactccgcctggatggacacagtaattcgcaagtacgacgacgtcgatgtttcggttgctgtctccacagacaagggtctgattaccccgattgttttcaatgccgaccgcaagggtgtcctggagatctctaaggatgtcaaggcgctggcagccaaggcgcgcgacaacaaacttcagccccacgaattccagggtggcaccatctcggtttctaatctgggcatgttcggtgtgaaccagtttgccgctgtcatcaaccctcctcaatcgtgcatccttgccattggcaccacaacgaaacagttggttgctgatcccgacagtctcaagggcttcaaggaggtcaacatgctgacggtcaccctgagtgctgatcatcgtgttgtggatggtgctgttgctgccaggtggctgcagcacttccgcgactacatggaggatccttccaatatggtattgtaa

SEQ ID NO: 35393 - protein, 421 aa, Drosophila melanogaster
MERGSIVSWEKKEGDKLNEGDLLCEIETDKATMGFETPEEGFLAKILIQGGTKDVPVGQLLCIIVPDQGSVAAFANFKDDGAAAAPAAPAAAPAPAPAAAAAPPPPPPPAAAPAAAAPPPAPAAAPAAAGTGRVYASPMAKRLAEAQQLRLQGKGSGVHGSIKSGDLAGQKAAAKPAAAAPAKAPRAAGARYEDIPVTNMRAVIAKRLLESKTQLPHYYVTVQCQVDKLLKFRAKVNKKYEKQGARVSVNDFIIKAVAIASLKVPEANSAWMDTVIRKYDDVDVSVAVSTDKGLITPIVFNADRKGVLEISKDVKALAAKARDNKLQPHEFQGGTISVSNLGMFGVNQFAAVINPPQSCILAIGTTTKQLVADPDSLKGFKEVNMLTVTLSADHRVVDGAVAARWLQHFRDYMEDPSNMVL

SEQ ID NO: 35394 - DNA, 1641 bp, Pseudomonas putida KT2440
  CDS (1)..(1641): transl_table=11
gtgagcgaactcattcgcgtacctgacatcggcagcggtgaaggtgaaatcatcgagctgttcgtcaaggtcggtgaccgtatcgaggctgaccagagcctgctgaccctggagtccgacaaggcctccatggaaattccggcgcccaaggctggcgtgatcaaggaactgaaggtcaagctgggcgaccgcctgaaagaaggcgacgaactgctggtcctggaagccgagggcgccgctgctgcggcccctgaggcgccggctgctgccgctgctccggctgcggcgccagcgccagccgctgaagccgctcctgctgctccggccgcagccccggctgctgccagcgtgcaggacatccacgtgccggacatcggttcgtcgggcaaggccaagatcatcgaagtgctggtcaaagtcggcgacaccgtcgaagccgaccagtcgctgattaccctggagtccgacaaggcctccatggaaatcccgtcgccggctgccggcgtggtcgaagaagtgctgtgcaagctggaagacgaagtcggcactggcgacctgatcttcaagctgaaagtggcgggtgccgccccggctgccgcgccggcaccggctgctgctcctgcaccagccaaggctgaggctgctccggctgccgcacctgccgctgccgccccggctgctgcccctgcaccggctgctaccgcaccggccgctggcagcaatgccaaggttcacgcaggccccgctgttcgtcagctggcccgtgaattcggtgtcgagctgggtgcagttgctgccaccggcccgcacggtcgcatcctgaaagaagacgtgcaggtctacgtcaaggccatgatgcagaaggccaaggaagcgccggcagccgccggtgcgaccggtggtgctggcatcccgccgatccctgccgtggacttcagcaagttcggtgaagtggaagaagtggccctgacccgcctgatgcaggtcggtgctgccaacctgcaccgcagctggctcaacgtgccgcacgtgacccagttcgactctgccgacatcaccgagctggaagccttccgcgttgcgcagaaggccgtggccgagaaggctggggtgaagctgaccgtgctgccactgctgctcaaggcctgcgccttcctgctcaaggaactgccggacttcaacagctcgctggcgccaagcggcaaggccatcatccgcaagaagtacgtgcacatcggcttcgccgtggacaccccggacggcctgctggtccctgtgatcaagaacgtcgaccagaagagcctgctgcaactggctgccgaagccgctgcactggccgagaaggcgcgcaccaagaagctgtcggctgacgagatgcaaggcgcctgcttcaccatctccagcctcggccacattggcggcaccggcttcacgccgatcgtcaatgcgccggaggtggctatcctgggcgtctccaaggcgaccatgcagccagtctgggatggcaaggccttccagccaaagctgatgttgccgctgtcgctgtcctacgatcaccgtgtgatcaacggcgctgccgccgcgcgcttcaccaagcgcctgggcgacgtgctgggcgatatccgcaccatgctgctgtaa

SEQ ID NO: 35395 - protein, 546 aa, Pseudomonas putida KT2440
MSELIRVPDIGSGEGEIIELFVKVGDRIEADQSLLTLESDKASMEIPAPKAGVIKELKVKLGDRLKEGDELLVLEAEGAAAAAPEAPAAAAAPAAAPAPAAEAAPAAPAAAPAAASVQDIHVPDIGSSGKAKIIEVLVKVGDTVEADQSLITLESDKASMEIPSPAAGVVEEVLCKLEDEVGTGDLIFKLKVAGAAPAAAPAPAAAPAPAKAEAAPAAAPAAAAPAAAPAPAATAPAAGSNAKVHAGPAVRQLAREFGVELGAVAATGPHGRILKEDVQVYVKAMMQKAKEAPAAAGATGGAGIPPIPAVDFSKFGEVEEVALTRLMQVGAANLHRSWLNVPHVTQFDSADITELEAFRVAQKAVAEKAGVKLTVLPLLLKACAFLLKELPDFNSSLAPSGKAIIRKKYVHIGFAVDTPDGLLVPVIKNVDQKSLLQLAAEAAALAEKARTKKLSADEMQGACFTISSLGHIGGTGFTPIVNAPEVAILGVSKATMQPVWDGKAFQPKLMLPLSLSYDHRVINGAAAARFTKRLGDVLGDIRTMLL

SEQ ID NO: 35396 - DNA, 1224 bp, Pseudomonas putida KT2440
  CDS (1)..(1224): transl_table=11
atggctatcgagatcaaagccccaaccttcccggaatcggttgccgatggcaccgttgccacctggcacaagaagccgggcgaagccgtcaagcgtgacgagctgatcgtcgacatcgagactgacaaggttgtcctggaagtactggctactgccgatggcgtgctgggcgacatcgtcaagggcgagggcgacaccgtcctgtccgacgaattgctgggttcgatcgttgagggcggtgctgccgctgcgcctgccgcggcagccgcacctgcagctgctccggccgctgctgccgctgacgccggcgaagatgacccgatcgcagccccggccgcgcgcaagctggctgaagaaaacggcatcgacctggctaccgttgcaggtaccggtaaaggcggtcgcgtcaccaaggaagacgtggttgctgctgttgccaagaagaagtcggcacctgccgctgcaccggctgccaagcctgccgctgctgccgctgccccggttgtcgtcgccgctggcgaccgtaccgagaagcgtgtgccgatgacccgcctgcgtgccaagatcgccgagcgcctggtcgaagcccagtcgaacatggcgatgctgaccaccttcaacgaagtggacatgaccgaagtcatggccctgcgttcgaagtacaaggacctgttcgagaagacccacaatggcgtgcggctgggcttcatgtcgttcttcgtcaaagccgctaccgaagcgctgaagcgcttcccggccgtcaacgcctcgatcgacggcaacgacatcgtctaccacggcttcgccgacgtcggtgttgccgtgtccagcgaccgtggcctggtggtgccggtgctgcgtaacgccgagtcgatgagcctggctgaaatcgagaacggcatcgctaccttcggcaagaaggcccgtgacggcaaactgtccatcgaagagatgaccggtggcaccttcaccatcaccaacggtggcaccttcggttcgatgatgtcgaccccgatcgtcaacccgccgcaggccgccattctcggcatgcacaacatcatccagcgcccgatggccatcaatggccaggtcgtgattcgcccgatgatgtacctggcgctgtcgtacgatcaccgcctgatcgacggcaaggaagcggtaaccttcctggtcactatcaagaacctgctggaagatccgtcccgcctgctgctggacatctaa

SEQ ID NO: 35397 - protein, 407 aa, Pseudomonas putida KT2440
MAIEIKAPTFPESVADGTVATWHKKPGEAVKRDELIVDIETDKVVLEVLATADGVLGDIVKGEGDTVLSDELLGSIVEGGAAAAPAAAAAPAAAPAAAAADAGEDDPIAAPAARKLAEENGIDLATVAGTGKGGRVTKEDVVAAVAKKKSAPAAAPAAKPAAAAAAPVVVAAGDRTEKRVPMTRLRAKIAERLVEAQSNMAMLTTFNEVDMTEVMALRSKYKDLFEKTHNGVRLGFMSFFVKAATEALKRFPAVNASIDGNDIVYHGFADVGVAVSSDRGLVVPVLRNAESMSLAEIENGIATFGKKARDGKLSIEEMTGGTFTITNGGTFGSMMSTPIVNPPQAAILGMHNIIQRPMAINGQVVIRPMMYLALSYDHRLIDGKEAVTFLVTIKNLLEDPSRLLLDI

SEQ ID NO: 35398 - DNA, 1884 bp, Vibrio parahaemolyticus RIMD 2210633
  CDS (1)..(1884): transl_table=11
atggcaatcgaaattaatgtaccagacatcggtgcggatgaggttgaagttactgagattcttgtaagcgttggcgacaaggttgaagaagaacagtctctgatcactgttgaaggcgataaagcttctatggaagttccggcttctcaagcgggtatcgttaaagaaatcaaagttgcagaaggcgacaaggtttctactggttctctaatcatgattttcgaagccgagggtgcagctgacgctgcacctgctcctgcggcagaagcggctccagcagcggctccagctccagcagcagcggcagaactgaaagaagttcacgtaccagacatcggtggtgacgaagttgaagttactgaaatcatggtagcaatcggcgacagcatcgaagaagagcaatctcttatcactgtagaaggcgacaaagcttctatggaagttcctgcaccattcgcaggtacgcttaaagagatcaaagtagcagcaggcgataaagtatcgactggctctctaatcatggtattcgaaactgcaggttcaggtgctccagcagctcctgcggcagttgaagctccagcggcagcagctccagcagcgtctgcggcaaaagaagttaacgttccagatatcggcggcgacgaagttgaagtaactgaaatcatggttgctgttggtgacacagtggaagaagagcaatctctgatcactgtagaaggcgacaaagcttctatggaagttcctgcaccatttgctggtacagttaaagaaatcaagattgcagctggcgacaaagtgtctactggctcactaatcatggtattcgaagtagcgggcgcggcacctgctccggtagcggctccagctcaagcagcagcacctgcagcggcagctcctaaagcagaagctccagcggcagcagctccagcagctggcgacttccaagacaatgatgagtacgctcacgcgtctccagttgttcgtcgtctagctcgtgagttcggtgtaaacctttctaaggttaaaggttctggtcgtaagagccgtatcctgaaagaagacgttcagaactacgtgaaagaagcgcttaagcgtcttgagtctggtgcagcagcatctggcaaaggcgacggtgcagctcttggtctactaccatggccaaaagtggacttcagcaagttcggtgagacagaagttcaaccgctatctcgcattaagaagatctctggtgctaacctacatcgtaactgggtaatgatcccgcacgttacacaatgggataacgcagacatcacggctcttgaagcattccgtaaagagcaaaacgcgattgaagcgaagaaagacactggcatgaagatcactccacttgtgttcatcatgaaagcggctgctaaagcacttgaagcgttcccagcgttcaactcttctctatcagaagacggtgagagcctaattctgaagaaatacgtgaacatcggtatcgcagtagatacgccaaacggtctggttgttcctgtatttaaagatgtgaacaagaaaggcatctacgagctatctgaagagctaatggctgtttctaagaaagcacgtgcaggcaagctaactgctgctgacatgcaaggtggctgtttcactatctctagcctaggcggtatcggcggtacggcgtttactccaatcgtaaacgcgccagaagttggtatcctaggtgtgtctaagtcagagatgaaacctgtatggaacggtaaagagttcgaaccgcgtctacaacttccactgtctctatcatacgaccaccgtgtgatcgatggtgctgaaggtgcgcgcttcatcacttacctaaacgcatgtctatctgacattcgtcgtctagttctttaa

SEQ ID NO: 35399 - protein, 627 aa, Vibrio parahaemolyticus RIMD 2210633
MAIEINVPDIGADEVEVTEILVSVGDKVEEEQSLITVEGDKASMEVPASQAGIVKEIKVAEGDKVSTGSLIMIFEAEGAADAAPAPAAEAAPAAAPAPAAAAELKEVHVPDIGGDEVEVTEIMVAIGDSIEEEQSLITVEGDKASMEVPAPFAGTLKEIKVAAGDKVSTGSLIMVFETAGSGAPAAPAAVEAPAAAAPAASAAKEVNVPDIGGDEVEVTEIMVAVGDTVEEEQSLITVEGDKASMEVPAPFAGTVKEIKIAAGDKVSTGSLIMVFEVAGAAPAPVAAPAQAAAPAAAAPKAEAPAAAAPAAGDFQDNDEYAHASPVVRRLAREFGVNLSKVKGSGRKSRILKEDVQNYVKEALKRLESGAAASGKGDGAALGLLPWPKVDFSKFGETEVQPLSRIKKISGANLHRNWVMIPHVTQWDNADITALEAFRKEQNAIEAKKDTGMKITPLVFIMKAAAKALEAFPAFNSSLSEDGESLILKKYVNIGIAVDTPNGLVVPVFKDVNKKGIYELSEELMAVSKKARAGKLTAADMQGGCFTISSLGGIGGTAFTPIVNAPEVGILGVSKSEMKPVWNGKEFEPRLQLPLSLSYDHRVIDGAEGARFITYLNACLSDIRRLVL

SEQ ID NO: 35400 - DNA, 1890 bp, Salmonella enterica subsp. enterica serovar Typhi Ty2
  CDS (1)..(1890): transl_table=11
atggctatcgaaatcaaagtaccggacatcgggacagatgaagttgaaatcaccgagattctggtcaaagtgggcgacaaagttgaagctgaacagtcgctgatcaccgtagaaggcgacaaagcctctatggaagtcccgtctccgcaggctggcgtcgtgaaagagatcaaagtctctgtcggcgacaaaactgagaccggtgcacttatcatgattttcgattccgccgacggtgcagctgacgctgcgcctgctcaggcagaagagaagaaagaagcggcgccggcagcagcacctgctgcggcagcggcgaaagacgttcacgttccggatatcggcagtgacgaagttgaagtgactgaagtgatggtgaaagtgggcgacaccgtagaagctgaacagtcgctgatcaccgtcgaaggcgacaaggcctctatggaagttcctgctccgtttgcaggcaccgtgaaagagatcaaagtgaacaccggtgataaagtgtctaccggctctctgattatggtcttcgaagtggcgggtgaagcgggcgcagcagcaccagcgaaagcggaagccgctccggctgcggctgctccagcagcagcgacgggcgtgaaagacgttaacgtaccggacatcggcggcgacgaagttgaagtcaccgaagtgatggtcaaagtcggcgataaagttaccgctgaacagtcgctgatcaccgtggaaggcgacaaagcctctatggaagtgcctgcgccgttcgcgggcaccgtgaaagaaatcaaaatcagcaccggcgataaagtgaaaaccggctcgctgattatggtcttcgaagtggaaggcgcagcgcctgcggccgctccggctaaacaggaagcagcggcgccggctccggcggcgaaagctgagaagcctgctgccccggctgccaaagccgaaggcaaatctgagttcgctgaaaacgacgcttacgttcacgctaccccactgattcgccgtctggcgcgcgagtttggcgtcaacctggcgaaagtgaaaggcactggtcgtaaaggccgtattctgcgcgaagacgttcaggcttacgtgaaagacgctatcaaacgcgcggaagctgcgccggctgctgcgggcggcggtatcccgggtatgctgccgtggccgaaagtggacttcagcaagtttggtgaagttgaagaagtggaactgggccgtatccagaaaatctctggcgcgaacctgagccgtaactgggtgatgatcccgcacgttacgcacttcgacaaaaccgatatcaccgatctggaagcgttccgtaaacagcagaacgccgaagctgagaagcgcaaactggatgtgaaatacacgccagtggtcttcatcatgaaagcggttgccgctgctctggaacagatgccgcgcttcaacagctctctatccgaagacggtcagcgtctgaccctgaaaaaatacatcaacatcggcgtggcggttgataccccgaatggcctggtggttccggtctttaaagacgtgaataagaagagcgtgaccgagctgtctcgtgaactgaccaccatctccaaaaaagcgcgtgatggtaagctgaccgctggcgaaatgcagggtggttgcttcactatctccagcatcggcggcctgggaactacccactttgcgccgattgtcaacgcgccggaagtggctatcctcggcgtttctaagtcggcgatggaaccggtgtggaatgggaaagagtttgtgccgcgtctgatgatgcctatctctctttctttcgaccaccgtgtgatcgatggtgctgatggtgcgcgtttcattaccattatcaacaatatgttgtctgacattcgccgtctggtgatgtaa

SEQ ID NO: 35401 - protein, 629 aa, Salmonella enterica subsp. enterica serovar Typhi Ty2
MAIEIKVPDIGTDEVEITEILVKVGDKVEAEQSLITVEGDKASMEVPSPQAGVVKEIKVSVGDKTETGALIMIFDSADGAADAAPAQAEEKKEAAPAAAPAAAAAKDVHVPDIGSDEVEVTEVMVKVGDTVEAEQSLITVEGDKASMEVPAPFAGTVKEIKVNTGDKVSTGSLIMVFEVAGEAGAAAPAKAEAAPAAAAPAAATGVKDVNVPDIGGDEVEVTEVMVKVGDKVTAEQSLITVEGDKASMEVPAPFAGTVKEIKISTGDKVKTGSLIMVFEVEGAAPAAAPAKQEAAAPAPAAKAEKPAAPAAKAEGKSEFAENDAYVHATPLIRRLAREFGVNLAKVKGTGRKGRILREDVQAYVKDAIKRAEAAPAAAGGGIPGMLPWPKVDFSKFGEVEEVELGRIQKISGANLSRNWVMIPHVTHFDKTDITDLEAFRKQQNAEAEKRKLDVKYTPVVFIMKAVAAALEQMPRFNSSLSEDGQRLTLKKYINIGVAVDTPNGLVVPVFKDVNKKSVTELSRELTTISKKARDGKLTAGEMQGGCFTISSIGGLGTTHFAPIVNAPEVAILGVSKSAMEPVWNGKEFVPRLMMPISLSFDHRVIDGADGARFITIINNMLSDIRRLVM

SEQ ID NO: 35402 - DNA, 1881 bp, Shigella flexneri 2a str. 2457T
  CDS (1)..(1881): transl_table=11
atggctatcgaaatcaaagtaccggacatcggggctgatgaagttgaaatcaccgagatcctggtcaaagtgggcgacaaagttgaagccgaacagtcgctgatcaccgtagaaggcgacaaagcctctatggaagttccatctccgcaggcgggtatcgttaaagagatcaaagtctctgttggcgataaaacccagaccggcgcactgattatgattttcgattccgccgacggtgcagcagacgctgcacctgctcaggcagaagagaagaaagaagcagctccggcagcagcacccgcggctgcggcggcaaaagacgttaacgttccggatatcggcagcgacgaagttgaagtgaccgaaatcctggtgaaagttggcgataaagttgaagctgaacagtcgctgatcaccgtagaaggcgacaaggcttctatggaagttccggctccgtttgcaggtaccgtgaaagagatcaaagtgaacgtgggtgacaaagtgtctaccggctcgctgattatggtcttcgaagtcgcgggtgaagcaggcgcggcagctccggcggctaaacaggaagcgactccggcagcgacccctgcaccagcagctggcgtgaaagaagttaacgttccggatatcggcggtgacgaagttgaagtgaccgaagtgatggtgaaagtgggcgacaaagttgccgctgaacagtcactgattaccgtagaaggcgataaagcttctatggaagttccggctccgtttgcaggcgtcgtgaaggaactgaaagtcaacgttggcgataaagtgaaaactggttcgctgattatgatcttcgaagttgaaggcgcagcgcctgcggcagctcctgcgaaacaggaagcggcagcgccggctccggcagcaaaagctgaagctccggctgcgaaagcggaaggcaaatctgaatttgctgaaaacgacgcttacgttcacgcgaccccgctgatccgccgtctggcacgcgagtttggcgttaacctggcgaaagtgaagggcactggccgtaaaggtcgtatcctgcgcgaagacgttcaggcttacgtgaaagaagctatcaaacgtgcagaagcagctccggcggcgactggcggtggtatccctggcatgctgccgtggccgaaggtggacttcagcaagtttggcgaaatcgaagaagtggaactgggccgtatccagaaaatttctggtgctaacctgagccgtaactgggtgatgatcccgcatgttacccacttcgacaaaaccgatatcaccgagctggaagcgttccgtaaacagcagaacgaagaagcggcgaaacgtaagctggatgtgaagatcaccccggttgtcttcatcatgaaagccgttgctgcagctcttgagcagatgcctcgcttcaatagttcgctgtcggaagacggtcagcgtctgaccctgaagaaatacatcaacatcggtgtggcggtggataccccgaacggtctggttgttccggtattcaaagacgtcaacaagaaaggcatcatcgagctgtctcgcgagctgatgactatttctaagaaagcgcgtgacggtaagctgactgcgggcgaaatgcagggcggttgcttcaccatctccagcatcggcggcctgggtactacccacttcgcgccgattgtgaacgcgccggaagtggctatcctcggcgtttccaagtccgcgatggagccggtgtggaatggtaaagagttcgtgccgcgtctgatgctgccgatttctctctccttcgaccaccgcgtgatcgacggtgctgatggtgcccgtttcattaccatcattaacaacacgctgtctgacattcgccgtctggtgatgtaa

SEQ ID NO: 35403 - protein, 626 aa, Shigella flexneri 2a str. 2457T
MAIEIKVPDIGADEVEITEILVKVGDKVEAEQSLITVEGDKASMEVPSPQAGIVKEIKVSVGDKTQTGALIMIFDSADGAADAAPAQAEEKKEAAPAAAPAAAAAKDVNVPDIGSDEVEVTEILVKVGDKVEAEQSLITVEGDKASMEVPAPFAGTVKEIKVNVGDKVSTGSLIMVFEVAGEAGAAAPAAKQEATPAATPAPAAGVKEVNVPDIGGDEVEVTEVMVKVGDKVAAEQSLITVEGDKASMEVPAPFAGVVKELKVNVGDKVKTGSLIMIFEVEGAAPAAAPAKQEAAAPAPAAKAEAPAAKAEGKSEFAENDAYVHATPLIRRLAREFGVNLAKVKGTGRKGRILREDVQAYVKEAIKRAEAAPAATGGGIPGMLPWPKVDFSKFGEIEEVELGRIQKISGANLSRNWVMIPHVTHFDKTDITELEAFRKQQNEEAAKRKLDVKITPVVFIMKAVAAALEQMPRFNSSLSEDGQRLTLKKYINIGVAVDTPNGLVVPVFKDVNKKGIIELSRELMTISKKARDGKLTAGEMQGGCFTISSIGGLGTTHFAPIVNAPEVAILGVSKSAMEPVWNGKEFVPRLMLPISLSFDHRVIDGADGARFITIINNTLSDIRRLVM

SEQ ID NO: 35404 - DNA, 1599 bp, Photorhabdus luminescens subsp. laumondii TTO1
  CDS (1)..(1599): transl_table=11
atggctatcaaaattaaggtaccggatatcggtgcggacgaagttgaagtcaccgaaatcatggtgaaagttggcgatacagtggaagctgagcaatcgctgatcaccgtggaaggtgataaggcttcgatggaagttccatccccacaggcgggtgttgttaaagagatcatcattgcggttggcgataaagttgaaaccgacaaactgattatgatttttgattccgcggaaggtgctgtagaagctgcgccagcggaagcgccagcagcggtaacattgtcttcgcgtatggcagagccagaacccgtagcttctgcggctatgaaggttcatgtaccggatatcggcggtgatgaggtcgaagttaccgaagtgatggtgaaagttggcgatgcagtggaagctgaacaatcgttgatcaccgtagagggcgataaagcctctatggaagtccccgcgccattcgccggtatcgttaaagaaattcaaatcaaagccggtgataaagtggaaaccggttctatgatcatggtattcgaagtcgcgggtgcagcacctgttgctccggttgcctctgcgccagctccaactgctgaaccagagaaagcagcagtaccggttattgctagcagaagcttcgcagaagaagacaaaaatgatttcgctgaaaatagcgcttatgttcatgcaacgccggtgatccgtcgcctggcgcgtgaattcggcgttaacctggctaaagtgaaaggtacagggcgtaaaggccgtgttctgcgtgaagatgttcaggcttacgtgaaagacgcggttaaacgtgcagaatcggctcctgcatcagccggtggtggtctgccgggtatgttgccttggccgaaagtggatttcagcaaatttggtgaaattgaagaagttgagctgggtcgtattcagaaaatctctggtgctaacctgagccgtaactgggtggtgatcccacatgttacacagttcgacgaaacggatatcactgaagttgaaaacttccgtaaacagcagaatcaggaagctgagaagaaacagcttggcgtgaagattactccgctagtattcatcataaaagcggtagcaaaagcgctggaagagatgccgcgctttaacagctctatctcggaagatggtcagaaactgacgctgaaaaaatacatcaacattggtgtggcagttgatacacctaatggtctggtggttccagtgttccgtgatgttaataagaagggcatcattgaattgtcccgcgagctgactgagatgtctaagaaagcgcgtgcaggcaaactgaccgcatctgatatgcaggggggatgcttcactatttcaagtctggggggtatcggtggcacagcattcacgccaatcgttaatgcaccagaagtggctatcctgggcgtatcccgctcatcaatgaagccagtatggaatggtaaagagtttgttccacgcctgatgctacctctgtcactctctttcgatcaccgtgtgatcgatggtgctgatggtgcgcgtttcatcacatttattaatcatgcgatgagcgatatccgccgtctggtgatgtaa

SEQ ID NO: 35405 - protein, 532 aa, Photorhabdus luminescens subsp. laumondii TTO1
MAIKIKVPDIGADEVEVTEIMVKVGDTVEAEQSLITVEGDKASMEVPSPQAGVVKEIIIAVGDKVETDKLIMIFDSAEGAVEAAPAEAPAAVTLSSRMAEPEPVASAAMKVHVPDIGGDEVEVTEVMVKVGDAVEAEQSLITVEGDKASMEVPAPFAGIVKEIQIKAGDKVETGSMIMVFEVAGAAPVAPVASAPAPTAEPEKAAVPVIASRSFAEEDKNDFAENSAYVHATPVIRRLAREFGVNLAKVKGTGRKGRVLREDVQAYVKDAVKRAESAPASAGGGLPGMLPWPKVDFSKFGEIEEVELGRIQKISGANLSRNWVVIPHVTQFDETDITEVENFRKQQNQEAEKKQLGVKITPLVFIIKAVAKALEEMPRFNSSISEDGQKLTLKKYINIGVAVDTPNGLVVPVFRDVNKKGIIELSRELTEMSKKARAGKLTASDMQGGCFTISSLGGIGGTAFTPIVNAPEVAILGVSRSSMKPVWNGKEFVPRLMLPLSLSFDHRVIDGADGARFITFINHAMSDIRRLVM

SEQ ID NO: 35406 - DNA, 1896 bp, Vibrio vulnificus YJ016
  CDS (1)..(1896): transl_table=11
atggcaatcgaaattaatgtacctgatatcggtgcggatgaggttgaagttactgagattcttgtaagcgttggcgacaaggttgaagaagagcagtctctcattactgtagaaggcgacaaggcttctatggaagtaccagcctctcaagcgggtatcgtaaaagaaatcaaagttgttgctggcgataaagtaacaacaggttcactgatcatggtctttgaagcggaaggtgcagcagcggctgcaccagctcctgctgtggcaccagtggctgcacctgccgcagcaagtgaactgaaagaagtttgtgtaccggatatcggtggcgacgaagttgaagtcactgaaatcctagtggctgttggtgattccatcgctgaagagcaatctctactgacagtagaaggtgacaaagcttcaatggaagtaccagcaccattcgcaggtactctaaaagaaatcaaagtggcagcaggcgataaagtgtctactggctcactcgtgatggtatttgaagtggcgggttcgggcgcagcagcacctgcaccagttgcagcagcagctccggcggcggctccagcagcagtctctggagtaaaagaagttaacgttcctgatatcggcggcgacgaagttgaagtcactgaaatcatggtagcggttggcgatacagtctctgaagagcaatctctgattactgtagaaggcgacaaagcatctatggaagtacctgcacctttcgctggtacggttaaagaaatcaaagttgcagctggtgacaaagtttctactggttctctaatcatggtgttcgaagttgctggcgcagcgccagttgcagcagcggcacccgctcaagcagcagctccagctcctgcggcagctccagctcctgcggtagctccagtagcaaaagcggaagctcaagcaacgactagtgatttcaaagaaaacgacgagtatgctcacgcatctccagtggttcgtcgtctagctcgcgagttcggcgtaaatctatctaaagtgaaaggttctggtcgtaagagccgtatcctgaaagaagacgttcaagcttacgtgaaagacgcacttaagcgtcttgagtctggtgcagttgcagcggcttctggtaaaggcgatggcgcagcgcttggcctactaccatggccgaaagtggacttcagcaagtttggtgaaacagaagttcagccactatctcgcattaagaagatctcgggtgcaaacctacatcgtaactgggtaatgatccctcacgttacacagtgggataacgcggatatcactgagttagaaaacttccgtaaagagcaaaacgcaattgaagcgaagaaagactcgggcatgaagatcacgccacttgtgttcatcatgaaagcggctgctaaagcgctagaagcgttcccagcgttcaactcttcgctatcagaagatggtgagagcctgattctgaagaaatacgtgaacatcggtatcgcagtcgatacgccaaatggcctagtggttcctgtctttaaagacgtgaacaagaaaggcatctacgagctatctgaagaactgatggtggtttctaagaaagcacgtgctggcaagctgactgcagcggacatgcaaggtggctgtttcacgatttcaagcctaggtggtatcggtggtactgcgtttaccccaatcgtaaacgcgccagaagtgggtatccttggtgtatctaagtctgagatcaagcctgtttggaatggtaaagagttcgctcctcgcctacaactgccgctatctctgtcatacgaccaccgtgtgattgatggtgctgaaggtgcgcgcttcattacttacctaaacgagtgcctatcagacattcgtcgtttggttctgtaa

SEQ ID NO: 35407 - protein, 631 aa, Vibrio vulnificus YJ016
MAIEINVPDIGADEVEVTEILVSVGDKVEEEQSLITVEGDKASMEVPASQAGIVKEIKVVAGDKVTTGSLIMVFEAEGAAAAAPAPAVAPVAAPAAASELKEVCVPDIGGDEVEVTEILVAVGDSIAEEQSLLTVEGDKASMEVPAPFAGTLKEIKVAAGDKVSTGSLVMVFEVAGSGAAAPAPVAAAAPAAAPAAVSGVKEVNVPDIGGDEVEVTEIMVAVGDTVSEEQSLITVEGDKASMEVPAPFAGTVKEIKVAAGDKVSTGSLIMVFEVAGAAPVAAAAPAQAAAPAPAAAPAPAVAPVAKAEAQATTSDFKENDEYAHASPVVRRLAREFGVNLSKVKGSGRKSRILKEDVQAYVKDALKRLESGAVAAASGKGDGAALGLLPWPKVDFSKFGETEVQPLSRIKKISGANLHRNWVMIPHVTQWDNADITELENFRKEQNAIEAKKDSGMKITPLVFIMKAAAKALEAFPAFNSSLSEDGESLILKKYVNIGIAVDTPNGLVVPVFKDVNKKGIYELSEELMVVSKKARAGKLTAADMQGGCFTISSLGGIGGTAFTPIVNAPEVGILGVSKSEIKPVWNGKEFAPRLQLPLSLSYDHRVIDGAEGARFITYLNECLSDIRRLVL

SEQ ID NO: 35408 - DNA, 1470 bp, Nasonia vitripennis
  CDS (1)..(1470)
atgctgaggacgacgacgagcctgcgccacgagctggccaaggcgacccttcgtagcaccgtccggagcaacgtcgtcaggtgcctgggtactcagtgcctgcacaaaaggcaccagcagaggccactaattcacaaaagctcaaggtttgcattacaaccatggcaacaaaatctacgatactacgccgactacccagatcacataaaggtcccgctgcctgctctgtcgcccacaatggaaacaggaactatcatctcctggcagaaaaaagaaggtgacaagttgaacgagggtgacttgttagcggaaatcgagaccgacaaggctacgatgggcttcgagacgccagaggagggttacctggccaagatcctggtaccggccggtgaaaagaatgtgacgatcggtcgtctagtctgcatcattgttgccgacgagggtagcgtagctgccttcaaggactacaaagatgacggctcgacagtcgccgcggctcctccgtccgctccagcacctccgccaccagcggcacccgctgctgtgccgcctccaccgaaagctgctgctcccgcagctgtctccacgccgtccttagctacgtcgggtgagagggtgtttgccagcccactcgcaagaagactggcttctgagcagggtctcagtttacagggtttgaaaggcagtggcctattcggttcagtgacagccaaggacttggctggtgcttcccctgctggagttggagcaccagcaggagccgcagtcgccgcacccggtggcaaggatattcccatttccaacgttcgtggagtcattgccaaacgtctgctggagagcaaacagacgataccccattactacctgaccatcgaggtgaaaatggacgaggctctatcgatgaggcaacagttcaacaaattgcttgagaaagagaagatcaagcttagcgtcaatgaccttatcatcaagggtatggctatggcgtgcaaaaaagtgccggagggcaacagcgcttggctcggagacaaaattcgacagtatgatcacgtagatgttagcgtagctgtcagtacagacaatgggctcataacgcctatcgtctttggagccgacgtaaaaggcatagttcaaattagcaacgatgtaaaagcattggccgctaaagccagggaaggaaagcttcagccgcacgaatttcaaggtggcaccatcaccgtttcgaatcttggcatgttcggcattaagagcttctcggctatcatcaatcctccacaatccataattctagcgataggaacgacagaaacaagattagtcccagcggataacgagaaaggtttcactactgcccagtatatgtgtgtaactgccagctgcgaccatcgtacagtcgatggagcagtcggagctcaatggcttactgcttttaagaactttatggagaacccaacaacgatgcttctctag

SEQ ID NO: 35409 - protein, 489 aa, Nasonia vitripennis
MLRTTTSLRHELAKATLRSTVRSNVVRCLGTQCLHKRHQQRPLIHKSSRFALQPWQQNLRYYADYPDHIKVPLPALSPTMETGTIISWQKKEGDKLNEGDLLAEIETDKATMGFETPEEGYLAKILVPAGEKNVTIGRLVCIIVADEGSVAAFKDYKDDGSTVAAAPPSAPAPPPPAAPAAVPPPPKAAAPAAVSTPSLATSGERVFASPLARRLASEQGLSLQGLKGSGLFGSVTAKDLAGASPAGVGAPAGAAVAAPGGKDIPISNVRGVIAKRLLESKQTIPHYYLTIEVKMDEALSMRQQFNKLLEKEKIKLSVNDLIIKGMAMACKKVPEGNSAWLGDKIRQYDHVDVSVAVSTDNGLITPIVFGADVKGIVQISNDVKALAAKAREGKLQPHEFQGGTITVSNLGMFGIKSFSAIINPPQSIILAIGTTETRLVPADNEKGFTTAQYMCVTASCDHRTVDGAVGAQWLTAFKNFMENPTTMLL

SEQ ID NO: 35410 - DNA, 1290 bp, Tribolium castaneum
  CDS (1)..(1290)
atgttgctgtcaagggagttttacacttttttaaaaagtgcgaccagtccggcaaaactaatcactttgaaaaactttcactcgtgtgcgagctatgcggcccaagtgtctttcaaactgtctgacattggtgaaggcataagggaggtaacagtcaaagagtggttcgtcaaagtcggcgacaaagtctcccaatttgacgaaatttgcgaagtacagagtgacaaagcctcggtcacaatcacaagcagatacgatggagttattaagaaactacattacaaaatcgacgagattgcgtcagttggcaaacccctggtggacattgaaaccgaaggggatgaaccaagcgcagcaccaacccccgaagaagaatcaaaacccccagtcgaagaaattaaaataagcgaacccactgacccccaaccaaccgctgaaattttatgcatcccctctgtccgaagactcgccaaagaacacaaggtgaacttatgggaggtcacaggaaccggaaaatccggccgcattctcaaagaagacgttctgaaatacctgcaagccggccctgcgccggccaaggcccccgcccgccaggcccgcaccgagcccatcaagggcttccagaaggccatggtcaagacaatgagcgacgctctgaaaatccctcacttcgtctacagcgacgaaatcgcagtaacgcaactgtcgcaactgcgacaaacccttaaaaaactgccagaaacgcaggacttgaagctgtcgttcatgcccttcttcatcaaagcggcctccaacgccctgcagcgcttcccggttttgaacgccagcttggacgagaactgcgagaatgtgacctacaagagcgagcacaacatcggggttgcgatggacacgaaagtcgggctggccgtcccggtgataaaaaacgtggagacacttagtattattgaaattagcaacgaactgaaccgacttatcaagtcggggcgcagcggctccttctcgccccaggacttggccgggggcacgttcacgatttcgaacattggggctatcggcggcacgtacatgaagccggtcattatgccgccgcacgtggccattgttgcgctcggggcgtcccaggtggttccccggtttgacgacgccgggaatgtcgtccctgtcgaagtgcttaatctgagcggggccgccgaccaccggatcatagacggggccacgatggcccgctttgtgcagactttgaaacggcaaatcgaaaacccctatctcttgttcctgaacttgtga

SEQ ID NO: 35411 - protein, 429 aa, Tribolium castaneum
MLLSREFYTFLKSATSPAKLITLKNFHSCASYAAQVSFKLSDIGEGIREVTVKEWFVKVGDKVSQFDEICEVQSDKASVTITSRYDGVIKKLHYKIDEIASVGKPLVDIETEGDEPSAAPTPEEESKPPVEEIKISEPTDPQPTAEILCIPSVRRLAKEHKVNLWEVTGTGKSGRILKEDVLKYLQAGPAPAKAPARQARTEPIKGFQKAMVKTMSDALKIPHFVYSDEIAVTQLSQLRQTLKKLPETQDLKLSFMPFFIKAASNALQRFPVLNASLDENCENVTYKSEHNIGVAMDTKVGLAVPVIKNVETLSIIEISNELNRLIKSGRSGSFSPQDLAGGTFTISNIGAIGGTYMKPVIMPPHVAIVALGASQVVPRFDDAGNVVPVEVLNLSGAADHRIIDGATMARFVQTLKRQIENPYLLFLNL

SEQ ID NO: 35412 - DNA, 1986 bp, Acinetobacter sp. ADP1
  CDS (1)..(1986): transl_table=11
atgcaagtgaaaacacctgatattggcgtagataaagcaaccgttgctgaaattctggtaaaagtcggcgatactatttcagaaaatgacagtctgattctactcgaatcggacaaggcttctgttgaagtaccaagtacagcttctggcgtggtaaaaagcattttggtgagccttggtgatgaagtttcggaaggaacaacactgattgagcttgaaagcggcgacaatactgacaaaactgaatctgaatcggcaccagcccaaactgaagttaaagcagaaacacctgttgagcaagttgctccacaggaaaccaaaccagcgacttcaacttcggctgcatcatctgtagttgaagttcaagtgccagatattggtgtagaaaaagccactgtcgcggaattgttagtcagtgtcggcgatgaaatcgctgaaaatgacagtctggttctacttgagtcggataaagcttcggttgaagtgccaagcacggtttctggtacgattgaaagtatcgaagtgaaagcaggcgataccattcaagaaggtgttctgctactgaaagtcaaaacagcaggtgcttcgaatgctgcaccagcgaaacaagaagctgttgtacctacagcggcacctgttgcaaccaaagcagaaactcaggctgagacgccagcagttcaaagcgcaccagctggggcagtagatgtactcgtgcctgatttgggcgtagacaaggctgccgtggctgagattttggtcaacgtgggtgacaagattaccaaagatgaaagtatcgttgtggtggaatcagacaaggcgactgttgaagttccaagtacggtatctggtattgtcaaagctattcacgtaaaagcgggtcaggatgtcaaagaaggcattcttttagtgactgtagaagctgaaggtgccgttgcaagcgcgccaaaggcacctgtagcaaaagctgaagcagctcctgcgccagcggcacagaaagctgaagcacctgcggctaaagttgaaacagcaccacaagcaggtgcggacaagctcaccaaagagcaagaagctgaaaattcgaaagtctatgcaggtccagcggtgcgtaaattggcacgtgagttgggtgttgtgttggctcaggttaaagcatctggcgagcatgggcgtttgatgaaagaggacatctatgcgtatgtcaaacaacgtctaacagcacctgttgctgcgccaaaagctgcggctgcggcagttgcatcaggcttgccaacattgccagatttcagtgcatttggtggtgtggaagagaaaacgctgacacgtttacagcaagtatcgattccacaactctctttaaataactttattcctcaagtgactcagtttgaccttgcggacattactgaacttgaagcatggcgtaatgatttaaagggtaacttcaaaaaagaagggattagcctgaccattatggcatttatcattaaagcggttgcgcatcttttgaaagaagagcgtgaatttgctggacatttgtctgatgatggtaagtctgtattgttgcgtaaagagattcacatgggtatcgcggtcgcgacaccagatggcttgactgtgcctgtgcttcgcaatcctgatcagaaaacgattaagcaaattgcggttgaactgggtgtaattggtcaaaaagcacgtgataagaagctttcaccaaaagatttacaaggtgcaaacttcactatttcaagcctgggcgcgattggtggtacggcatttacacctttggtgaattggccgcaagtggcaatcttgggtatttcacctgcaactatgcagcctgtatggaatggtaaagactttgacccgcgcttaatgttgccactgtcattgtcttatgatcaccgtgtaatcaatggtgctgacgctgcgcgtttcaccaataagttgaccaagttacttcaggacatccgtagcttgcttatttaa

SEQ ID NO: 35413 - protein, 661 aa, Acinetobacter sp. ADP1
MQVKTPDIGVDKATVAEILVKVGDTISENDSLILLESDKASVEVPSTASGVVKSILVSLGDEVSEGTTLIELESGDNTDKTESESAPAQTEVKAETPVEQVAPQETKPATSTSAASSVVEVQVPDIGVEKATVAELLVSVGDEIAENDSLVLLESDKASVEVPSTVSGTIESIEVKAGDTIQEGVLLLKVKTAGASNAAPAKQEAVVPTAAPVATKAETQAETPAVQSAPAGAVDVLVPDLGVDKAAVAEILVNVGDKITKDESIVVVESDKATVEVPSTVSGIVKAIHVKAGQDVKEGILLVTVEAEGAVASAPKAPVAKAEAAPAPAAQKAEAPAAKVETAPQAGADKLTKEQEAENSKVYAGPAVRKLARELGVVLAQVKASGEHGRLMKEDIYAYVKQRLTAPVAAPKAAAAAVASGLPTLPDFSAFGGVEEKTLTRLQQVSIPQLSLNNFIPQVTQFDLADITELEAWRNDLKGNFKKEGISLTIMAFIIKAVAHLLKEEREFAGHLSDDGKSVLLRKEIHMGIAVATPDGLTVPVLRNPDQKTIKQIAVELGVIGQKARDKKLSPKDLQGANFTISSLGAIGGTAFTPLVNWPQVAILGISPATMQPVWNGKDFDPRLMLPLSLSYDHRVINGADAARFTNKLTKLLQDIRSLLI

SEQ ID NO: 35414 - DNA, 1878 bp, Erwinia carotovora subsp. atroseptica SCRI1043
  CDS (1)..(1878): transl_table=11
atggctatcgaaatcaacgtaccggacatcggtgcagatgaagttgaagtcaccgaagtgctggtgaaggttggcgacaaagttgaagctgaacagtcgctgatcacggttgaaggtgataaggcttctatggaagtcccttctccgcaggcgggtgtcgtgaaagagattaaagtctctgtcggtgacaaagttgaaaccggcaaactgatcatgattttcgattccgccgacggtgcagctgacgctgcacctgctaaggcagaagagaagaaagaagccgctccggctgctgcacctgcggcctccgcggcgaaagaagttaacgtaccggatatcggcggtgacgaagttgaagtgaccgaagtactggttaaagtgggcgacactgttgctgctgaacaatctctgatcactgtagaaggcgacaaagcttctatggaagttccggcacctttcgccggtacggttaaagagatcaaaatcagcaatggcgataaagtctctaccggttctctgatcatggtcttcgaagtggcgggcagcgcacctgcagcctcagcagagaaaactgaagcggcacctgctgctgcaccagcggcctctgcggcgaaagaagttaacgtaccagatatcggcggcgacgaagttgaagtgactgaagtgatggttaaagtcggcgataaaatcgcggctgagcaatcactgatcaccgttgaaggcgacaaggcttcgatggaagtccctgcgccgtttgcgggtacggttaaagaaatcaaaatcagcaccggcgataaagttaaaaccggctcactgatcatggtcttcgaagtcgaaggcgctgcaccagctccggctgctaagcaggaagcggctgcaccggctccgacggcaaaatctgctgctgcaccggcagcgaaagcggaaggcaagggcgagttcgctgagaatgacgcttacgttcacgcgacgccggttatccgtcgtctggcacgtgaattcggcgtgaatctggcgaaagtgaagggttctggtcgtaaaggccgtatcctgcgcgaagacgttcaggcttacgtgaaagatgccgtgaaacgagctgaagctgcgccaactgctgccgctggcggcggtctgccgggcatgctgccatggccgaaagtcgatttcagcaagtttggtgaagttgaagaagtggaactgggccgtatccagaaaatctctggtgctaacctgagccgtaactgggtgatgatcccgcacgttacgcacttcgataaaactgacatcaccgatctggaagcgttccgcaaacagcagaacgtggaagctgagaagcgcagactggatgtgaaaatcaccccagttgtcttcatcatgaaagccgttgctgctgcgcttgagcaaatgcctcgtttcaacagttcactgtctgaagatgctcaacgtctgacgctgaagaaatacatcaacatcggtgtagcagttgataccccgaatggtctggtggttccagtgttcaaagacgtgaacaagaaaggtatcgtcgaactgtctcgtgaattgatggcgatctccaagaaagcacgtgacggtaagctgaccgctggcgaaatgcagggcgggtgcttcactatctccagcctgggcggtatcgggactacgcactttgcgccgatcgtcaatgcgccggaagttgctattcttggtgtgtctaagtccgcgatggaaccggtctggaatggtaaagagttcactccgcgtctgatgatgccgatgtctctctccttcgaccaccgagtcattgacggtgctgatggtgctcgcttcattaccattattaacaatacgttgtctgacatccgccgtctggtgatgtaa

SEQ ID NO: 35415 - protein, 625 aa, Erwinia carotovora subsp. atroseptica SCRI1043
MAIEINVPDIGADEVEVTEVLVKVGDKVEAEQSLITVEGDKASMEVPSPQAGVVKEIKVSVGDKVETGKLIMIFDSADGAADAAPAKAEEKKEAAPAAAPAASAAKEVNVPDIGGDEVEVTEVLVKVGDTVAAEQSLITVEGDKASMEVPAPFAGTVKEIKISNGDKVSTGSLIMVFEVAGSAPAASAEKTEAAPAAAPAASAAKEVNVPDIGGDEVEVTEVMVKVGDKIAAEQSLITVEGDKASMEVPAPFAGTVKEIKISTGDKVKTGSLIMVFEVEGAAPAPAAKQEAAAPAPTAKSAAAPAAKAEGKGEFAENDAYVHATPVIRRLAREFGVNLAKVKGSGRKGRILREDVQAYVKDAVKRAEAAPTAAAGGGLPGMLPWPKVDFSKFGEVEEVELGRIQKISGANLSRNWVMIPHVTHFDKTDITDLEAFRKQQNVEAEKRRLDVKITPVVFIMKAVAAALEQMPRFNSSLSEDAQRLTLKKYINIGVAVDTPNGLVVPVFKDVNKKGIVELSRELMAISKKARDGKLTAGEMQGGCFTISSLGGIGTTHFAPIVNAPEVAILGVSKSAMEPVWNGKEFTPRLMMPMSLSFDHRVIDGADGARFITIINNTLSDIRRLVM

SEQ ID NO: 35416 - DNA, 1575 bp, Yersinia pseudotuberculosis IP 32953
  CDS (1)..(1575): transl_table=11
atgtctatagaaattaatgtaccagacatcggtgcagatgaagtggaagtcaccgaaattatggtgaaagtgggcgataccgttgaagcggaacagtcgctaatcaccgttgaaggcgataaagcttccatggaagttccttcacctcaggcgggcgtggttaaagagatcaaaattgcggttggcgataaagtggctaccggttctctgatcatggtcttcgacgctacgggtgccgctgcggcaccggttaaagcagaagaaaaaccggcggcgcctgctcaggcagcggctccggcagcctctgcggcgaaaaatgttgaagtgccagatatcggtgatgacgaagttgaagtgactgaagtgatggtgaaagtgggcgataaagttgacgccgaacaatcactgattacggttgaaggcgacaaagcgtcgatggaagtgcccgcaccgtttgctggtatcgtgaaagaaatcaaaatcagtaccggcgacaaagtgaaaaccggctctctgattatggtcttcgaagttgaaggtgcagcgccagcagcagaagcggctccggctcaacaagccgcacctgtcgcgccagcgccagccgccgcacctgccgccaaagcagaaagcaaaggcgagtttgccgagaatgacgcttacgtgcatgccacgccggttatccgtcgtctggcgcgtgagttcggtgtgaacctggcgaaggtgaaagggacaggccgtaagggccgtatcctgcgcgaagacattcaagcttacgtgaaagatgccgtgaaacgtgccgaagctgcaccagcagcggctggcggcggcctgccgggcatgttgccttggccaaaagttgatttcagtaaatttggtgaaatcgaagaagtcgaattgggccgtatccagaaaatttctggtgcgaacctgagccgtaactgggtcatgatcccacatgtgacgcaattcgatgaagcggatatcactgaagttgaagccttccgtaagcaacagaacatcgaagctgagaagaaaaaacaagacctgaaaatcaccccgctggtgttcctgatgaaggccgccgctaaagcactggaagaattcccacgctttaacagctccatttccgaagatggtcagaaactgacgctgaagaaatacatcaatatcggtgtggcggttgatacgcctaacggcttggtagttccagtattccgtgacgtcaacaaaaagggtattgtcgagttgtctcgtgagctatctgtcatctccaagaaagcacgtgatggcaagctgacagcatctgacatgcaaggcggctgtttcactatctccagtctgggcggtatcggcggtacggcatttacgccaatcgtcaatgcgccagaagtggctatcttgggtgtatcaaaatcatccatgaaacctgtctggaatggtaaagagtttgctccacgcctgatgttaccgctgtctctgtccttcgatcaccgtgtgattgatggtgccgcgggtgcacgcttcgccgcgtatatcgctaccattatggcggatattcgccgtctggtgatgtaa

SEQ ID NO: 35417 - protein, 524 aa, Yersinia pseudotuberculosis IP 32953
MSIEINVPDIGADEVEVTEIMVKVGDTVEAEQSLITVEGDKASMEVPSPQAGVVKEIKIAVGDKVATGSLIMVFDATGAAAAPVKAEEKPAAPAQAAAPAASAAKNVEVPDIGDDEVEVTEVMVKVGDKVDAEQSLITVEGDKASMEVPAPFAGIVKEIKISTGDKVKTGSLIMVFEVEGAAPAAEAAPAQQAAPVAPAPAAAPAAKAESKGEFAENDAYVHATPVIRRLAREFGVNLAKVKGTGRKGRILREDIQAYVKDAVKRAEAAPAAAGGGLPGMLPWPKVDFSKFGEIEEVELGRIQKISGANLSRNWVMIPHVTQFDEADITEVEAFRKQQNIEAEKKKQDLKITPLVFLMKAAAKALEEFPRFNSSISEDGQKLTLKKYINIGVAVDTPNGLVVPVFRDVNKKGIVELSRELSVISKKARDGKLTASDMQGGCFTISSLGGIGGTAFTPIVNAPEVAILGVSKSSMKPVWNGKEFAPRLMLPLSLSFDHRVIDGAAGARFAAYIATIMADIRRLVM

SEQ ID NO: 35418 - DNA, 1908 bp, Mannheimia succiniciproducens MBEL55E
  CDS (1)..(1908): transl_table=11
atgcccaccttacgaaggatgataaatatgtcaaaacaaattcaaattccagatattggtgctgatgaagttaccgttaccgaagtaatggtgaaagttggtgatacagttacagaagaacaatcaatcatcaatgttgaaggcgacaaagcctcaatggaagtgccgtctccggaagcgggcgtagtaaaagaaattttagtgaaagtaggtgacaaggttacaaccggttcacctatgtttgttttagaatcagcggattccgcacctgcctctgcacctcaagcggcggcggtagcgcctgcggcggcaccaactacaagcgctgtgatcgaaattcatgtgcctgatatcggttccgacgaagtaaatgttaccgagattatggttaaagtcggcgacagcgttgcggaagaacaatcaatcatcaatgttgaaggcgataaagcctcaatggaagtgccggctccacaagcgggtgtggtaaaagaaattttaatcaaagaaggcgataaggtttctaccggttcgcttatcatgaaatttgaagtagcgggcggtgcgccggcggctgaaacacctgcgaccactgttcaagcggctccggcggtaagtgccgttcaggatgtaaatgtaccggatatcggcggtgacgaagtgaatgttaccgagattatggttaaagccggtgacagcgttgcggaagaacagtcattaattacggtggaaggcgacaaagcgtcaatggaagtgcctgcgccgtttgccggcgtggtaaaagaaattttggtgaaatccggtgataaggtttctaccggttcattgattatgcgttttgaagtggcaggtagcgcgcctgcagttcaagcggcggcaccggctcaagcggcaccggctccagtggcacctgcgccacaagcggctccggcacaatctcttgctcctgtgaatcaggattcaattgcgactagcgcaagctatgcgcatgcaacgccggttgttcgtcgtttagcccgtgaattcggcgtaaatctggataaagtaaaaggtacggggcgtaaaggtcgtatcttaaaagaagacgttcaggaatatgtgaaaaacgcgcttaaagctcttgaaagcggtgcgactgcatcaaccggtgcggcaagcggtgccggcttaggtttattaccatggccgaaagttgatttcagtaaattcggtgaagtggaagaaattgaattaacccgtattaataaaatttcaggcgcgaatttacaccgtaactgggtgatgattcctcatgttacccattttgatcgtgcggatatcaccgatttagaagcattccgtaaagaacaaaatgtgttagcggaaaaacaaaaactgggtgtgaaaattactccggtggtatttattatgaaagcggcggcgaaagcattagaagcctatccgcgtttcaacagctcgatttccgaagacggtcaacgattaacattgaaaaaatatgtaaacatcggtgttgccgtggatacgccaaacggcttagtggtgcctgtatttaaagacgtgaacaaaaaaggcattatcgaactttcccgcgaattaatggaagtgtcgaaaaaagcccgtgacggtaaattaaccgcatcggatatgcaaggcggctgttttaccatttcaagtatcggcggtttgggtacaacccacttcgcaccgattgtaaatgcgccggaagtagcgattttaggcgtatctaaatccgaaatggcgcctgtatggaacggcaaagagttcatgcctcgcttaatgttgccgttatcgttatctttcgaccaccgtgtaattgacggtgcggacggtgcgcgttttattagttatattaatggtgtattatccgatttacgtcgtctagtgatgtag

SEQ ID NO: 35419 - protein, 635 aa, Mannheimia succiniciproducens MBEL55E
MPTLRRMINMSKQIQIPDIGADEVTVTEVMVKVGDTVTEEQSIINVEGDKASMEVPSPEAGVVKEILVKVGDKVTTGSPMFVLESADSAPASAPQAAAVAPAAAPTTSAVIEIHVPDIGSDEVNVTEIMVKVGDSVAEEQSIINVEGDKASMEVPAPQAGVVKEILIKEGDKVSTGSLIMKFEVAGGAPAAETPATTVQAAPAVSAVQDVNVPDIGGDEVNVTEIMVKAGDSVAEEQSLITVEGDKASMEVPAPFAGVVKEILVKSGDKVSTGSLIMRFEVAGSAPAVQAAAPAQAAPAPVAPAPQAAPAQSLAPVNQDSIATSASYAHATPVVRRLAREFGVNLDKVKGTGRKGRILKEDVQEYVKNALKALESGATASTGAASGAGLGLLPWPKVDFSKFGEVEEIELTRINKISGANLHRNWVMIPHVTHFDRADITDLEAFRKEQNVLAEKQKLGVKITPVVFIMKAAAKALEAYPRFNSSISEDGQRLTLKKYVNIGVAVDTPNGLVVPVFKDVNKKGIIELSRELMEVSKKARDGKLTASDMQGGCFTISSIGGLGTTHFAPIVNAPEVAILGVSKSEMAPVWNGKEFMPRLMLPLSLSFDHRVIDGADGARFISYINGVLSDLRRLVM

SEQ ID NO: 35420 - DNA, 1641 bp, Burkholderia pseudomallei K96243
  CDS (1)..(1641): transl_table=11
atgagtcaagcgatcgaagtcaaggtgccggatatcggcgattacaaggacgtgcccgtcatcgaagtgctcgtgaagccgggcgatgcggtcgagcccgagcagtcgctcgtcacgctcgaatcggacaaggcgacgatggacgtgccgagcccgtcggcgggcacggtcaaggaagtgaaggtgaaggtcggcgacgcggtgtcgcaaggctcgctgatcgtgctgctcgacggcgcgcaggcggcggcccagcccgcgcaggcgaacggcgccgcgacgagcgccgcgcagccggcggcggcgcccgctgccgcgcctgcgccggcggcggccgcgggcggcggcacggtcgacgtgaaggtgccggacatcggcgactacaaggacgtgcccgtcatcgagatcgccgtgaagatcggcgacacggtcgagaaggagcagtcgctcgtcacgctcgaatcggacaaggcgacgatggacgtgccgagcccggccgcgggcgtcgtcaaggacatcaaggtgaaggtcggcgatgcggtgtcggaaggttcgctgatcgtcgtgctcgaagcgtcgggcggcgccgccgcgagcgcgccgcaggcggccgcgcccgcccccgcgccggctccggctccggcgcccgcgccgcaggccgcacccgcggctgcgccggcccccgcgcaggcaccggcacccgccgcgagcggcgagtaccgcgcgagccacgcgtcgccgtcggtgcgcaagttcgcgcgcgagctcggcgtcgacgtgtcgcgcgtcacgggcacggggccgaagagccgcatcacgaaggacgacgtcaccgcgttcgtgaagggcgtgatgacgggacagcgcgcggcgcccggcgccgcggccgcgcccgcgggcggcggcgagctgaacctgctgccgtggccgaaggtcgacttctcgaagttcggcccgttcgaggcgaagccgctgtcgcgcatcaagaagatctcgggcgcgaacctgcatcgcaactgggtgatgatcccgcacgtcacgaacaacgacgaggcggacatcaccgagctcgaagcgctgcgcgtgcaactgaacaaggagcacgagaaggcgggcgtgaagttcacgatgctcgcgttcgtgatcaaggcggtcgtcgccgcgctgaagaagttcccgaccttcaacgcgagcctcgacggcgacaacctcgtgttcaagcagtactaccacatcggtttcgccgccgacacgccgaacggcctcgtcgtgccggtgattcgcgacgcggacaagaaggggctcgtcgacatcgcgaaggaaatggccgagctgtcgaaggccgcgcgcgaaggcaagctcaagccggaccagatgcagggcggctgcttctcgatctcgtcgcttggcgggatcggcggcacgcacttcacgccgatcatcaatgcgccggaagtggcgatcctcgggctgtcgcgcggccagatgaagccggtgtgggacggcaagcagtttgtgccgcgcctcatgctgccgctgtcgctgtcgtatgaccatcgcgtgatcgatggcgcggaagccgcgcggttcaatgcgtatctcggcgcgttgcttgccgatttccgtcgcatcattctttga

SEQ ID NO: 35421 - protein, 546 aa, Burkholderia pseudomallei K96243
MSQAIEVKVPDIGDYKDVPVIEVLVKPGDAVEPEQSLVTLESDKATMDVPSPSAGTVKEVKVKVGDAVSQGSLIVLLDGAQAAAQPAQANGAATSAAQPAAAPAAAPAPAAAAGGGTVDVKVPDIGDYKDVPVIEIAVKIGDTVEKEQSLVTLESDKATMDVPSPAAGVVKDIKVKVGDAVSEGSLIVVLEASGGAAASAPQAAAPAPAPAPAPAPAPQAAPAAAPAPAQAPAPAASGEYRASHASPSVRKFARELGVDVSRVTGTGPKSRITKDDVTAFVKGVMTGQRAAPGAAAAPAGGGELNLLPWPKVDFSKFGPFEAKPLSRIKKISGANLHRNWVMIPHVTNNDEADITELEALRVQLNKEHEKAGVKFTMLAFVIKAVVAALKKFPTFNASLDGDNLVFKQYYHIGFAADTPNGLVVPVIRDADKKGLVDIAKEMAELSKAAREGKLKPDQMQGGCFSISSLGGIGGTHFTPIINAPEVAILGLSRGQMKPVWDGKQFVPRLMLPLSLSYDHRVIDGAEAARFNAYLGALLADFRRIIL

SEQ ID NO: 35422 - DNA, 1956 bp, Pseudomonas fluorescens PfO-1
  CDS (1)..(1956): transl_table=11
gtgagcgaactcattcgcgtacctgacatcggcagcggtgaaggtgaagtaatcgaactgtttgtgaaggtcggcgaccgtatcgaagccgaccagagcatcctgactctggaatcggacaaggccagcatggaagtgccggccccgaaggccggcgtcatcaaaagcctgaaagtgaagctgggcgatcgcctgaaggaaggcgacgaactgctggaactggaagtcgagggcgccgcgcaagcggcccctgctccggctgctgcgcctgccgccaaggccgaagctgcaccggccgccgctcctgcaccggctgctccggccgctgcccctgctgccgcttcggttcagcaagtgcacgtgccggatatcggttcgtcgggcaaggcccagatcatcgagatccaggtcaaggtcggcgacactgtcgaggctgatcagtcgctgatcaccctggaatccgacaaggcgagcatggaaatcccgtcgcctgccgctggcgtggtcaaggctatcagcgtcaagttgaacgacgaagtcggcaccggcgacctgatcctggatctggaagtggcgggtgctgcggcccctgcggctgccgctccggcccaggctgctgcgccagccgctgcgccggcgccggctgctgcacctgccgcaccggttgccgacagcgttcaggacatccacgttccggacatcggctcggccggcaaggccaagatcatcgaagtgttggtcaaggctggcgacagcgttgaagccgaccagtcgctgatcaccctggaatccgacaaggcgagcatggaaatcccgtcgcctgccgccggcgtggtggaaagcatttccatcaagctggacgacgaagtcggcactggcgatctgatcctcaagctgaaagtcaaaggcgccgctccggctgctgccccggctccagctgccgctgctgctccgagcgctccggcgccagctgctgctccggctgccgctgcacctgctgctgccgctccggttgctgctccagccaagcctggtgcgaaagttcacgccggccctgccgtgcgtcaactggctcgcgagttcggcgtcgagctgagcgctgtcggcgccagcggtccgcacggtcgcatcctgaaagaagacgtgcagacctacgtcaaagccatgatgcagaaggccaaggaagcaccggccgcggctgctggcgcaaccggtggcgcgggcatcccgccgattccggtcgtcgacttcagccgtttcggcgaaatcgaagaagtgccgatgacccgcctgatgcaggtcggcgctgccaacctgcaccgcagctggcttaacgtgccgcacgtgacgcaattcgactcggcggatatcaccgagctggaggcgttccgcaccgcacagaaatctgtcgcagagaaggctggcgtcaagctgaccattctgccgctgctgctcaagtcctgcgcacacctgctcaaggaactgccggacttcaacagctcgctggcgccaagcggcaaggcgatcattcgcaagaagtacgtgaacatcggcttcgccgtcgacaccccggatggcctgctggtaccggtcatcaagaacgtcgaccagaagagcctgctgcaactggccgccgaagccgcttccctggctgaaaaagcccggaccaagaagctctcgtcggacgagatgcaaggcgcctgcttcaccatttccagcctcggccacattggcggcaccggcttcacgccgatcgtcaacgcgccggaagtggcgatccttggtgtttccaaggcaaccatccagccagtctgggacggcaaagccttccagccgaaactgatgctgccactgtcgctgtcctacgatcaccgcgtgatcaacggcgccgctgctgcacgcttcaccaagcgtctgagcgacctgctggcggacatccgcaccatcctgctgtaa

SEQ ID NO: 35423 - protein, 651 aa, Pseudomonas fluorescens PfO-1
MSELIRVPDIGSGEGEVIELFVKVGDRIEADQSILTLESDKASMEVPAPKAGVIKSLKVKLGDRLKEGDELLELEVEGAAQAAPAPAAAPAAKAEAAPAAAPAPAAPAAAPAAASVQQVHVPDIGSSGKAQIIEIQVKVGDTVEADQSLITLESDKASMEIPSPAAGVVKAISVKLNDEVGTGDLILDLEVAGAAAPAAAAPAQAAAPAAAPAPAAAPAAPVADSVQDIHVPDIGSAGKAKIIEVLVKAGDSVEADQSLITLESDKASMEIPSPAAGVVESISIKLDDEVGTGDLILKLKVKGAAPAAAPAPAAAAAPSAPAPAAAPAAAAPAAAAPVAAPAKPGAKVHAGPAVRQLAREFGVELSAVGASGPHGRILKEDVQTYVKAMMQKAKEAPAAAAGATGGAGIPPIPVVDFSRFGEIEEVPMTRLMQVGAANLHRSWLNVPHVTQFDSADITELEAFRTAQKSVAEKAGVKLTILPLLLKSCAHLLKELPDFNSSLAPSGKAIIRKKYVNIGFAVDTPDGLLVPVIKNVDQKSLLQLAAEAASLAEKARTKKLSSDEMQGACFTISSLGHIGGTGFTPIVNAPEVAILGVSKATIQPVWDGKAFQPKLMLPLSLSYDHRVINGAAAARFTKRLSDLLADIRTILL

SEQ ID NO: 35424 - DNA, 1914 bp, Saccharophagus degradans 2-40
  CDS (1)..(1914): transl_table=11
gtggctaagcaaattatcaacgtcccagatattggtggggcggacaacgtagatattattgagatatgtgttgctgtaggcgataccgtttctgctgaagactctttgcttgttttagaatcagataaggcctctatggaagtgccttcgcctgtttctggtaaagtggttggcattcttgttaaagagggcggtaaagtttctgaaggcgatgccatatttgaaattgaagcagagggcgcagctgatgcgcctgctgctgaaccggcagccgctcctgcggcggcgccagccccagaggcggctgcacctgcagcatcttctgagcagttggtgaaggttccagatattggtggttccgaaaacgttgaagtgatcgagttatgtgttgctgtgggcgatgaggttgccgaaggcgattccattatcgtgctagaaagcgacaaggcttcaatggaagtgcctgcgccagcaagcggtaaagtggttagctttgctatcaaagaaggcgataagctttctgaaggcgacgatattcttgtgttagaagtaagtggtggcgcagctgcaccagctgccgctcctgctgagtctgctcctgtagccgcggcccctgcacctgcacctgctgcaagtggcggtgtgaccgatgtaaatgttcctgacattggcggctcagaaaacgttgaagttatcgaagtttgcgttgcagaaggcgatgaaattagcgaaggcgactccattgttgtgttggaaagcgataaagcatccatggagatcccatcacctgctagcggtaaagttgtaagcattaccgttaaagaaggcgataaagtatctgaaggtgcggcactgcttaaattagaaattgttggtgctgcccctgctgcagctcctgcgcctgctgcggcacccgcagcgccacaagcgcctgctaagcctgttgagcagccagtgaagaccacgcaagagttacaccctgcggaagtgtctgccactactggtgaagtgtatgccggccctgcagtacgcaagttagcgcgtcagttaggtgtaaacctttcagaagtgaagccaaccggccctcgtaagcgtcatactaaagacgatgtacgcgagtttgttaaaactgtaatgaagcaacgcagcactggcggcgcagcagttacaggtggttcgggtattcctgcagtaccagcagtagatttttctcagttcggcgagatcgaaatgcagaaaatgagcaaaatcaaaaaggttaccgctgctgcaatggttcgcaactggttgaacgtgccacacgttactcagttcgacgatgctgatattaccgagcttgaagcattccgtaagaacatgaaagcagaagccgaagcggcaggtgtgaagttaacaccattaccgttcctgctaaaagcttgtgcggcagcgcttaaagcggagcctagctttaatgtttctatgcacccagacggcgagcatattgtgcagaagaaatacatccacattggtatggctgtagatacgccaaacggtttggttgtacctgttattcgcgacgtagacaaaaaaggtttgttcgaacttgcggctgaaacagtagctttagctaagaaagcgcgcgatggtaagttgatgcctaaagatatgcagggcggatgttttactatttctagccttggcccaattggcggtactggttttaccccaattgtgaacgcgcctgaagttgctattttgggtgtttctaaagcggatattaaaccgcgttggaacggtaaagagtttgagcctcgtcagatgttgcctttgtgcttatcttacgatcaccgtgcaattaacggtggtgatgcaggtcgcttctttacgttcttatctgcagtattgtctgatgtgcgtcgcttactcctttaa

SEQ ID NO: 35425 - protein, 637 aa, Saccharophagus degradans 2-40
MAKQIINVPDIGGADNVDIIEICVAVGDTVSAEDSLLVLESDKASMEVPSPVSGKVVGILVKEGGKVSEGDAIFEIEAEGAADAPAAEPAAAPAAAPAPEAAAPAASSEQLVKVPDIGGSENVEVIELCVAVGDEVAEGDSIIVLESDKASMEVPAPASGKVVSFAIKEGDKLSEGDDILVLEVSGGAAAPAAAPAESAPVAAAPAPAPAASGGVTDVNVPDIGGSENVEVIEVCVAEGDEISEGDSIVVLESDKASMEIPSPASGKVVSITVKEGDKVSEGAALLKLEIVGAAPAAAPAPAAAPAAPQAPAKPVEQPVKTTQELHPAEVSATTGEVYAGPAVRKLARQLGVNLSEVKPTGPRKRHTKDDVREFVKTVMKQRSTGGAAVTGGSGIPAVPAVDFSQFGEIEMQKMSKIKKVTAAAMVRNWLNVPHVTQFDDADITELEAFRKNMKAEAEAAGVKLTPLPFLLKACAAALKAEPSFNVSMHPDGEHIVQKKYIHIGMAVDTPNGLVVPVIRDVDKKGLFELAAETVALAKKARDGKLMPKDMQGGCFTISSLGPIGGTGFTPIVNAPEVAILGVSKADIKPRWNGKEFEPRQMLPLCLSYDHRAINGGDAGRFFTFLSAVLSDVRRLLL

SEQ ID NO: 35426 - DNA, 2016 bp, Shewanella sp. MR-7
  CDS (1)..(2016): transl_table=11
atggctgaattaaaagaagtttttgttcctgatatcggcggcgatgaagtacagattatcgaaatctgtgcttctgtgggcgataccttagcagcggaagagtcgattctgaccgttgaaagcgacaaggcgaccatggacattcctgcgcctttcgcgggtgtgttagccgaattgaaagtggccgtcggtgacaaagtcagcgaaggtaccttaattgcgatgatgcaagcagcgggcacggctaatgttcaagctgcgcctgttgctcaagctgccgctcctgcgccagcccctgcagcacctgcaccagtacaagcggctccagcccctgtggctgccgcgccagcgacgggcgcaacccaagtggttgaagtcactgtgccggatatcggtggtgacaccgacgtgtcagttatcgaagtcttagttgccgctggcgataagattgaggttgacgctggccttatcacgcttgaaaccgacaaagcgaccatggacgtaccatcgccattcgcgggtgtggtaaaagaagtgaaagtggcagtgggtgacaaggtttctcaaggctcattagtgatcatgctcgaagtgggcggcgcggcacctgctgcagcgccacaagcgagcgcgccagcagcctctgcacctgtcgctcaagcggctcctgctgcgccagttgctccagtagccgctgcatcaccagtggttgcggttaaagaaatccaagtgcctgatattggcgatgcgagcaatgtcgatgtgatcgaagtgctcgtgtctgtgggtgatgacatcacagttgatcaaggtttaattacccttgaaaccgataaagcgaccatggaagtacctgcgccattcgccggtaaactgttgtcgttaaccgttaaagtgggtgacaaggtttctcaaggcagcgtgattgcgacgattgaaactgtgactgctggtgcagctcctgcacctcaagcagcagcgccagcaccagttgcccaagaagcggcaccagcgcctgttgcagccgctcctagccgtccacctgttccacatcacccaagtgcgggtgcgccagtggcaaccggtgtggtgcatgcgtctccagcggttcgtcgtttggcccgtgaatttggtgtggacctcactcaagtgacgggttctggccgtaaaggtcgcatcatgaaggaagacgtacaggcgtatgtgaagtacgaactgtctcgtcctaaggcgacagcagcaacttcagttgcagcgggtaacggtggtggtctgcaagtgattgctgcaccgaaagtggatttcagcaagtttggtgaagtggaagagattccattaagccgtatccagaagatctctggtccaaacctgcaccgtaactgggtaaccattcctcacgtgactcagttcgatgaagctgatatcaccgaaatggaagagttccgtaagcagcagaacgacgcggcggcgaagaaaaaagccgattataagatcactccgctggtctttatgatgaaagccgtggcgaaaacgctgcaacagttcccagtgttcaactcaagcttaagcagcgacggtgaatcactgatccagaagaagtactaccacatcggtgtggcggttgatacgccaaacggtctagtggtacctgtggtacgtgacgtggataagaaagggatcatcgagttatctcgtgagctggccgatatttctgtccgtgcccgcgatggtaagctcaaatctgccgatatgcagggcagctgcttcactatttcaagcctaggtggcattggtggtactgcgtttaccccaatcgttaactacccagacgtggcgattttaggtgtgtctaaatctgaaattaagcctaaatggaatggtaaagagttcgagcctaaattgatgttgccactgtcgctatcatacgatcaccgcgtgatcgatggtgctatggctgcacgctttagcgtgaccctgtcaggaattctgtccgatattcgtactttgattctgtaa

SEQ ID NO: 35427 - protein, 671 aa, Shewanella sp. MR-7
MAELKEVFVPDIGGDEVQIIEICASVGDTLAAEESILTVESDKATMDIPAPFAGVLAELKVAVGDKVSEGTLIAMMQAAGTANVQAAPVAQAAAPAPAPAAPAPVQAAPAPVAAAPATGATQVVEVTVPDIGGDTDVSVIEVLVAAGDKIEVDAGLITLETDKATMDVPSPFAGVVKEVKVAVGDKVSQGSLVIMLEVGGAAPAAAPQASAPAASAPVAQAAPAAPVAPVAAASPVVAVKEIQVPDIGDASNVDVIEVLVSVGDDITVDQGLITLETDKATMEVPAPFAGKLLSLTVKVGDKVSQGSVIATIETVTAGAAPAPQAAAPAPVAQEAAPAPVAAAPSRPPVPHHPSAGAPVATGVVHASPAVRRLAREFGVDLTQVTGSGRKGRIMKEDVQAYVKYELSRPKATAATSVAAGNGGGLQVIAAPKVDFSKFGEVEEIPLSRIQKISGPNLHRNWVTIPHVTQFDEADITEMEEFRKQQNDAAAKKKADYKITPLVFMMKAVAKTLQQFPVFNSSLSSDGESLIQKKYYHIGVAVDTPNGLVVPVVRDVDKKGIIELSRELADISVRARDGKLKSADMQGSCFTISSLGGIGGTAFTPIVNYPDVAILGVSKSEIKPKWNGKEFEPKLMLPLSLSYDHRVIDGAMAARFSVTLSGILSDIRTLIL

SEQ ID NO: 35428 - DNA, 2007 bp, Shewanella sp. ANA-3
  CDS (1)..(2007): transl_table=11
atggctgaattaaaagaagtttttgttcctgatatcggcggcgatgaagtacaggttatcgaaatctgtgcttctgtgggcgataccttagcagcggaagagtcgattctgaccgttgaaagcgacaaggcgaccatggacattcctgcgccgttcgcgggtgtgttagccgaattgaaagtggccgtcggtgacaaagtcagcgaaggtaccttaattgcgatgatgcaagcagcgggcacggctaatgttcaagctgcaccggttgctcaagctgccgctcctgcgccagcaccagcagcacctgctccagtacaagcggctcctgcccctgtggctgccgcgccagccacgggtgcaacccaagtggttgaagtcactgtgccggatatcggtggtgacacagatgtgtctgttatcgaagtcttagttgccgctggcgataagattgaggtggacgctggccttatcacgcttgaaaccgacaaagcgaccatggacgtaccatcgccattcgcgggtgtggtaaaagaagtgaaagtggctgtgggtgacaaggtttctcaaggctccttagtgatcatgctcgaagtgggtggcgcagctcctgctgccgctgctccacaagcaagcgcgtcagctcctgtcgctcaagctgcacctgcggcggctgttgctccagtagctgctgcaccagtggttgcggttaaagaaatccaagtgccagatattggtgatgccagcaatgtcgatgtgatcgaagtgctagtgtctgtgggtgatatgatcactgctgaccaaggtttgatcacgttagaaaccgataaagcgaccatggaagtgcctgcgccattcgccggtaaactgttgtcgttaaccgttaaagtcggtgataaggtttctcaaggtagcgtgattgcgacgattgagactgtgactgctggtgcagctcctgcgcctcaagccgcagcacctgcacctgtcgcccaagaagcggcaccagcacctgttgcagccgcgccgagccgtccaccggttccacatcacccaagtgcgggtgcgccagtggcaaccggtgtggtgcatgcgtctcctgcggttcgccgtttggcccgtgagtttggtgtggatctcactcaagtgacgggttctggccgtaaaggtcgcatcatgaaggaagacgtacaggcgtatgtgaagtacgaactgtctcgtcctaaggcgacagcagcaacttcagttgcagcgggtaacggtggtggtctgcaagtgattgctgcaccgaaagtggatttcagcaagtttggtgaagtggaagaaattccattaagccgtatccagaagatctctggtccaaacctacaccgtaactgggtaactattcctcacgtgactcagttcgatgaagctgatatcaccgaaatggaagagttccgtaagcagcagaacgacgcggcggcgaagaagaaagccgattataagatcactccgctggtctttatgatgaaagctgtggcgaaaacgctgcaacaattccctgtgttcaactcaagcttaagcagcgacggtgaatcactgatccagaagaagtactaccacatcggtgtggcggtggatacgccaaacggtctagtggttcctgtggtacgtgatgtggataagaaaggcattatcgagttatctcgtgagttggccgatatttctatccgcgcccgcgatggtaagctgaagtctgccgatatgcagggtagctgcttcactatttcaagcctaggtggcattggtggtactgcatttaccccaatcgttaactacccagacgtggcgattttaggtgtgtctaaatctgaaattaagcctaagtggaatggtaaagaattcgagcctaaattgatgttgccactgtcgctatcatacgatcaccgcgtgatcgatggtgctatggctgcacgctttagcgtgaccctgtcaggaattctgtccgatattcgtactttgattctgtaa

SEQ ID NO: 35429 - protein, 668 aa, Shewanella sp. ANA-3
MAELKEVFVPDIGGDEVQVIEICASVGDTLAAEESILTVESDKATMDIPAPFAGVLAELKVAVGDKVSEGTLIAMMQAAGTANVQAAPVAQAAAPAPAPAAPAPVQAAPAPVAAAPATGATQVVEVTVPDIGGDTDVSVIEVLVAAGDKIEVDAGLITLETDKATMDVPSPFAGVVKEVKVAVGDKVSQGSLVIMLEVGGAAPAAAAPQASASAPVAQAAPAAAVAPVAAAPVVAVKEIQVPDIGDASNVDVIEVLVSVGDMITADQGLITLETDKATMEVPAPFAGKLLSLTVKVGDKVSQGSVIATIETVTAGAAPAPQAAAPAPVAQEAAPAPVAAAPSRPPVPHHPSAGAPVATGVVHASPAVRRLAREFGVDLTQVTGSGRKGRIMKEDVQAYVKYELSRPKATAATSVAAGNGGGLQVIAAPKVDFSKFGEVEEIPLSRIQKISGPNLHRNWVTIPHVTQFDEADITEMEEFRKQQNDAAAKKKADYKITPLVFMMKAVAKTLQQFPVFNSSLSSDGESLIQKKYYHIGVAVDTPNGLVVPVVRDVDKKGIIELSRELADISIRARDGKLKSADMQGSCFTISSLGGIGGTAFTPIVNYPDVAILGVSKSEIKPKWNGKEFEPKLMLPLSLSYDHRVIDGAMAARFSVTLSGILSDIRTLIL

SEQ ID NO: 35430 - DNA, 1887 bp, Haemophilus somnus 2336
  CDS (1)..(1887): transl_table=11
atggctaaagaaattcaaattccagatattggtggagatgaagttactgtcactgaagttatggttaaagctggggatactattatagttgatcaatctgtgattaacgttgaaggcgataaggcatcaatggaagttccatcaccggaagcgggtgtcattaaggaagtattagtaaaagtaggcgacaaagtttctactggaactcctatgtttgtattagagaatgcagaattagcatctactgagacagcatctgaaagtatgcaaaccgaaaaaacacaaagtgcggtagcgtctatcattgaaatttatgtacctgacattggtggtgatgaagtcaatgtaactgatattatggtttctgtaggtgagacagttgcagaagagcagtctattttaaatgttgagggtgataaagcctcaatggaagtgcctgcccctactgccggtatagtaaaagaaattttaatcaaagtgggagataaagtgtcgaccggttctcttgtgatgaaatttgaagttgcaggtgttgtatctgtagccgaaacagctcaagtttcttcttcagctcaagtaacaggtgaaagtgcggtgcaagatgtacacgttcctgatatcggtggtgatgaagtcaatgtgacagaaattatggttgcagtgggcgatagtgttacagaggaacaatctttaattactgttgaaggtgataaagcttcaatggaagtgcctgctccttttgctggtgtagtgaaagaaattttggtgaaatcaggggataaagtttcaactggttcattaattatgcgttttgaagtgcaaggaaaagcccctactccaaaagcatcatcggctgtgacagaggctaaagtggctccatctccagctgcacaagaaaatcaaatgacgccagtgtctcaagctgatgtgactgcaagtgcggtgtttgctcatgcaactccggttgttcgtcgtctagctagagagttcggcgtgaacttagacaaggtaaaagggacggggcgtaaaggtcgaatcttaaaagaagacgttcaggcttatgtaaaagcggcaattaaagcggttgaaagtggcaatgtttctcctacatcagcaggtaatggtgctgtcaatggagcaggactaggcttgttaccttggccgaaagtcgacttcagtaaatttggtgatattgagcaagttgagttgggtcgtattcagaaaatctccggtgcaaatttacatcgcaactgggtaatgattcctcatgttacgcaatgggataaagcagacattacggaactggaaaaattccgcaaagaacaaaatgtgttggcggaaaaacaaaaacttgatgtaaaaattacgccattagtatttattatgaaggccgttgctaaagcgttagaaaattacccacgctttaatagttcattatcagaagatgctcaaagcctgattctgaaaaaatacattaatattggagtggcggttgatacacctaacggcttggttgtacctgtgtttaaagatgtgaataaaaaaggcattattgaattatctcgtgaattagcggaaatttctaagaaggctcgagctggtaaattaaccgcatcagatatgcaaggtggttgttttactatttcaagtctaggaggaattggcggtacacactttacgccaattgtaaatgctccagaagtcgcaattttgggtgtatctaaatctgaaatgacaccggtatggaatggcaaagactttactcctcgcttaatgcttccgttatctttgtcttatgatcatcgtgtaattgacggtgctgatggagcaagatttattactttcattaatagtgtattaagcgatcttcgtcgtttagttatgtaa

SEQ ID NO: 35431 - protein, 628 aa, Haemophilus somnus 2336
MAKEIQIPDIGGDEVTVTEVMVKAGDTIIVDQSVINVEGDKASMEVPSPEAGVIKEVLVKVGDKVSTGTPMFVLENAELASTETASESMQTEKTQSAVASIIEIYVPDIGGDEVNVTDIMVSVGETVAEEQSILNVEGDKASMEVPAPTAGIVKEILIKVGDKVSTGSLVMKFEVAGVVSVAETAQVSSSAQVTGESAVQDVHVPDIGGDEVNVTEIMVAVGDSVTEEQSLITVEGDKASMEVPAPFAGVVKEILVKSGDKVSTGSLIMRFEVQGKAPTPKASSAVTEAKVAPSPAAQENQMTPVSQADVTASAVFAHATPVVRRLAREFGVNLDKVKGTGRKGRILKEDVQAYVKAAIKAVESGNVSPTSAGNGAVNGAGLGLLPWPKVDFSKFGDIEQVELGRIQKISGANLHRNWVMIPHVTQWDKADITELEKFRKEQNVLAEKQKLDVKITPLVFIMKAVAKALENYPRFNSSLSEDAQSLILKKYINIGVAVDTPNGLVVPVFKDVNKKGIIELSRELAEISKKARAGKLTASDMQGGCFTISSLGGIGGTHFTPIVNAPEVAILGVSKSEMTPVWNGKDFTPRLMLPLSLSYDHRVIDGADGARFITFINSVLSDLRRLVM

SEQ ID NO: 35432 - DNA, 1896 bp, Pseudoalteromonas tunicata D2
  CDS (1)..(1896): transl_table=11
atgacgattgaaattaatgtaccagacattggtgctgatgcggttgaagttactgaaatattagtgaaagtgggcgacacagttgttgaagatcagtctttattgacggttgaaggcgataaagcatcaatggaagtacctgcatccacttcaggtgtagtaaaagaaattaaaattgctctgggtgacaaagtcaccacgggcagcttgattatgatttttgaaggtgaaagccaagcagcgccagcacctgtagcaactgcagctcctgccgcagcacctgtttctgctgcaacagcacaaaatgttaatgtaccagatattggcggtgatgaagttgaagttaccgctattttggttgctgttggcgatgtagttgctgaagatcaatcaatcttaaacgttgaaggcgataaagcttcaatggaagtacctgcgccatttgctggtactgtaaaagaaattaaagttgctacaggcgataaagtcacgactggctcgcttgttatggtatttgacgttgcaggcgcagcaagtgttgaagtggcagtacctgttgctgcagctgcaccagttgcaagcgcatcatcagagcaaaatgtgtgcgtgccagacatcggtggtgaccaagttgaagtgactgaaattttagttgctgtgggtgacgtggttaaagaagaccaatcaatcttaaacgttgaaggcgataaagcgtcaatggaagtgccggctccagttgctggaacggtaaaagaaattaaagttgctgttggtgacaaagttggtactggttcgttggtttttgtatttgaagttgcgggcagtgcgccagttgcacaagcgcctgtagcacaagcgcctgtagcacaagcgccaacggctgctgcaccgtcggctcctgcggttcaggctgttgcgccagtacaagctgctcaagcagaatcttttgctgaaaatagtgcgtatgctcatgcttctccagttattcgccgtcttgctcgtgagtttggtgttaaccttgctaacgttaaaggctcaggccgtaaaggtcgcgtagtaaaagaagacgtgcaaaactatgtgaaaaacttagtgaagcaagttgagtcaggtgcgttatcaacaagtaaaggcacaactggtggcggtgagttaaatcttattccgtggccaaaagtagattttgctaagtttggtgaagttgaagagaaaaagctttctcgtattcaaaaactatctggtgcaaatttacaccgtaactgggtgcaaattccacatgttactcagtttgatgaagcggatatcacgacacttgaagagttccgcaaagagcaaaatgctctggcagaaaaacaaaagctgggcgtaaaaatcacgccattagtctttgtaatgaaagcggcggcgaaagcgttagttgagtttcctacatttaactcgtctttatcaaatgatggcgaaagcttaattttgaaaaaatacgttaatattggtgttgcggttgatacgcctaatggtttagttgtgccggtattcaaagatgtgcacaagaaaggcattattgaattatcacgtgaattaatggatatctcgaaaaaagcccgtgaaggtaaattaaccgcagccgacatgcaaggtggttgttttacaatttcaagccttggtggtattggcggtactgcgtttacaccgattgtaaatgcgccagaagtggctattttaggtgtgtctaaatctgacattaaaccaaaatggaatggtaaagagtttgagcctaaattaatggttccactttcgatgtcttacgaccatagagtcattgacggggcacttgctgcacgctttactgcaacgcttgcaagctatttgagcgatattcgtcaactagttatgtaa

SEQ ID NO: 35433 - protein, 631 aa, Pseudoalteromonas tunicata D2
MTIEINVPDIGADAVEVTEILVKVGDTVVEDQSLLTVEGDKASMEVPASTSGVVKEIKIALGDKVTTGSLIMIFEGESQAAPAPVATAAPAAAPVSAATAQNVNVPDIGGDEVEVTAILVAVGDVVAEDQSILNVEGDKASMEVPAPFAGTVKEIKVATGDKVTTGSLVMVFDVAGAASVEVAVPVAAAAPVASASSEQNVCVPDIGGDQVEVTEILVAVGDVVKEDQSILNVEGDKASMEVPAPVAGTVKEIKVAVGDKVGTGSLVFVFEVAGSAPVAQAPVAQAPVAQAPTAAAPSAPAVQAVAPVQAAQAESFAENSAYAHASPVIRRLAREFGVNLANVKGSGRKGRVVKEDVQNYVKNLVKQVESGALSTSKGTTGGGELNLIPWPKVDFAKFGEVEEKKLSRIQKLSGANLHRNWVQIPHVTQFDEADITTLEEFRKEQNALAEKQKLGVKITPLVFVMKAAAKALVEFPTFNSSLSNDGESLILKKYVNIGVAVDTPNGLVVPVFKDVHKKGIIELSRELMDISKKAREGKLTAADMQGGCFTISSLGGIGGTAFTPIVNAPEVAILGVSKSDIKPKWNGKEFEPKLMVPLSMSYDHRVIDGALAARFTATLASYLSDIRQLVM

SEQ ID NO: 35434 - DNA, 1896 bp, Photobacterium sp. SKA34
  CDS (1)..(1896): transl_table=11
atggcaatcgaaattaatgtaccagacatcggtgcggatgaggttgaagtaactgagattcttgttagcgttggcgacaaggttgaagaagagcaatcactgatcactgttgaaggtgataaagcttcaatggaagttcctgcttctcaatcgggtatcgttaaagaaatcaaagttgctgaaggcgacacggtttctactggttctctaatcatgattttcgaagccgagagtgcagctgacgctgcacctgctcctgtggctgaagcagcgactgctgctccagctccagcagcagcggctgaactgaaagaagttcatgttccagatatcggtggtgatgaagttgaatgtactgaaatcatggtatctgttggcgatacagtagaagaagagcaatctctaattactgttgaaggtgacaaggcttctatggaagtccctgcgccattcgctggtactgttaaagaaatcaaaattgtagaaggcgacaaggtttctactggttctttaatcatggtatttgaagtagcaagttctggctctgcacctgcagcacctgtagctcaagcggcagcgcctgctccagcagcacctgcggcatctgcagcgaaagaagttaacgttccagatatcggtggcgacgaagtagaagttactgaaatcatggtatctgttggcgatacagtggaagaagagcaatctctcatcactgttgaaggtgacaaggcttcaatggaagttcctgcaccattctctggtactgttaaagaaatcaaaattgtagaaggcgacaaggtttctactggttctttaatcatggtatttgaagttgctggtgcagcaccagcagcggctcctgtagctcaagcggcagcgcctgcacctacagcagcacctgcggcggctccagcaaaagctgaagcgtctgctgcaacaggtgatttcgttgaaaacaacgaatacgcacacgcatcaccagttgttcgtcgtctagctcgtgagttcggtgttaaccttgcgaaagtgaaaggtactggccgtaagaaccgcgttcttaaagaagacgtacaaaacttcgttaaagatgcacttaagcgtcttgaatctggtgcagcagcttctgcatcaggtaaaggcgacggcgcagctcttggtctactaccttggccgaagattgacttcagcaagtttggtgaaactgaagttaagccactttctcgcattaagaagatctctggtgctaacctacaccgtaactgggtaatgatccctcacgttacacagtgggataatgcagatatcacagcacttgaagcattccgtaaagagcagaatgctatcgaagcgaagaaagatactggcatgaagatcacgccacttgtgttcatcatgaaagcggctgctaaagcacttgaagcattcccttcatttaactcttctctatctgacgatggcgagagtttgatcctgaagaaatacgtgaacatcggtatcgcagtcgatacgccaaacggcctagttgttcctgtatttaaagatgtgaacaagaaaggtatctacgagctttcagaagagctaatggctatttctaagaaagcacgtgctggtaagctaactgcatctgatatgcaaggtggctgtttcactatctcaagccttggtggcttaggtggtactgcattcacaccaatcgtgaacgcaccagaagtaggtatcttaggtgtatctaagtctgaaatgaaaccagtatggaacggtaaagagttcgaaccgcgtctacaacttccactatcactatcatacgatcaccgtgtgattgatggtgctgaaggtgcgcgcttcatcacttacctaaatggctgtctatcagacatccgtcgtttagtactttaa

SEQ ID NO: 35435 - protein, 631 aa, Photobacterium sp. SKA34
MAIEINVPDIGADEVEVTEILVSVGDKVEEEQSLITVEGDKASMEVPASQSGIVKEIKVAEGDTVSTGSLIMIFEAESAADAAPAPVAEAATAAPAPAAAAELKEVHVPDIGGDEVECTEIMVSVGDTVEEEQSLITVEGDKASMEVPAPFAGTVKEIKIVEGDKVSTGSLIMVFEVASSGSAPAAPVAQAAAPAPAAPAASAAKEVNVPDIGGDEVEVTEIMVSVGDTVEEEQSLITVEGDKASMEVPAPFSGTVKEIKIVEGDKVSTGSLIMVFEVAGAAPAAAPVAQAAAPAPTAAPAAAPAKAEASAATGDFVENNEYAHASPVVRRLAREFGVNLAKVKGTGRKNRVLKEDVQNFVKDALKRLESGAAASASGKGDGAALGLLPWPKIDFSKFGETEVKPLSRIKKISGANLHRNWVMIPHVTQWDNADITALEAFRKEQNAIEAKKDTGMKITPLVFIMKAAAKALEAFPSFNSSLSDDGESLILKKYVNIGIAVDTPNGLVVPVFKDVNKKGIYELSEELMAISKKARAGKLTASDMQGGCFTISSLGGLGGTAFTPIVNAPEVGILGVSKSEMKPVWNGKEFEPRLQLPLSLSYDHRVIDGAEGARFITYLNGCLSDIRRLVL

SEQ ID NO: 35436 - DNA, 1944 bp, Oceanospirillum sp. MED92
  CDS (1)..(1944): transl_table=11
gtgagtattatcacaattactgtgccagacctgtcaggttccacagatgttgatgttgttgaagtgctggttaaagacggcgacaccattagcgaaggcgacagcctgattgttctggaaacagataaagcatccatggaagtgccggcaacccatagtggcgttgttgtgtccatgaaagttaatgttgatgatcaggttaatgaaggtgatcttctgcttgaactggatacaggtgcttcggcatctgcaccagcggcggaagaagcgccggcaccggctgctgcgcctgaagcagcaccagctccggctgctgctccagcagcggcttcggctgtagaaaatgtactgatcccggatctgtccggtgcaactgacgttgatgttgttgaagtactggtaaaagacggtgacaccgtatctgaaggcgatagcctgatcgtactggaaacagataaagcgtctatggaagtaccagcacctaaagatggtgtggtggtttctatgaagatcaacgttgacgaccaggttaacgaaggcgatcttctgatggagctgagtgtaggtggtgcagctgcgccggctgcagcagccccagcagtcgctcctgctcaggaggcagcacctgctgcagcccctgcaccggttgcgggtggtaaagaaaacgttctgatccctgatctgtcaggtgcgagcgatgtagacgttgttgaagtattggttaaagacggcgacagcgttgaagaaggcgatagcctgatcgtactggaaacagacaaggcttctatggaagtgccagcacctaaagcaggtacggttgtttccatgaagatcaatgaaggcgatacggtaaacgaaggtgatctgctgctggagcttgaagtttccggcggtgcggctcctgcgccagcagctccggctgctgcaccggcagcgcctgctcctgcggctccagcgccatctgctcctgctaaggcagcgccagcagcgggtaatgttgataaagcagccctggagaagaaaaacaaaactgttcatgcgggcccggcagtacgtgccattgcgcgtgaattcggtgtggatctgtctcttgttaccggtaccggtcgtcgcggtcgcatcgttaaagaagacgttcaggcatacgttaaaggtgcactgaaacagctggctgaagcaccaaaaggtggtgcggtaacgggtggttcaggtatccctgcaattccagaagttgatttcagcaagttcggtgaaattgaagtcgagaaactaagcaaaattgctaaagtgactcgcgacaacatgagccgctgctggttgaacattccacatgtgactcagtttgataaagccgatatcacagatctggaagcgttccgtaaagagatgaaggacgaagctgcgaagtctggcgttaagctgacaccgctgccattcatgctgaaagctattgcgatcgcactgaaagaacatcctaagttcaatgcatctctgcacgctgacggtgagcacatcgtttacaagaaatatgtaaacatcggtatggcggtagatacgccaaacggcctgatggttcctgttatcaaggatgcagataagaagagcatctacgagctgtctaaagaagcgatcgaactggcgggtaaagctaaagatcgtaagttgaagccagacgaaatgcagggtgcatgtttcacaatctcaagcctgggtggcatcggcggtactggcttcacgccaatcgttaatgcacctgaagttgcgattctgggtgtatctaaagcagacatcgagcctcgctggaatggtaaagagttcgaaccacgtaagatgttgccattgtgcctgtcttacgatcaccgcgcgatcaacggtggtgatgcgggtaagttcctgacctacctgaatggcttgctgagcgacattcgtcgcctggtactttag

SEQ ID NO: 35437 - protein, 647 aa, Oceanospirillum sp. MED92
MSIITITVPDLSGSTDVDVVEVLVKDGDTISEGDSLIVLETDKASMEVPATHSGVVVSMKVNVDDQVNEGDLLLELDTGASASAPAAEEAPAPAAAPEAAPAPAAAPAAASAVENVLIPDLSGATDVDVVEVLVKDGDTVSEGDSLIVLETDKASMEVPAPKDGVVVSMKINVDDQVNEGDLLMELSVGGAAAPAAAAPAVAPAQEAAPAAAPAPVAGGKENVLIPDLSGASDVDVVEVLVKDGDSVEEGDSLIVLETDKASMEVPAPKAGTVVSMKINEGDTVNEGDLLLELEVSGGAAPAPAAPAAAPAAPAPAAPAPSAPAKAAPAAGNVDKAALEKKNKTVHAGPAVRAIAREFGVDLSLVTGTGRRGRIVKEDVQAYVKGALKQLAEAPKGGAVTGGSGIPAIPEVDFSKFGEIEVEKLSKIAKVTRDNMSRCWLNIPHVTQFDKADITDLEAFRKEMKDEAAKSGVKLTPLPFMLKAIAIALKEHPKFNASLHADGEHIVYKKYVNIGMAVDTPNGLMVPVIKDADKKSIYELSKEAIELAGKAKDRKLKPDEMQGACFTISSLGGIGGTGFTPIVNAPEVAILGVSKADIEPRWNGKEFEPRKMLPLCLSYDHRAINGGDAGKFLTYLNGLLSDIRRLVL

SEQ ID NO: 35438 - DNA, 1905 bp, Alteromonadales bacterium TW-7
  CDS (1)..(1905): transl_table=11
atgagtattgaaattaatgttccagatatcggtggcgatgacgtagaagtaaccgaaatcttagtaagcgttggtgacaaagtagatgttgaccaatctttactgacagttgaaggcgacaaagcctcaatggaagtacctgctgcgcaagcgggtaccgtaaaagaaattaaagtaaatgttggcgatacagtaacaacgggttctttagtatttatatttgaaggcgaaagcgcagatgctgattcagcacctgaggcatctgctgaatcggcggcaccggctcacgcttcaggttcttcaactaaagaagtaaccgtaccagatattggtgatgacgaagttgaagtaactgaaatcatggttgctgttggcgataccgttgaggaagagcaatctatcttaaatgttgaaggcgacaaagcagctatggaagtacctgcaccgtttgctggtactgtaaaagaaataaaagtagctactggcgatacagtaaaaacaggttcattagtatttgtttttgaagttgcaggttcgagcgcatctgcatcagatgcacctaagcaagagtctgcaccagcagagcctgctcaaagcgccgagccaagcataaaagaagtaaacgtccctgatattggcgacgacgaagttgaagtaactgaaatcatggttgctgttggtgataccgttgaagaagagcaatctatcttaaacgttgaaggcgacaaagcggctatggaagtaccagcgccatttgcaggtacagttaaagaaattaaagtagcagcgggcgataaagtaaaaactggttcacttatttttgtatttgaagttgcaggcagtgcaactgcaaaagcttcagcgcctgctgaacaaaagccagcggcggcacttgcaaaaaccgagtctgcgccagcacaggctgcacctgccgctaaagttagcaacgaaagttttgaaaacaatagcgcgtatgctcatgcatcgcccgttgttcgtcgtttagcacgtgagtttggtattaacttagcgaacgtaaaaggcacgggtcgtaaaaaccgtgtggttaaagaagacgtgcaaaactatgttaaaagcttagtgaagcaggttgagtctggtcaagtttcagcatcagcaggtaatactggtggtagtgaacttggcttaattccttggccaaaagtagattttgctaaatttggtgaaattgaagagaaaaaactgtctcgcatccaaaagctatcgggtaaaaacttacaccgtaactgggtacaaataccgcatgttacacagtttgacgaagcagatatcacaagccttgaagtattccgtaaagaacaaaacgttttaagcgagaagaaaaagcttggcgttaaaatcacaccactagtgtttgtgatgaaagctgcggctaaagtacttgctgagttcccaacgtttaactcgtcgctgtctgaagatggcgaaagcttgattcttaaaaagtacattaatattggtgttgcggtagatacgcctaatggcttagttgttccagtgtttaaagacgtggacaaaaaaggcattattgagctatctcgtgagctaatggaagtgtctaaaaaagcgcgtgaaggtaagctaactgcatcagatatgcaaggcggttgttttactatttcaagtttaggcggtattggtggtacggcatttacgccaattgttaacgcaccagaggttgctattttaggtgtatctaaatctgaaatgaaacctaagtggaacggtaaagactttgagcctaaattaatggttccgttgtctatgtcgtacgatcaccgcgtgattgacggtgcactagctgcacgctttaccgcaacgcttgctagctacatgagcgacatacgtcaattagtgatgtaa

SEQ ID NO: 35439 - protein, 634 aa, Alteromonadales bacterium TW-7
MSIEINVPDIGGDDVEVTEILVSVGDKVDVDQSLLTVEGDKASMEVPAAQAGTVKEIKVNVGDTVTTGSLVFIFEGESADADSAPEASAESAAPAHASGSSTKEVTVPDIGDDEVEVTEIMVAVGDTVEEEQSILNVEGDKAAMEVPAPFAGTVKEIKVATGDTVKTGSLVFVFEVAGSSASASDAPKQESAPAEPAQSAEPSIKEVNVPDIGDDEVEVTEIMVAVGDTVEEEQSILNVEGDKAAMEVPAPFAGTVKEIKVAAGDKVKTGSLIFVFEVAGSATAKASAPAEQKPAAALAKTESAPAQAAPAAKVSNESFENNSAYAHASPVVRRLAREFGINLANVKGTGRKNRVVKEDVQNYVKSLVKQVESGQVSASAGNTGGSELGLIPWPKVDFAKFGEIEEKKLSRIQKLSGKNLHRNWVQIPHVTQFDEADITSLEVFRKEQNVLSEKKKLGVKITPLVFVMKAAAKVLAEFPTFNSSLSEDGESLILKKYINIGVAVDTPNGLVVPVFKDVDKKGIIELSRELMEVSKKAREGKLTASDMQGGCFTISSLGGIGGTAFTPIVNAPEVAILGVSKSEMKPKWNGKDFEPKLMVPLSMSYDHRVIDGALAARFTATLASYMSDIRQLVM

SEQ ID NO: 35440 - DNA, 1221 bp, Pseudomonas putida GB-1
  CDS (1)..(1221): transl_table=11
atggctatcgagatcaaagccccaaccttcccggaatcggttgccgatggcaccgttgccacctggcacaagaagccgggcgaagccgtcaagcgtgacgagctgatcgtcgacatcgagaccgacaaggttgtcctggaagttctggctaccgccgatggcgtgctgggcgacatcgtcaagggcgagggcgacaccgtcctgtccgacgaagtgctgggttcgatcgttgaaggcggtgctgccgccgctccagccgcagctgccgcgcctgctgctgctccggccgctgctgccgctgatgctggcgaagatgacccggttgctgccccggccgcgcgcaagctggctgaagaaaacggcatcgacctggctaccgttgccggtactggcaaaggcggtcgcgtcaccaaggaagacgtggtggctgctgttgccaacaagaagtcggcccctgccgctgcaccggctgccaagcctgctgccgctgctgcaccggttgtcgtcgccgctggcgaccgcaccgagaagcgcgtgccgatgactcgcctgcgtgccaagatcgccgagcgtctggtcgaagcccagtcgaacatggccatgctgaccaccttcaacgaagtcgacatgaccgaagtcatggccctgcgttcgaagtacaaggacctgttcgagaagacccataacggcgtacgcctgggcttcatgtcgttcttcgtcaaggccgccaccgaagccctgaagcgcttcccggctgtcaacgcctcgatcgacggtaacgacattgtctaccacggcttcgctgacgtgggtgttgcggtttccagcgaccgtggcctggtggtcccggtactgcgcaacgccgagtcgatgagcctggctgaaatcgaaaacggcattgccaccttcggcaagaaagcccgtgacggcaaactgtcgatcgaagaaatgaccggcggtaccttcaccatcaccaacggcggcaccttcggttcgatgatgtcgaccccgatcgtcaacccgccgcaggccgcgatcctcggcatgcacaacatcatccagcgcccgatggccgtcaatggtcaggtcgtgattcgcccgatgatgtacctggcactgtcctacgatcaccgcctgatcgatggtaaggaagcggtaaccttcctggtcaccatcaagaacctgctggaagatccgtctcgcctgctgctggacatctaa

SEQ ID NO: 35441 - protein, 406 aa, Pseudomonas putida GB-1
MAIEIKAPTFPESVADGTVATWHKKPGEAVKRDELIVDIETDKVVLEVLATADGVLGDIVKGEGDTVLSDEVLGSIVEGGAAAAPAAAAAPAAAPAAAAADAGEDDPVAAPAARKLAEENGIDLATVAGTGKGGRVTKEDVVAAVANKKSAPAAAPAAKPAAAAAPVVVAAGDRTEKRVPMTRLRAKIAERLVEAQSNMAMLTTFNEVDMTEVMALRSKYKDLFEKTHNGVRLGFMSFFVKAATEALKRFPAVNASIDGNDIVYHGFADVGVAVSSDRGLVVPVLRNAESMSLAEIENGIATFGKKARDGKLSIEEMTGGTFTITNGGTFGSMMSTPIVNPPQAAILGMHNIIQRPMAVNGQVVIRPMMYLALSYDHRLIDGKEAVTFLVTIKNLLEDPSRLLLDI

SEQ ID NO: 35442 - DNA, 1638 bp, Pseudomonas putida GB-1
  CDS (1)..(1638): transl_table=11
gtgagcgaactcattcgcgtacctgacatcggcagcggtgaaggtgaaatcatcgagctgttcgtcaaggtcggtgaccgtatcgaggctgaccagagcctgctgaccctggagtccgacaaggcctccatggaaatcccggcccccaaggccggcgtcatcaaggaactgaaggtcaagctgggcgatcgcctgaaagaaggcgacgagctgctggttctggaagccgagggcgccgctgctgcggcccctgaggctccggccgctgccgctgcgccggctgctgctccagcgcctgctgccgaagccgcccctgctcccgccgcagctccggctgccgccagcgtgcaggacatccacgtgccggacatcggctcgtcgggcaaggccaagatcatcgaagtgctggtcaaggtcggcgacaccgtcgaagccgaccagtcgctgattaccctggagtccgacaaggcctccatggaaatcccgtcgccggctgccggcgtggtcgaagaagtcctgtgcaagctggaagacgaagtcggcactggcgacctgatcttcaagctcaaggttgctggcgctgcacctgctgccgctccggcacctgccgcagctgctgccccggccaaggctgaggctgctccggccgccgcacctgccgctgccgccccggctgcagcccctgcaccggctgctaccgcaccggccgcaggcagcaacgccaaggttcacgcaggcccggctgttcgtcagctggcccgtgaattcggtgtcgacctgggcgcagtcgcggccactggcccgcacggccgcatcctgaaagaagacgtgcaggtctacgtcaaggcgatgatgcagaaggccaaggaagcgccggcagctgctggtgcaaccggcggcgctggcatcccgccgatccctgccgtggacttcagcaagttcggtgaagtggaagaagtggccctgacccgcctgatgcaggtcggtgccgccaacctgcaccgcagctggctgaacgtgccgcacgtgacccagttcgactccgccgacatcaccgagctggaagccttccgcgttgcgcagaaggccgtggccgagaaggctggcgtgaagctgaccgtgctgccactgctgctcaaggcctgcgccttcctgctcaaggaactgccggacttcaacagctcgctggcgccaagcggcaaggccatcatccgcaagaagtacgtgaacatcggcttcgccgtggacaccccggatggtctgctggtccctgtgatcaagaacgtcgaccagaagagcctgctgcaactggccgccgaagccgcggcgctggctgaaaaagcccgcaccaagaagctgtcggccgacgagatgcaaggcgcttgcttcaccatctccagcctcggccacattggcggcaccggcttcacgccgatcgtcaacgcgccggaagtggctatcctgggcgtctccaaggcgaccatgcagccggtctgggatggcaaggcgttccagccgaagctgatgctgccgctgtcgctgtcctacgatcaccgtgtgatcaacggcgctgccgctgcgcgcttcaccaagcgcctgggcgacgtgctgggcgatatccgcaccatgctgctgtaa

SEQ ID NO: 35443 - protein, 545 aa, Pseudomonas putida GB-1
MSELIRVPDIGSGEGEIIELFVKVGDRIEADQSLLTLESDKASMEIPAPKAGVIKELKVKLGDRLKEGDELLVLEAEGAAAAAPEAPAAAAAPAAAPAPAAEAAPAPAAAPAAASVQDIHVPDIGSSGKAKIIEVLVKVGDTVEADQSLITLESDKASMEIPSPAAGVVEEVLCKLEDEVGTGDLIFKLKVAGAAPAAAPAPAAAAAPAKAEAAPAAAPAAAAPAAAPAPAATAPAAGSNAKVHAGPAVRQLAREFGVDLGAVAATGPHGRILKEDVQVYVKAMMQKAKEAPAAAGATGGAGIPPIPAVDFSKFGEVEEVALTRLMQVGAANLHRSWLNVPHVTQFDSADITELEAFRVAQKAVAEKAGVKLTVLPLLLKACAFLLKELPDFNSSLAPSGKAIIRKKYVNIGFAVDTPDGLLVPVIKNVDQKSLLQLAAEAAALAEKARTKKLSADEMQGACFTISSLGHIGGTGFTPIVNAPEVAILGVSKATMQPVWDGKAFQPKLMLPLSLSYDHRVINGAAAARFTKRLGDVLGDIRTMLL

SEQ ID NO: 35444 - DNA, 3474 bp, Enterobacter cloacae
  CDS (1205)..(3097): transl_table=11
ggatctccaccactatcgctttcgttcgtgccctgaacgtgatgctgaagaacaagtcgatcaaagatcgtctggttccaatcatcgctgacgaagcgcgtactttcggtatggaaggtctgttccgtcagatcggtatctacagcccgaacggccagcagtacaccccgcaggaccgtgagcaggttgcatactacaaagaagacgagaaaggtcagatcctgcaggaaggtatcaacgagctgggcgcaggcgcatcctggctggctgctgcgacctcttacagcaccaacaacctgccgatgatcccgttctacatctactactccatgttcgggttccagcgtatcggtgacctgtgctggcaggcaggcgaccagcaggctcgcggcttcctggtaggcggtacctccggtcgtacgactctgaacggtgaaggtctgcagcacgaagatggccacagccacattcagtctctgacgatccctaactgtatctcttacgatccgtcttacgcgtacgaagtggcagtcatcatgcatgacggtctgcagcgcatgtacggtgaagcgcaagagaacatttactactacatcaccaccctgaacgaaaactaccacatgccggcaatgccagcaggtgccgaggaaggtatccgtaaaggtatctacaaactcgaaaccatcgaaggtagcaaaggtaaagttcagctgctgggctccggctctatcctgcgtcacgtacgtgaagcagcgcagatcctggcgaaagactacggcgtgggttccgacgtgtactctgtgacctccttcaccgaactggcgcgtgatggccaggattgtgagcgctggaacatgctgcacccactggaaactccacgcgttccgtacatcgctcaggtgatgaacgacgcgccagcggtggcgtctactgactatatgaaactgttcgctgagcaggttcgtacttacgttccagctgatgattatcgcgttctgggtactgacggcttcggtcgttctgacagccgcgaaaacctgcgtcaccacttcgaagttgatgcttcttacgtggttgtagcagcactgggcgaactggctaaacgtggcgaaatcgataagaaagtggttgcggacgcaatcaccaaattcaacatcgatgcagaaaaagttaacccgcgtctggcgtaagaggtaaaagaataatggctatcgaaatcaatgtaccggacatcggggctgatgaagttgaaatcaccgagatcctggtcaaagtaggcgacaaagttgaagctgaacagtcgctgatcaccgtagaaggcgacaaagcctctatggaagtcccgtctcctcaggctggcatcgttaaagagatcaaagtctctgttggcgataaaaccgagaccggcaaactgatcatgattttcgattccgccgacggtgcagcagctgctgcacctgcgcaggaagagaagaaagccgctccggccgccgctgctccagcagctgccgcgagcgcgaaagaagtgaacgtgcctgacatcggcggtgacgaagttgaagtcactgaaatcctggtgaaagtgggcgacaccgttgcggctgagcagtcactgatcaccgtagaaggcgacaaagcctctatggaagtgccggctccgttcgcgggtaccgttaaagaaatcaagatcaacaccggcgataaagtgtctaccggctccctgatcatggtcttcgaagtggcgggtgctgcacctgctgcagcgcctgcgcaggccgctgctccggctctggctgctgcaccagcagctgctggcggcgcgaaagacgttaacgtaccggacatcggcggtgacgaagttgaagtgaccgaagtgatggtgaaagtgggcgacaaagttgccgctgaacagtcactgatcaccgttgaaggcgacaaagcttctatggaagtgccagcgccgttcgcgggtaccgttaaagagattaagatcagcaccggcgacaaagtgtctaccggctctctgatcatggtcttcgaagtggaaggcgctgcgcctgccgcagctccggctgccgcggctgctcctgccgcggctgctgcaccggctcaggctgctaaaccagccgctgcccctgctgctaaagcagaaaaatctgagttcgctgaaaacgacgcttacgtccacgctaccccgctgattcgccgtctggcacgcgagtttggtgttaaccttgcgaaagtgaagggcactggccgtaaaggtcgtatcctgcgcgaagacgttcaggcttacgtgaaagaagctatcaaacgtgcagaagcagctccggcagcgactggcggtggtatccctggcatgctgccgtggccgaaggtggacttcagcaagtttggtgaaatcgaagaagtggaactgggccgcatccagaaaatctctggtgcgaacctgagccgtaactgggtaatgatcccgcatgttactcacttcgacaaaaccgatatcaccgagttggaagcgttccgtaaacagcagaacgaagaagcggcgaaacgtaagctggatgtgaagatcaccccggttgtcttcatcatgaaagccgttgctgcagctcttgagcagatgcctcgcttcaatagttcgctgtcggaagacggtcagcgtctgaccctgaagaaatacatcaacatcggtgtggcggtggataccccgaacggtctggttgttccggtattcaaagacgtcaacaagaaaggcatcatcgagctgtctcgcgagctgatgactatttctaagaaagcgcgtgacggtaagctgactgcgggcgaaatgcagggcggttgcttcaccatctccagcatcggcggcctgggtactacccacttcgcgccgattgtgaacgcgccggaagtggctatcctcggcgtttccaagtccgcgatggagccggtgtggaatggtaaagagttcgtgccgcgtctgatgctgccgatttctctctccttcgaccaccgcgtgatcgacggtgctgatggtgcccgtttcattaccatcattaacaacacgctgtctgacattcgccgtctggtgatgtaagtaaaagagccggcccaacggccggcttttttctggtaatctcatgaatgtattgaggttattagcgaatagacaaatcggttgccgtttgttgtttaaaaattgttaacaattttgtaaaataccgacggatagaacgacccggtggtggttagggtattacttcacataccctatggatttctgggtgcagcaaggtagcaagcgccagaatccccaggagcttacataagtaagtgactggggtgagggcgtgaagctaacgccgctgcggcctgaaagacgacgggtatgaccgccggagataaatatatagaggatcatgatgagtactgaaatcaaaactcaagtcgtggtacttggggcaggccccgcag

SEQ ID NO: 35445 - protein, 630 aa, Enterobacter cloacae
MAIEINVPDIGADEVEITEILVKVGDKVEAEQSLITVEGDKASMEVPSPQAGIVKEIKVSVGDKTETGKLIMIFDSADGAAAAAPAQEEKKAAPAAAAPAAAASAKEVNVPDIGGDEVEVTEILVKVGDTVAAEQSLITVEGDKASMEVPAPFAGTVKEIKINTGDKVSTGSLIMVFEVAGAAPAAAPAQAAAPALAAAPAAAGGAKDVNVPDIGGDEVEVTEVMVKVGDKVAAEQSLITVEGDKASMEVPAPFAGTVKEIKISTGDKVSTGSLIMVFEVEGAAPAAAPAAAAAPAAAAAPAQAAKPAAAPAAKAEKSEFAENDAYVHATPLIRRLAREFGVNLAKVKGTGRKGRILREDVQAYVKEAIKRAEAAPAATGGGIPGMLPWPKVDFSKFGEIEEVELGRIQKISGANLSRNWVMIPHVTHFDKTDITELEAFRKQQNEEAAKRKLDVKITPVVFIMKAVAAALEQMPRFNSSLSEDGQRLTLKKYINIGVAVDTPNGLVVPVFKDVNKKGIIELSRELMTISKKARDGKLTAGEMQGGCFTISSIGGLGTTHFAPIVNAPEVAILGVSKSAMEPVWNGKEFVPRLMLPISLSFDHRVIDGADGARFITIINNTLSDIRRLVM

SEQ ID NO: 35446 - DNA, 1395 bp, Aedes aegypti
  CDS (1)..(1395)
atggccggcttgatccaacgacacggttctgtcctagtgcgtcgatttctcaccaatggaaaacggattaccaacagggcactcgcggtgacgcaattccacaccagtgcccaactggacaagaccgtttcgttcaacctgtcggatatcggggaaggaatccgcgaggtaacggtcaaggagtggttcgtcaaggagggcgatgtcgttgagcagtttgacaacctgtgtgaagtccagagtgacaaggcgtcggtcacgatcaccagtcggtacgatggaaagatcctcaagctgcacaagatggtagatgagatcgcgttggttggtaagcctttgctggatttcgatgtcgaagatgaagagggcgaggatagcagcagcagcagcggagagagcagctccgatgaagaagaagttaaggtacaggctgtggccgctggtggcgcagctgccgcagcgacagcagcatctgtgatctcaagtgggaaggtgctggcaacgcctgctgttcggagaatcgctatggaaaacaaagtggatctacgcgaggtgaagccatccggcaaaaatggacgcgtccttaagggtgatgttctggagttcttgaacatcattccacagggaaccgtcaaacctcatcctactttggcccaagccaaacccaccacagctgcaccgtgtccaaagtctatggaaactgttgtgccattgaagggcgttgccaaggccatgtacaaatcgatgtctgaatcactgaaaattcctcacttcgcctacagcgatgaaattgacgtttctcagctggtgaaagtccgcgaagctctcaaagccgaagctctggctcgcggcgtcaaactaacctatatgccgttcttcgtcaaggctgcttccaacgctctcaaagagttcccgatcgtcaacagttcgttcgatgagcccaacgaaagcgtcgtctacaagtcctaccacaacattagcattgccatgcacacccctcaaggactggtggttccaaatgtcaaaaacgtcgacagcaaatcgatcctccagatcgcggctgagctgaacgcgcttcaggaacgcggcgctaagggaactctcactccagacgacttcgtcaatggaaccttctccttgtctaacattggaatcatcggaggcacctacacccacccctgcatcatggcccctcaggtggcaatcggagccatcgggcaaacgaaggtcctcccacgcttcgacgcctccggcaatgtggtcccggcgcacatcatcaacgtaagctggtcggccgatcatcggatcatagatggcgtaaccatggcctccttctcgaacgcatggaaacgtcagctggagaatcccaacctgttcctgctgacggcgcagtag

SEQ ID NO: 35447 - protein, 464 aa, Aedes aegypti
MAGLIQRHGSVLVRRFLTNGKRITNRALAVTQFHTSAQLDKTVSFNLSDIGEGIREVTVKEWFVKEGDVVEQFDNLCEVQSDKASVTITSRYDGKILKLHKMVDEIALVGKPLLDFDVEDEEGEDSSSSSGESSSDEEEVKVQAVAAGGAAAAATAASVISSGKVLATPAVRRIAMENKVDLREVKPSGKNGRVLKGDVLEFLNIIPQGTVKPHPTLAQAKPTTAAPCPKSMETVVPLKGVAKAMYKSMSESLKIPHFAYSDEIDVSQLVKVREALKAEALARGVKLTYMPFFVKAASNALKEFPIVNSSFDEPNESVVYKSYHNISIAMHTPQGLVVPNVKNVDSKSILQIAAELNALQERGAKGTLTPDDFVNGTFSLSNIGIIGGTYTHPCIMAPQVAIGAIGQTKVLPRFDASGNVVPAHIINVSWSADHRIIDGVTMASFSNAWKRQLENPNLFLLTAQ

SEQ ID NO: 35448 - DNA, 1512 bp, Aedes aegypti
  CDS (1)..(1512)
atgctgcgaaccatcgccgtaaggaatgagaagctcctgctccagggatcccgcaaagttctccggggaactgccagcagggcgctaagctgcgaagccgcccggaagtgcactgtccaaaaaaactctcaaaaatggacttcaacgggatcccaaatggcctcgctatggcaggtgaacttcgtccgtggttactgcagtaactatccagcccacaataaggtccttctgccagcgctttcacccacaatggaactcggtaccatcgtcagctgggagaagaaggaaggcgacaagctgaacgaaggtgatctcttggccgaaatcgaaaccgataaggccaccatgggattcgaaactcccgaagaaggttacctggccaaaattttagtgccagccggtcagaaggacgttcccattggtaagctggtgtgcatcattgtcgagaacgaagcggacgtcgctgccttcaaggactacaaagacactggtgctccagcagccaagcctgctgcccctgctccaccagcagctgcagctgcacctccggtaccaactcccccaccggttgcggctgcaccgccaccaatggcagctgcccccgcaccgatgaccgccgttgaacagcgtggaccccgggtctacgctagtcctatggccaagaaacttgctgaacagcagcgactacgattggaaggccgaggatccggtctttatggctcactaacgtctaaggatcttgcaggtctgcaggcggctggtgcaccagaagcccgtgctgcagcggcaggagcacccagcgttccggccggggcagcctacgttgatattccggtgtcgaacattcgtggagtgatcgccaagcgattgcttgaatcgaagaccaccattccacactactacctcacggtggacgttaacatggacaaaatcaacaagctgcgatccaagttcaacaaacagctggagaatgatggcgtgaaattgtcgatcaacgatttcatcatcaaagcagctgccttggcttgcaaaaaggttcctgaggcgaactccgcatggatggacactgttatcagacagttcgacgccgtggatgtttcggtggcagtttctacagatcgtggtctcattacgcctatcgtgttcagtgccgatcgtaagggactgtccgatatttctaaggatgtcaagaacctggcggctaaggcgcgggacggtaaattgcaacctcaggaattccagggtggtaccttcagcgtatccaatctcggcatgttcggcgtgacgcacttctgcgccattatcaaccctccgcagagctgtattctggcggttggtggcacccagaaacggatcgtacctgataaggattcggaacaaggctggaaagagagtgactacgtagcggtaactctgagctgtgatcatcgcacggtggacggcgctgtcggtgctcgctggttgcagcatttccgtcagttcctagaagatccccattcaatgctgctgtaa

SEQ ID NO: 35449 - protein, 503 aa, Aedes aegypti
MLRTIAVRNEKLLLQGSRKVLRGTASRALSCEAARKCTVQKNSQKWTSTGSQMASLWQVNFVRGYCSNYPAHNKVLLPALSPTMELGTIVSWEKKEGDKLNEGDLLAEIETDKATMGFETPEEGYLAKILVPAGQKDVPIGKLVCIIVENEADVAAFKDYKDTGAPAAKPAAPAPPAAAAAPPVPTPPPVAAAPPPMAAAPAPMTAVEQRGPRVYASPMAKKLAEQQRLRLEGRGSGLYGSLTSKDLAGLQAAGAPEARAAAAGAPSVPAGAAYVDIPVSNIRGVIAKRLLESKTTIPHYYLTVDVNMDKINKLRSKFNKQLENDGVKLSINDFIIKAAALACKKVPEANSAWMDTVIRQFDAVDVSVAVSTDRGLITPIVFSADRKGLSDISKDVKNLAAKARDGKLQPQEFQGGTFSVSNLGMFGVTHFCAIINPPQSCILAVGGTQKRIVPDKDSEQGWKESDYVAVTLSCDHRTVDGAVGARWLQHFRQFLEDPHSMLL

SEQ ID NO: 35450 - DNA, 1299 bp, Arabidopsis thaliana
  CDS (1)..(1299)
atgacggtccgatctaagattcgtgaaattttcatgccggcgttatcatcaaccatgacggaaggcaaaatcgtgtcatggatcaaaacagaaggcgagaaactcgccaagggagagagtgttgtggttgttgaatctgataaagccgatatggatgtagaaacgttttacgatggttatcttgctgcgattgtcgtcggagaaggtgaaacagctccggttggtgctgcgattggattgttagctgagactgaagctgagatcgaagaagctaagagtaaagccgcttcgaaatcttcttcttctgtggctgaggctgtcgttccatctcctcctccggttacttcttctcctgctccggcgattgctcaaccggctccggtgacggcagtatcagatggtccgaggaagactgttgcgacgccgtatgctaagaagcttgctaaacaacacaaggttgatattgaatccgttgctggaactggaccattcggtaggattacggcttctgatgtggagacggcggctggaattgctccgtccaaatcctccatcgcaccaccgcctcctcctccacctccggtgacggctaaagcaaccaccactaatttgcctcctctgttacctgattcaagcattgttcctttcacagcaatgcaatctgcagtatctaagaacatgattgagagtctctctgttcctacattccgtgttggttatcctgtgaacactgacgctcttgatgcactttacgagaaggtgaagccaaagggtgtaacaatgacagctttattagctaaagctgcagggatggccttggctcagcatcctgtggtgaacgctagctgcaaagacgggaagagttttagttacaatagtagcattaacattgcagtggcggttgctatcaatggtggcctgattacgcctgttctacaagatgcagataagttggatttgtacttgttatctcaaaaatggaaagagctggtggggaaagctagaagcaagcaacttcaaccccatgaatacaactctggaacttttactttatcgaatctcggtatgtttggagtggatagatttgacgctattcttccgccaggacagggtgctattatggctgttggagcgtcaaagccaactgtagttgctgataaggatggattcttcagtgtaaaaaacacaatgctggtgaatgtgactgcagatcatcgcattgtgtatggagctgacttggctgcttttctccaaacctttgcaaagatcattgagaatccagatagtttgaccttataa

SEQ ID NO: 35451 - protein, 432 aa, Arabidopsis thaliana
MTVRSKIREIFMPALSSTMTEGKIVSWIKTEGEKLAKGESVVVVESDKADMDVETFYDGYLAAIVVGEGETAPVGAAIGLLAETEAEIEEAKSKAASKSSSSVAEAVVPSPPPVTSSPAPAIAQPAPVTAVSDGPRKTVATPYAKKLAKQHKVDIESVAGTGPFGRITASDVETAAGIAPSKSSIAPPPPPPPPVTAKATTTNLPPLLPDSSIVPFTAMQSAVSKNMIESLSVPTFRVGYPVNTDALDALYEKVKPKGVTMTALLAKAAGMALAQHPVVNASCKDGKSFSYNSSINIAVAVAINGGLITPVLQDADKLDLYLLSQKWKELVGKARSKQLQPHEYNSGTFTLSNLGMFGVDRFDAILPPGQGAIMAVGASKPTVVADKDGFFSVKNTMLVNVTADHRIVYGADLAAFLQTFAKIIENPDSLTL

SEQ ID NO: 35452 - DNA, 1224 bp, Pseudomonas putida
  CDS (1)..(1224): transl_table=11
atggctatcgagatcaaagccccaaccttcccggaatcggttgccgatggcaccgttgccacctggcacaagcagccgggcgaagccgtcaagcgtgacgagctgatcgtcgacatcgagaccgacaaggtcgtcctggaagtgctggccaccgccgacggcgtgctgggcgccatcgtcaagggcgagggcgacaccgtcctgtccgatgaagtgctgggttcgatcgttgaaggcggcgctgccgccgctgcacctgctgctgccccggccgctgctgctccggctgccgctgctgccgatgctggcgaagacgacccgatcgctgccccggccgcgcgcaagctggctgaagaaaacggcatcgacctggctgccgttaccggcactggcaaaggtggccgcatcaccaaggaagacgtcgtagctgccgtcgccaacaagaagtcggcgcctgccgctgccccggctgccaagcctgctgccgctgctgctgccccggttgtcgtcgccgctggtgaccgcaccgagaagcgcgtgccgatgacccgcctgcgtgccaagatcgccgagcgtctggtcgaagcccagtcgagcatggccatgctgaccaccttcaacgaagtggacatgaccgaagtcatggccctgcgttcgaagtacaaggacctgttcgagaagacccacaacggcgtacgcctgggcttcatgtcgttcttcgtcaaggccgccaccgaagccctgaagcgcttcccggctgtcaacgcctcgatcgacggcaacgacatcgtctatcacggctacgccgacgtcggtgttgccgtgtccagcgaccgtggcctggtggtaccggtactgcgtaatgccgagtcgatgagcctggctgaaatcgagaacggcatcgccaccttcggcaagaaggcccgtgacggcaagctggccatcgaagagatgaccggtggcaccttcaccatcaccaacggtggtaccttcggttcgatgatgtcgaccccgatcgtcaacccgccgcaggccgctatcctcggcatgcacaacatcatccagcgtccgatggccatcaatggccaggtcgtgattcgcccgatgatgtacctggcgctgtcgtacgatcaccgcctgatcgatggcaaggaagcggtaaccttcctggtcaccatcaagaacctgctggaagatccgtctcgcctgctgctggacatctaa

SEQ ID NO: 35453 - protein, 407 aa, Pseudomonas putida
MAIEIKAPTFPESVADGTVATWHKQPGEAVKRDELIVDIETDKVVLEVLATADGVLGAIVKGEGDTVLSDEVLGSIVEGGAAAAAPAAAPAAAAPAAAAADAGEDDPIAAPAARKLAEENGIDLAAVTGTGKGGRITKEDVVAAVANKKSAPAAAPAAKPAAAAAAPVVVAAGDRTEKRVPMTRLRAKIAERLVEAQSSMAMLTTFNEVDMTEVMALRSKYKDLFEKTHNGVRLGFMSFFVKAATEALKRFPAVNASIDGNDIVYHGYADVGVAVSSDRGLVVPVLRNAESMSLAEIENGIATFGKKARDGKLAIEEMTGGTFTITNGGTFGSMMSTPIVNPPQAAILGMHNIIQRPMAINGQVVIRPMMYLALSYDHRLIDGKEAVTFLVTIKNLLEDPSRLLLDI

SEQ ID NO: 35454 - DNA, 1839 bp, Streptomyces seoulensis
  CDS (1)..(1839): transl_table=11
atggcggtttccgtaacccttccggcgctcggtgagagcgtcaccgagggcactgtcacccgctggctgaaggccgagggcgagcgcgtcgaggccgacgagccgctgctcgaggtgtcgaccgacaaggtcgacaccgagatcccctcgcccgtcgccggtgtactggcctcgatcaaggtcgccgaggacgagaccgtcgaggtcggcgccgagctggccctgatcgacgacggctccggcgcccccgctgctgaggctcccgcggccgaggcccccgccgccgaggctccggccccggccgccgaggaggccccgcagtccgccccgtccaccgagcaggaggcgcccgccgaggcgccgaccgccgaggcggcctccggcggcggttccgccgagggcaccgacgtggtcctgcccgcgctgggcgagtcggtcaccgagggcaccgtcacccgctggctgaagtcggtgggcgactccgtcgaggccgacgagccgctgctcgaggtctccacggacaaggtcgacaccgagatcccggcgcccacctcgggcaccctgctggagatcgtggtcggcgaggacgagaccgccgaggtcggcgccaagctcgccgtcatcggtgccgcgggtgccgccccggccgccgctccggaggccccgaaggcgcccgccgccgaggccccggccgctccggccccggctgccccggctccggccgcccccgccgccccggccccgcaggcgcccgccccgcaggccccgtcggctccggcgccgcagcagcagaccgcgccggctcccgacccggccccggccgccccggctccggctccggctcccgcgcccgcccaggctccggccgccgcgccgagcgcgccgaccgccacccaggcgaccgacgagggcgcctacgtgaccccgctggtgcgcaagctcgccgccgagagcagcgtcgatctggcctcggtcaagggcaccggtgtcggtggccgcatccgcaagcaggacgtcatcgccgccgccgaggccgcgaaggccgccgccgccccggctccggccgcggcgcaggctccggccgccgcgaagaaggctccggcgctggaggcttccccgctgcgtggccagaccgtcaagatgacccgcatccgcaaggtcatcggcgacaacatggtcaaggcgctgaccgagcaggcccagctctcctcggtcgtcgaggtcgacgtcacccgtctgatgaagctgcgcggcaaggcgaaggactccttcgcggcccgtgagggcgtcaagctctccccgatgccgttcttcgtcaaggccgccgcgcaggcgctgaaggcccacccggtcatcaacgcccgcatcaacgaggccgagggcaccatcacctacttcgacaccgagaacgtcggtatcgcggtggactccgagaagggcctgatgaccccggtcatcaagcacgccggtgacctcaacctcgcgggcatcgccaaggcgaccgcggagctggccggcaaggtccgcgccaacaagatcaccccggacgagctgtccggcgcgaccttcaccatctccaacaccggttcgcgcggcgccctgttcgacacgatcatcgtgccgccgaaccaggtcgccatcctcggcatcggcgccacggtgaagcgcccggccgtcctggagacggaggagggcacggtcatcgccgtccgcgacatgacctacctgaccctctcctacgaccaccgtctggtcgacggcgccgacgcggcccgctacctgaccacggtcaagcagatcctggaagcaggcgagttcgaggtagagctcggcctgtaa

SEQ ID NO: 35455 - protein, 612 aa, Streptomyces seoulensis
MAVSVTLPALGESVTEGTVTRWLKAEGERVEADEPLLEVSTDKVDTEIPSPVAGVLASIKVAEDETVEVGAELALIDDGSGAPAAEAPAAEAPAAEAPAPAAEEAPQSAPSTEQEAPAEAPTAEAASGGGSAEGTDVVLPALGESVTEGTVTRWLKSVGDSVEADEPLLEVSTDKVDTEIPAPTSGTLLEIVVGEDETAEVGAKLAVIGAAGAAPAAAPEAPKAPAAEAPAAPAPAAPAPAAPAAPAPQAPAPQAPSAPAPQQQTAPAPDPAPAAPAPAPAPAPAQAPAAAPSAPTATQATDEGAYVTPLVRKLAAESSVDLASVKGTGVGGRIRKQDVIAAAEAAKAAAAPAPAAAQAPAAAKKAPALEASPLRGQTVKMTRIRKVIGDNMVKALTEQAQLSSVVEVDVTRLMKLRGKAKDSFAAREGVKLSPMPFFVKAAAQALKAHPVINARINEAEGTITYFDTENVGIAVDSEKGLMTPVIKHAGDLNLAGIAKATAELAGKVRANKITPDELSGATFTISNTGSRGALFDTIIVPPNQVAILGIGATVKRPAVLETEEGTVIAVRDMTYLTLSYDHRLVDGADAARYLTTVKQILEAGEFEVELGL

SEQ ID NO: 35456 - DNA, 1275 bp, Bacillus subtilis
  CDS (1)..(1275): transl_table=11
atggcaattgaacaaatgacgatgccgcagcttggagaaagcgtaacagaggggacgatcagcaaatggcttgtcgcccccggtgataaagtgaacaaatacgatccgatcgcggaagtcatgacagataaggtaaatgcagaggttccgtcttcttttactggtacgataacagagcttgtgggagaagaaggccaaaccctgcaagtcggagaaatgatttgcaaaattgaaacagaaggcgcgaatccggctgaacaaaaacaagaacagccagcagcatcagaagccgctgagaaccctgttgcaaaaagtgctggagcagccgatcagcccaataaaaagcgctactcgccagctgttctccgtttggccggagagcacggcattgacctcgatcaagtgacaggaactggtgccggcgggcgcatcacacgaaaagatattcagcgcttaattgaaacaggcggcgtgcaagaacagaatcctgaggagctgaaaacagcagctcctgcaccgaagtctgcatcaaaacctgagccaaaagaagagacgtcatatcctgcgtctgcagccggtgataaagaaatccctgtcacaggtgtaagaaaagcaattgcttccaatatgaagcgaagcaaaacagaaattccgcatgcttggacgatgatggaagtcgacgtcacaaatatggttgcatatcgcaacagtataaaagattcttttaagaagacagaaggctttaatttaacgttcttcgccttttttgtaaaagcggtcgctcaggcgttaaaagaattcccgcaaatgaatagcatgtgggcgggggacaaaattattcagaaaaaggatatcaatatttcaattgcagttgccacagaggattctttatttgttccggtgattaaaaacgctgatgaaaaaacaattaaaggcattgcgaaagacattaccggcctagctaaaaaagtaagagacggaaaactcactgcagatgacatgcagggaggcacgtttaccgtcaacaacacaggttcgttcgggtctgttcagtcgatgggcattatcaactaccctcaggctgcgattcttcaagtagaatccatcgtcaaacgcccggttgtcatggacaatggcatgattgctgtcagagacatggttaatctgtgcctgtcattagatcacagagtgcttgacggtctcgtgtgcggacgattcctcggacgagtgaaacaaattttagaatcgattgacgagaagacatctgtttactaa

SEQ ID NO: 35457 - protein, 424 aa, Bacillus subtilis
MAIEQMTMPQLGESVTEGTISKWLVAPGDKVNKYDPIAEVMTDKVNAEVPSSFTGTITELVGEEGQTLQVGEMICKIETEGANPAEQKQEQPAASEAAENPVAKSAGAADQPNKKRYSPAVLRLAGEHGIDLDQVTGTGAGGRITRKDIQRLIETGGVQEQNPEELKTAAPAPKSASKPEPKEETSYPASAAGDKEIPVTGVRKAIASNMKRSKTEIPHAWTMMEVDVTNMVAYRNSIKDSFKKTEGFNLTFFAFFVKAVAQALKEFPQMNSMWAGDKIIQKKDINISIAVATEDSLFVPVIKNADEKTIKGIAKDITGLAKKVRDGKLTADDMQGGTFTVNNTGSFGSVQSMGIINYPQAAILQVESIVKRPVVMDNGMIAVRDMVNLCLSLDHRVLDGLVCGRFLGRVKQILESIDEKTSVY

SEQ ID NO: 35458 - DNA, 1272 bp, Pseudomonas putida
  CDS (1)..(1272): transl_table=11
atgggcacgcacgtcatcaagatgccggacattggcgaaggcatcgcgcaggtcgaattggtggaatggttcgtcaaggtgggcgacatcatcgccgaggaccaagtggtagccgacgtcatgaccgacaaggccaccgtggaaatcccgtcgccggtcagcggcaaggtgctggccctgggtggccagccaggtgaagtgatggcggtcggcagtgagctgatccgcatcgaagtggaaggcagcggcaaccatgtggatgtgccgcaagccaagccggccgaagtgcctgcggcaccggtagccgctaaacctgaaccacagaaagacgttaaaccggcggcgtaccaggcgtcagccagccacgaggcagcgcccatcgtgccgcgccagccgggcgacaagccgctggcctcgccggcggtgcgcaaacgcgccctcgatgccggcatcgaattgcgttatgtgcacggcagcggcccggccgggcgcatcctgcacgaagacctcgacgcgttcatgagcaaaccgcaaagcgctgccgggcaaacccccaatggctatgccaggcgcaccgacagcgagcaggtgccggtgatcggcctgcgccgcaagatcgcccagcgcatgcaggacgccaagcgccgggtcgcgcacttcagctatgtggaagaaatcgacgtcaccgccctggaagccctgcgccagcagctcaacagcaagcacggcgacagccgcggcaagctgacactgctgccgttcctggtgcgcgccctggtcgtggcactgcgtgacttcccgcagataaacgccacctacgatgacgaagcgcagatcatcacccgccatggcgcggtgcatgtgggcatcgccacccaaggtgacaacggcctgatggtacccgtgctgcgccacgccgaagcgggcagcctgtgggccaatgccggtgagatttcacgcctggccaacgctgcgcgcaacaacaaggccagccgcgaagagctgtccggttcgaccattaccctgaccagcctcggcgccctgggcggcatcgtcagcacgccggtggtcaacaccccggaagtggcgatcgtcggtgtcaaccgcatggttgagcggcccgtggtgatcgacggccagatcgtcgtgcgcaagatgatgaacctgtccagctcgttcgaccaccgcgtggtcgatggcatggacgccgccctgttcatccaggccgtgcgtggcctgctcgaacaacccgcctgcctgttcgtggagtga

SEQ ID NO: 35459 - protein, 423 aa, Pseudomonas putida
MGTHVIKMPDIGEGIAQVELVEWFVKVGDIIAEDQVVADVMTDKATVEIPSPVSGKVLALGGQPGEVMAVGSELIRIEVEGSGNHVDVPQAKPAEVPAAPVAAKPEPQKDVKPAAYQASASHEAAPIVPRQPGDKPLASPAVRKRALDAGIELRYVHGSGPAGRILHEDLDAFMSKPQSAAGQTPNGYARRTDSEQVPVIGLRRKIAQRMQDAKRRVAHFSYVEEIDVTALEALRQQLNSKHGDSRGKLTLLPFLVRALVVALRDFPQINATYDDEAQIITRHGAVHVGIATQGDNGLMVPVLRHAEAGSLWANAGEISRLANAARNNKASREELSGSTITLTSLGALGGIVSTPVVNTPEVAIVGVNRMVERPVVIDGQIVVRKMMNLSSSFDHRVVDGMDAALFIQAVRGLLEQPACLFVE

SEQ ID NO: 35460 - DNA, 1200 bp, Azotobacter vinelandii
  CDS (1)..(1200): transl_table=11
atggctatcgatatcaaagccccgactttcccggaatcgatcgcggacggcaccgtcgccacctggcacaaaaagcccggcgaaccggtcaagcgtgacgagctgatcgtcgacatcgaaaccgacaaggtcgtgatggaagtgcttgctgaagcggacggcgtgatcgccgagatcgtcaagaacgaaggcgacaccgtgctcagcggcgaactgctcggcaagctgaccgaaggtggtgcggccaccgccgctccggctgctgccccggctccggctgccgccgctccggccgctgccgaagcgccgatcctgtccccggccgcccgcaagatcgccgaggaaaacgccatcgctgccgacagcatcaccggtaccggcaagggcggtcgcgtgaccaaggaagacgcggtcgccgccgcggaagccaagaagtccgctcctgccggccagccggcgcccgccgccaccgccgctccgctgttcgcggccggcgatcgcgtcgagaagcgcgtgccgatgacccgcctgcgcgccaaggtcgccgagcgcctggtcgaggcccagtcctccatggccatgctgacgaccttcaacgaagtcaacatgaagccggtcatggagctgcgcgccaagtacaaggatctgttcgagaagacccacaacggcgtgcgcctgggcttcatgtccttcttcgtcaaggccgctgtcgaagccctgaagcgccagccgggcgtcaacgcctccatcgacggtaacgacatcgtctaccacggctaccaggacatcggcgtggccgtttccagcgatcgtggtctggtggtgccggtgctgcgcaacgccgagttcatgagcctggccgagatcgaaggtggcatcaacgagttcggcaagaaggccaaggccggcaagctgaccatcgaggaaatgaccggcggcaccttcaccatctccaacggtggcgtgttcggttccctgctctcgactccgatcgtcaacccgccgcagaccgccatcctcggcatgcacaagatccaggagcgtccgatggccgtcaatggtcaggtcgtcatcctgccgatgatgtatcttgccctgtcctacgatcaccgtttgatcgatggcaaggaggccgttaccttcctggtgaccatgaaggatctcctggaagacccggctcgcctgctgctggacgtctga

SEQ ID NO: 35461 - protein, 399 aa, Azotobacter vinelandii
MAIDIKAPTFPESIADGTVATWHKKPGEPVKRDELIVDIETDKVVMEVLAEADGVIAEIVKNEGDTVLSGELLGKLTEGGAATAAPAAAPAPAAAAPAAAEAPILSPAARKIAEENAIAADSITGTGKGGRVTKEDAVAAAEAKKSAPAGQPAPAATAAPLFAAGDRVEKRVPMTRLRAKVAERLVEAQSSMAMLTTFNEVNMKPVMELRAKYKDLFEKTHNGVRLGFMSFFVKAAVEALKRQPGVNASIDGNDIVYHGYQDIGVAVSSDRGLVVPVLRNAEFMSLAEIEGGINEFGKKAKAGKLTIEEMTGGTFTISNGGVFGSLLSTPIVNPPQTAILGMHKIQERPMAVNGQVVILPMMYLALSYDHRLIDGKEAVTFLVTMKDLLEDPARLLLDV

SEQ ID NO: 35462 - DNA, 1329 bp, Bacillus subtilis
  CDS (1)..(1329): transl_table=11
gtggcatttgaatttaaacttccagatatcggggaaggtatccacgaaggcgaaatcgtaaaatggtttgtcaagcctaacgacgaggtagacgaagatgatgtactggctgaagtccaaaatgataaagcagtagtagaaattccttcacctgttaaaggaaaagtattagaattaaaagttgaagagggaacggttgcaactgttggacaaacgattattacgtttgatgcacctggttacgaagatcttcaatttaaaggcagcgacgagtctgacgatgcgaaaactgaagcacaagttcagtcaactgcagaagctggacaagacgttgcgaaagaagagcaagctcaagagcctgcaaaagctactggcgcaggacagcaggatcaagctgaagttgacccgaacaaacgcgtgatcgctatgccttccgtacgtaaatatgcacgtgaaaaaggtgtagacatccgtaaggttactggttcaggcaacaacggacgtgttgtaaaagaagatatcgacagctttgtaaacggaggagcgcaagaagctgcaccgcaagaaacagctgcaccacaagaaacagctgctaaaccggctgctgcaccagctccagagggcgaattcccagaaacacgcgaaaaaatgagcggtatccgtaaagcaattgcaaaagcgatggttaactctaaacacactgctcctcacgtaacgttaatggacgaagtggacgtaacaaaccttgttgcacatcgtaaacagttcaaacaggttgctgctgatcaaggaatcaagctgacttacttgccttacgttgtaaaagctcttacatctgcactgaaaaaattccctgttttaaacacgtcaattgacgataaaacagatgaagtcatccaaaaacattacttcaacatcggtatcgctgctgacactgaaaaaggcttgcttgtaccggttgtgaaaaatgcagatcgtaaatctgtctttgaaatttctgatgaaatcaatggccttgcaacaaaagctcgtgaaggcaagcttgctccagctgaaatgaaaggcgcatcttgcacaattacaaacatcggttctgccggcggacaatggttcactccggttatcaaccatccagaagttgcgattcttggtatcggacgcattgcagaaaaagcgattgttcgtgatggcgaaatcgtagcagctccagtcttagctctttctctcagcttcgaccaccgtatgatcgacggagcaactgcgcaaaatgcattaaatcacatcaagcgtttactgaacgatccacaattaattttaatggaggcgtaa

SEQ ID NO: 35463 - protein, 442 aa, Bacillus subtilis
MAFEFKLPDIGEGIHEGEIVKWFVKPNDEVDEDDVLAEVQNDKAVVEIPSPVKGKVLELKVEEGTVATVGQTIITFDAPGYEDLQFKGSDESDDAKTEAQVQSTAEAGQDVAKEEQAQEPAKATGAGQQDQAEVDPNKRVIAMPSVRKYAREKGVDIRKVTGSGNNGRVVKEDIDSFVNGGAQEAAPQETAAPQETAAKPAAAPAPEGEFPETREKMSGIRKAIAKAMVNSKHTAPHVTLMDEVDVTNLVAHRKQFKQVAADQGIKLTYLPYVVKALTSALKKFPVLNTSIDDKTDEVIQKHYFNIGIAADTEKGLLVPVVKNADRKSVFEISDEINGLATKAREGKLAPAEMKGASCTITNIGSAGGQWFTPVINHPEVAILGIGRIAEKAIVRDGEIVAAPVLALSLSFDHRMIDGATAQNALNHIKRLLNDPQLILMEA

SEQ ID NO: 35464 - DNA, 1344 bp, Rhizobium meliloti
  CDS (1)..(1344): transl_table=11
atgccaatcaacatcaccatgccggccctctccccgaccatggaagaaggcaatctggccaagtggctggtcaaggaaggcgacaaggtcaagtccggcgatgtgatcgccgagatcgagaccgacaaggcgacgatggaagtggaagccgtcgatgagggcacggtcgccaagatcgtcgttcccgccggcactgaaggcgtcaaggtcaatgcgctgatcgcggttctcgccgccgagggcgaagacgtcgcgactgccgccaagggcggcaacggtgcagcgggagcagtcccggcaccgaagccgaaggaaacggccgaaacggcaccggccgcggctccggcacccgccgcagcgccggcaccgcaagctgctgctccggcttctcctgcgcccgccgatggcgaaggcaagcgcatcttttcgtcgccgctggcacgccgcctcgcgaaggaggcaggcatcgacctttcggcgatcgccggttccggaccgcatggccgcgtcgtcaagaaggacgtcgagacagccgtttccggtggcgccgccaagcccgccggcgcgccggcagcagctccggccccggcgacgctcgctaagggcatgtcggaggacgccgtcctcaagctcttcgagccaggctcctacgaactcgtgccgcatgacggcatgcgcaagacgatcgccaagcgcctcgtcgaatcgaagcagacgatcccgcatttctatgtttcggtcgattgcgagctcgacgcgcttatggcgctgcgcgcccagctgaatgccgcagcacctgaaaaggatggtaagccggtctacaagctttccgtgaacgacatggtgatcaaggcgcttgctctggcgctgcgcgacgttccggatgcgaatgtgtcctggaccgatcagaacatggtcaagcacaagcacgcggacgtcggcgtggccgtctccatccccggcggcctgatcacgcccatcgtccgccaggcggagttgaagagcctctcggcgatctccaacgagatgaaggatctcggcaagcgcgcgaaggagcgcaagctgaagccggaagaatatcagggcggcaccacggccgtctccaatatgggcatgatgggcgtcaaggacttcgccgccgtcgtcaatccgccgcacgcgacgatcctcgcggtcggcgccggcgaggaccgtgtcgtcgtcaggaacaaggaaatggtcatcgccaatgtgatgaccgtcacgctttcgaccgaccatcgctgcgtcgatggcgcgctcggcgccgaactgctcgccgccttcaagcgctacatcgaaaacccgatgggtatgctcgtctga

SEQ ID NO: 35465 - protein, 447 aa, Rhizobium meliloti
MPINITMPALSPTMEEGNLAKWLVKEGDKVKSGDVIAEIETDKATMEVEAVDEGTVAKIVVPAGTEGVKVNALIAVLAAEGEDVATAAKGGNGAAGAVPAPKPKETAETAPAAAPAPAAAPAPQAAAPASPAPADGEGKRIFSSPLARRLAKEAGIDLSAIAGSGPHGRVVKKDVETAVSGGAAKPAGAPAAAPAPATLAKGMSEDAVLKLFEPGSYELVPHDGMRKTIAKRLVESKQTIPHFYVSVDCELDALMALRAQLNAAAPEKDGKPVYKLSVNDMVIKALALALRDVPDANVSWTDQNMVKHKHADVGVAVSIPGGLITPIVRQAELKSLSAISNEMKDLGKRAKERKLKPEEYQGGTTAVSNMGMMGVKDFAAVVNPPHATILAVGAGEDRVVVRNKEMVIANVMTVTLSTDHRCVDGALGAELLAAFKRYIENPMGMLV

SEQ ID NO: 35466 - DNA, 1914 bp, Arabidopsis thaliana
  CDS (1)..(1914)
atggtgcttccgctcttccggcgcgctgcgatcgcccggacttcctcgcttctcagagctcgtcttttcgctcctgcctccgaattccattctcgcttttctaatggactataccacttggacgacaaaattagtagcagtaatggtgtgaggtctgcctctatagacttgattacaagaatggatgatagttctccaaagcccattctgcgatttggcgtgcaaaacttttcatctacaggacccatatcacagacggttcttgcaatgccagccttgtctcctactatgagtcatggaaatgttgtaaaatggatgaagaaagaaggtgacaaggtagaggtgggtgatgtactatgtgagatagagacagacaaagccactgtagaatttgagagtcaagaggaaggatttctggccaagattttagtcactgaaggatcaaaggatatccctgttaatgaaccgattgcaataatggttgaggaggaagacgacattaaaaacgttcctgctaccatagagggtggacgagatggtaaagaggaaacatcagctcatcaagtgatgaaacctgacgaaagcacacaacaaaaaagttccattcagcccgatgcatcagatcttcccccacatgtcgtcttagaaatgccagcactttctcctacaatgaaccaaggtaatattgccaaatggtggaaaaaagagggtgacaagattgaagtgggtgatgtcataggtgagatcgagactgacaaagccactctggaatttgaaagccttgaagaggggtacttagctaagattctaattcctgaaggttccaaggatgtggcggtgggaaagccgattgccctaatagttgaagatgctgaaagtattgaagccatcaagtcttcttccgcaggtagttctgaggttgatacagttaaagaagtccctgacagtgttgtagataaacctacagagaggaaagcaggcttcacaaagatcagtcctgctgcaaagctattgattttagaacatggattggaggcatcatcaattgaggcatcgggtccctatggtacattattgaaatcagacgttgtggccgcaattgcttctggaaaagcttctaaatcatctgcgtctacgaagaagaagcaaccatcaaaggagaccccgtctaaatcctcctccacatcgaagccttctgtgacacagtcagataataattatgaagattttccaaatagtcaaattcgcaagattatagcaaaacgtttattggaatcaaaacagaagataccccatttgtatttacaatcagatgttgtattggatcctcttcttgcatttagaaaagaacttcaagaaaaccatggcgttaaagtgtctgtcaatgacatagttattaaagcagtggcagtcgcactgaggaatgtacgacaagctaatgctttctgggatgctgagaaaggagatatcgttatgtgtgacagtgttgacatatcaattgcagttgcaactgagaagggcttaatgactccaattatcaagaatgcagaccagaaatctatttctgctatttccttagaggttaaggagctggcacaaaaggctcgatctggaaagcttgctcctcatgagtttcaaggagggacattcagcatatcaaatctaggaatgtatcctgtggataatttctgcgcaatcattaacccccctcaggctgggattctagcagttggtagaggaaacaaagtggttgagccagttattggactagatggaattgagaagccttctgttgtgacaaaaatgaatgtaacgttatccgctgatcatcggatctttgatggacaagttggagcttcgtttatgtctgaattgcgttcaaactttgaggatgttcgaagacttcttctgtga

SEQ ID NO: 35467 - protein, 637 aa, Arabidopsis thaliana
MVLPLFRRAAIARTSSLLRARLFAPASEFHSRFSNGLYHLDDKISSSNGVRSASIDLITRMDDSSPKPILRFGVQNFSSTGPISQTVLAMPALSPTMSHGNVVKWMKKEGDKVEVGDVLCEIETDKATVEFESQEEGFLAKILVTEGSKDIPVNEPIAIMVEEEDDIKNVPATIEGGRDGKEETSAHQVMKPDESTQQKSSIQPDASDLPPHVVLEMPALSPTMNQGNIAKWWKKEGDKIEVGDVIGEIETDKATLEFESLEEGYLAKILIPEGSKDVAVGKPIALIVEDAESIEAIKSSSAGSSEVDTVKEVPDSVVDKPTERKAGFTKISPAAKLLILEHGLEASSIEASGPYGTLLKSDVVAAIASGKASKSSASTKKKQPSKETPSKSSSTSKPSVTQSDNNYEDFPNSQIRKIIAKRLLESKQKIPHLYLQSDVVLDPLLAFRKELQENHGVKVSVNDIVIKAVAVALRNVRQANAFWDAEKGDIVMCDSVDISIAVATEKGLMTPIIKNADQKSISAISLEVKELAQKARSGKLAPHEFQGGTFSISNLGMYPVDNFCAIINPPQAGILAVGRGNKVVEPVIGLDGIEKPSVVTKMNVTLSADHRIFDGQVGASFMSELRSNFEDVRRLLL

SEQ ID NO: 35468 - DNA, 1620 bp, Arabidopsis thaliana
  CDS (1)..(1620)
atggcttctcgtatcatcaatcattccaaaaagttgaaacatgtttccgctttactgcggcgtgaccatgctgtggcagtccgctgtttctccaacagtacccacccctctctcgttggaagagaagatatcttcaaggcccgcctgaattattcctctgtagagagaatttcaaaatgtggtactggcaatgtaacaatgcttagtggtatttcaacaacgagcacaaaactaagcagcccaatggcaggaccaaaactatttaaagaatttataagctcccagatgcgatcagtgagaggattttcatccagttcagatcttcctcctcatcaagagattggaatgccttctctttcgccaacaatgactgagggtaacattgccaggtggctgaagaaagaaggtgataaagttgctcctggtgaagtgctttgtgaagttgaaactgacaaagcaacagtcgaaatggaatgcatggaagagggttttctcgccaagatagtaaaggaggagggggcaaaagaaattcaagttggggaggtgattgctatcacagttgaagatgaagatgatattcaaaagtttaaagattacacaccctcatccgatactggtcccgctgcgcctgaagcaaaaccagctccttccctaccaaaggaagagaaggtagagaagccagccagtgctcctgaagccaagatctctaagccaagctcagctccttcagaagatcgtatttttgccagtcctcttgcaagaaagttggctgaagataataatgtacctctctcaagcattaaaggcacaggtcctgaaggacggatagtgaaggctgatgtcgaagatttcttagcttcaggcagtaaagaaactactgccaaaccttccaagcaagtggattcaaaggttccagctcttgactatgttgacatccctcacactcagatacgaaaggtcacagcctcacgtttggcattctcaaagcaaactattcctcactactacttgaccgtggatacatgtgttgacaaaatgatgggtcttaggagtcaactcaattcatttcaagaggcttccggtgggaaaaggatatctgtaaatgatcttgttattaaggctgctgcactggctcttcgaaaagttcctcagtgcaatagttcatggacagatgaatacatccgccaatttaaaaatgtgaacatcaatgtcgctgtacaaacagaaaatgggctctacgttcctgtggtcaaggacgcggacaagaaaggactgtctacaattggagaagaggttcgattcttggctcaaaaagcaaaagaaaacagcttgaagccggaagattatgagggaggaacattcacagtctccaacctggggggaccttttggcatcaaacagttctgtgccgtcatcaatccacctcaagcagccattctagcaatcggatctgctgaaaagagagttgttcccggtactggtccagaccaatacaacgttgcttcatacatgtctgtaacactaagctgtgaccaccgcgtaatagatggtgcaattggagccgagtggctgaaagcattcaagggctacatcgagaccccagaatctatgttgctctaa

SEQ ID NO: 35469 - protein, 539 aa, Arabidopsis thaliana
MASRIINHSKKLKHVSALLRRDHAVAVRCFSNSTHPSLVGREDIFKARLNYSSVERISKCGTGNVTMLSGISTTSTKLSSPMAGPKLFKEFISSQMRSVRGFSSSSDLPPHQEIGMPSLSPTMTEGNIARWLKKEGDKVAPGEVLCEVETDKATVEMECMEEGFLAKIVKEEGAKEIQVGEVIAITVEDEDDIQKFKDYTPSSDTGPAAPEAKPAPSLPKEEKVEKPASAPEAKISKPSSAPSEDRIFASPLARKLAEDNNVPLSSIKGTGPEGRIVKADVEDFLASGSKETTAKPSKQVDSKVPALDYVDIPHTQIRKVTASRLAFSKQTIPHYYLTVDTCVDKMMGLRSQLNSFQEASGGKRISVNDLVIKAAALALRKVPQCNSSWTDEYIRQFKNVNINVAVQTENGLYVPVVKDADKKGLSTIGEEVRFLAQKAKENSLKPEDYEGGTFTVSNLGGPFGIKQFCAVINPPQAAILAIGSAEKRVVPGTGPDQYNVASYMSVTLSCDHRVIDGAIGAEWLKAFKGYIETPESMLL

SEQ ID NO: 35470 - DNA, 1644 bp, Glycine max
  CDS (1)..(1644)
atggcatctcatttactcaatcactcgtccaagatgagaaatgcttccaagttgctgcaccacgaacgcgctcttttggttcgttggttttccggcgatgctcaatcctctctcaaccgaaaccgcgatgtgtggaaaactcaattccacgagtcttcaacaacaagaagtgtctttgaaccggcctccagctttaataaacgttcatttggtatgcagaagagaaacatctccatggctaccattaaaagaggttccattatcgggtttgggttcaatggagaaatttcgcgaagttcacaggtgctgtcaaggagatgctatgcgtcagcctcagatctccccccacaccaggaaattggaatgccttctctctcacctacaatgacagagggtaacattgcaagatggttgaagaaagaaggtgataaaatctctcctggtgaagtgctctgtgaagttgaaactgataaagccactgttgaaatggaatgtatggaggaaggttttctggccaagataatccgtggggatggggcaaaagaaattaaagttggtgaggtaattgccgtaactgttgaagatgaaggggatattgcaaaattcaaagattaccaaccttcagcatctgaaccaagtgaaccccctgccaaagaaacatctgccccacctccaccaaagaaagaagaggtggtagaggagcctgcccgagaacctgagccaaaggtttctaaacccagtgcaccaccttcatctggagatcgcacatttgctagtccccttgctcgaaaattggctgaagagaaaaatgtacctctctctagcattaaaggaacaggacctgaagggctcattgtcaaggccgacattgatgattacttggcttctggtgctaaagaagtttcggcatcctccaaggccaaggttgcagcagatgcagcattggattataccgacattcctgtctctcagatacggaaggtcacagcttcacggttattattatcaaaacaaactatccctcattactatttaacagtagatacatgcgttgataaactcatgagcttgcggacccaactcaattcattgcaagaagcctctggtggctctcgcatatcagttaatgaccttgtaatcaaggctgctgctttggctctccgtaaagttcctcaatgtaacagttcatgggcaaatgattatattcgccagtatcataatgtgaatattaatgttgctgtgcagacagataatgggctctttgttccagttgtcagggatgcagacaagaaaggcctctctaaaataggggaagaggtcaaacaattggcaaagaaagccaaagaaaacagcttgaaaccccaagaatatgagggaggtacatttacagtgactaacctgggagggccatttggtgtcaaacaattctgtgcaatcatcaatcctcctcaggcaggcattcttgccgttggatctgctgagaggagggtcgttccgggttcgggtgctgaagaattcaagtttgcttccttcatgtctgtgaccctcagctgtgatcatcgtgttatagatggtgcaattggtgccgaatggttaaaagcattcaaaggctatattgaaaatccagagaccatgttgttgtaa

SEQ ID NO: 35471 - protein, 547 aa, Glycine max
MASHLLNHSSKMRNASKLLHHERALLVRWFSGDAQSSLNRNRDVWKTQFHESSTTRSVFEPASSFNKRSFGMQKRNISMATIKRGSIIGFGFNGEISRSSQVLSRRCYASASDLPPHQEIGMPSLSPTMTEGNIARWLKKEGDKISPGEVLCEVETDKATVEMECMEEGFLAKIIRGDGAKEIKVGEVIAVTVEDEGDIAKFKDYQPSASEPSEPPAKETSAPPPPKKEEVVEEPAREPEPKVSKPSAPPSSGDRTFASPLARKLAEEKNVPLSSIKGTGPEGLIVKADIDDYLASGAKEVSASSKAKVAADAALDYTDIPVSQIRKVTASRLLLSKQTIPHYYLTVDTCVDKLMSLRTQLNSLQEASGGSRISVNDLVIKAAALALRKVPQCNSSWANDYIRQYHNVNINVAVQTDNGLFVPVVRDADKKGLSKIGEEVKQLAKKAKENSLKPQEYEGGTFTVTNLGGPFGVKQFCAIINPPQAGILAVGSAERRVVPGSGAEEFKFASFMSVTLSCDHRVIDGAIGAEWLKAFKGYIENPETMLL

SEQ ID NO: 35472 - DNA, 1365 bp, Zea mays
  CDS (1)..(1365)
atggcgtctctgatttctccctgcctctccgttcccaccgccccggggcccgcgcgccttgctgctccggggacgccgcggcggaggaggatggcggtggtgagggcgaagattcgggagatattcatgccggcgctgagctcaacgatgatggagggcaagatcgtctcctggacggccgccgagggggaccgcgtggccaagggcgacccagtggtggtcgtggagtccgacaaggccgatatggacgtggagacgttccaggatggcatagtcgcggtcgtcctcgtcccggccggtgggaccgcccccgtaggcgcccctatcgccctcctcgctgaatcagaggaggaggtcgcgctggcgcgggcgcgcgctcaggccctctcgcagggacaaagccaggcaccctctcctccccatgccgccgccgccctggggccacctcctccagcgcctgtggcgcctccagcgacaaagggcatcgcgacaccttacgccaagaaactcgcgaagcagcacagggtggacatcgccggggttgtcggcaccgggccacacggccgcgtcacggcggctgacgtcgaggcagctgctggcatcaagcacaagcgaccccctccacctccaccccctgcttctgttgacgctgcgccactagtgcccgcaagtgcggtgctgccaccagtacccggtggcacggtggtgccgttcacgacaatgcaggcggcggtgagcaagaacatggtggagagcttgagggtaccgacattccgggttagctactccatgatcactgacaagcttgacgcactctatgagaaggttaagtcaaagggggttacaaagacagtgctgctggtgaaggcggcagctgtggcgctcacccaacaccctgtagtaaatgctagctgcagagatggaaagagcttctcctacaacaatgatgtcaacattggagtggctgttgcactcgagggtggccttcttactccagtattagaggatgctgataagatggatatatatctgcttgcacgaaagtggagagtgctgctcaagaaggcacgcatgaagcagctgcaaccaaatgaatacaactctgggacgtttacactatccaatttgggtatgtttggggtggataaattcgacgcaatccttcctgctggtcagggggctatcatggctgttggagcgtcaagacctactgtagtggctgataaggatggtttctttagtatcaagagtgaaatgctggtgaatgttactgctgatcacaggattatctatggtgctgatttggcagcattcctgcaaacatttgcaaagattgttgaggatcctgaatgcctcacattgtaa

SEQ ID NO: 35473 - protein, 454 aa, Zea mays
MASLISPCLSVPTAPGPARLAAPGTPRRRRMAVVRAKIREIFMPALSSTMMEGKIVSWTAAEGDRVAKGDPVVVVESDKADMDVETFQDGIVAVVLVPAGGTAPVGAPIALLAESEEEVALARARAQALSQGQSQAPSPPHAAAALGPPPPAPVAPPATKGIATPYAKKLAKQHRVDIAGVVGTGPHGRVTAADVEAAAGIKHKRPPPPPPPASVDAAPLVPASAVLPPVPGGTVVPFTTMQAAVSKNMVESLRVPTFRVSYSMITDKLDALYEKVKSKGVTKTVLLVKAAAVALTQHPVVNASCRDGKSFSYNNDVNIGVAVALEGGLLTPVLEDADKMDIYLLARKWRVLLKKARMKQLQPNEYNSGTFTLSNLGMFGVDKFDAILPAGQGAIMAVGASRPTVVADKDGFFSIKSEMLVNVTADHRIIYGADLAAFLQTFAKIVEDPECLTL

SEQ ID NO: 35474 - DNA, 1365 bp, Zea mays
  CDS (1)..(1365)
atggcgtctctgattcctccctgcctctccgtccccaccgccccgggacgcgcgcgccttgctgctccgggggcgccgcggcggaggaggatggcggtggtgagggcgaagattcgggagatattcatgccggcgctgagctcaacgatgatggagggcaagatcgtctcctggacggccgccgagggggaccgcgtgggcaagggcgacccagtggtggtcgtggagtccgacaaggccgatatggatgtggagacgttccacgatggcatagtcgcagtcgtcctcgtcccggccggtgggaccgcccccgtaggcgcccctatcgccctcctcgctgaatcagaggaggaggtcgcgctggcgcgggcgcgcgctcaggccctctcgcagggacaaagccaggcaccctctcctccccatgccgccgccgccctggggccacctcctccagcgcctgtggcgcctccagcgacaaagggcatcgcgacaccttacgccaagaaactcgcgaagcagcacagggtggacatcgccggggttgtcggcaccgggccacacggccgcgtcacggcggctgacgtcgaggcagctgctggcatcaagcacaagcgaccccctccacctccaccccctgcttctgttgacgctgcgccactagtgcccgcaagtgcggtgctgccaccagtacccggtggcacggtggtgccgttcacgacaatgcaggcggcggtgagcaagaacatggtggagagcttgagggtaccgacattccgggttagctactccatgatcactgacaagcttgacgcactctatgagaaggttaagtcaaagggggttacaaagacagtgctgctggtgaaggcggcagctgtggcgctcacccaacaccctgtagtaaatgctagctgcagagatggaaagagcttctcctacaacaatgatgtcaacattggagtggctgttgcactcgagggtggccttcttactccagtattagaggatgctgataagatggatatatatctgcttgcacgaaagtggagagtgctgctcaagaaggcacgcatgaagcagctgcaaccaaatgaatacaactctgggacgtttacactatccaatttgggtatgtttggggtggataaattcgacgcaatccttcctgctggtcagggggctatcatggctgttggagcgtcaagacctactgtagtggctgataaggatggtttctttagtatcaagagtgaaatgctggtgaatgttactgctgatcacaggattatctatggtgctgatttggcagcattcctgcaaacatttgcaaagattgttgaggatcctgaatgcctcacattgtaa

SEQ ID NO: 35475 - protein, 454 aa, Zea mays
MASLIPPCLSVPTAPGRARLAAPGAPRRRRMAVVRAKIREIFMPALSSTMMEGKIVSWTAAEGDRVGKGDPVVVVESDKADMDVETFHDGIVAVVLVPAGGTAPVGAPIALLAESEEEVALARARAQALSQGQSQAPSPPHAAAALGPPPPAPVAPPATKGIATPYAKKLAKQHRVDIAGVVGTGPHGRVTAADVEAAAGIKHKRPPPPPPPASVDAAPLVPASAVLPPVPGGTVVPFTTMQAAVSKNMVESLRVPTFRVSYSMITDKLDALYEKVKSKGVTKTVLLVKAAAVALTQHPVVNASCRDGKSFSYNNDVNIGVAVALEGGLLTPVLEDADKMDIYLLARKWRVLLKKARMKQLQPNEYNSGTFTLSNLGMFGVDKFDAILPAGQGAIMAVGASRPTVVADKDGFFSIKSEMLVNVTADHRIIYGADLAAFLQTFAKIVEDPECLTL

SEQ ID NO: 35476 - DNA, 24 bp, Artificial sequence
  primer
atggctatcgaaatcaaagtaccg

SEQ ID NO: 35477 - DNA, 24 bp, Artificial sequence
  primer
ttacatcaccagacggcgaatgtc

SEQ ID NO: 35478 - protein, 661 aa, Artificial sequence
  consensus sequence
  Variant (2)..(17): Xaa in position 2 to 17 is any amino acid
  Variant (18)..(19): Xaa in position 18 to 19 is any or no amino acid
  Variant (22)..(30): Xaa in position 22 to 30 is any amino acid
  Variant (31)..(34): Xaa in position 31 to 34 is any or no amino acid
  Variant (38)..(46): Xaa in position 38 to 46 is any amino acid
  Variant (48)..(56): Xaa in position 48 to 56 is any amino acid
  Variant (58)..(119): Xaa in position 58 to 119 is any amino acid
  Variant (120)..(365): Xaa in position 120 to 365 is any or no amino acid
  Variant (367)..(367): Xaa in position 367 is any amino acid
  Variant (369)..(370): Xaa in position 369 to 370 is any amino acid
  Variant (372)..(372): Xaa in position 372 is any amino acid
  Variant (375)..(380): Xaa in position 375 to 380 is any amino acid
  Variant (382)..(383): Xaa in position 382 to 383 is any amino acid
  Variant (385)..(385): Xaa in position 385 is any amino acid
  Variant (387)..(387): Xaa in position 387 is any amino acid
  Variant (389)..(390): Xaa in position 389 to 390 is any amino acid
  Variant (393)..(396): Xaa in position 393 to 396 is any amino acid
  Variant (398)..(438): Xaa in position 398 to 438 is any amino acid
  Variant (439)..(468): Xaa in position 439 to 468 is any or no amino acid
  Variant (470)..(485): Xaa in position 470 to 485 is any amino acid
  Variant (487)..(501): Xaa in position 487 to 501 is any amino acid
  Variant (502)..(511): Xaa in position 502 to 511 is any or no amino acid
  Variant (514)..(516): Xaa in position 514 to 516 is any amino acid
  Variant (519)..(521): Xaa in position 519 to 521 is any amino acid
  Variant (523)..(524): Xaa in position 523 to 524 is any amino acid
  Variant (526)..(541): Xaa in position 526 to 541 is any amino acid
  Variant (542)..(543): Xaa in position 542 to 543 is any or no amino acid
  Variant (545)..(545): Xaa in position 545 is any amino acid
  Variant (548)..(551): Xaa in position 548 to 551 is any amino acid
  Variant (554)..(555): Xaa in position 554 to 555 is any amino acid
  Variant (558)..(579): Xaa in position 558 to 579 is any amino acid
  Variant (582)..(583): Xaa in position 582 to 583 is any amino acid
  Variant (586)..(591): Xaa in position 586 to 591 is any amino acid
  Variant (594)..(594): Xaa in position 594 is any amino acid
  Variant (597)..(597): Xaa in position 597 is any amino acid
  Variant (599)..(600): Xaa in position 599 to 600 is any amino acid
  Variant (602)..(603): Xaa in position 602 to 603 is any amino acid
  Variant (604)..(604): Xaa in position 604 is any or no amino acid
  Variant (606)..(611): Xaa in position 606 to 611 is any amino acid
  Variant (613)..(613): Xaa in position 613 is any amino acid
  Variant (615)..(615): Xaa in position 615 is any amino acid
  Variant (617)..(619): Xaa in position 617 to 619 is any amino acid
  Variant (622)..(646): Xaa in position 622 to 646 is any amino acid
  Variant (647)..(651): Xaa in position 647 to 651 is any or no amino acid
  Variant (654)..(654): Xaa in position 654 is any amino acid
  Variant (658)..(659): Xaa in position 658 to 659 is any amino acid
PXXXXXXXXXXXXXXXXXXGDXXXXXXXXXXXXXDKAXXXXXXXXXGXXXXXXXXXGXXXXXXXXXXXXXXXXXXXXXXXXXXXXXXXXXXXXXXXXXXXXXXXXXXXXXXXXXXXXXXXXXXXXXXXXXXXXXXXXXXXXXXXXXXXXXXXXXXXXXXXXXXXXXXXXXXXXXXXXXXXXXXXXXXXXXXXXXXXXXXXXXXXXXXXXXXXXXXXXXXXXXXXXXXXXXXXXXXXXXXXXXXXXXXXXXXXXXXXXXXXXXXXXXXXXXXXXXXXXXXXXXXXXXXXXXXXXXXXXXXXXXXXXXXXXXXXXXXXXXXXXXXXXXXXXXXXXXXXXXXXXXXXXXXXXXXXXXXXXXXXXXXXXAXPXXRXLAXXXXXXLXXVXGXGXXGRXXXXDXXXXXXXXXXXXXXXXXXXXXXXXXXXXXXXXXXXXXXXXXXXXXXXXXXXXXXXXXXXXXXXXXXXXXXXPXXXXXXXXXXXXXXXXRXXXXXXXXXXXXXXXXXXXXXXXXXKAXXXALXXXPXXNXXXXXXXXXXXXXXXXXXGXAVXXXXGLXXPVXXXXXXXXXXXXXXXXXXXXXXARXXKLXXXXXXGGXFTXSXXGXXXGXXXXXXIXNXPXXXILXXXXXXXXXXXXXXXXXXXXXXXXXXXXXXLSXDHRXXDG

SEQ ID NO: 35479 - protein, 58 aa, Artificial sequence
  protein pattern
  Variant (2)..(3): Xaa in position 2 to 3 is any or no amino acid
  Variant (5)..(5): Xaa in position 5 is Ala, Asp, Gly, Gln or Ser
  Variant (6)..(6): Xaa in position 6 is any amino acid
  Variant (7)..(7): Xaa in position 7 is Asp, Glu, Asn or Pro
  Variant (8)..(8): Xaa in position 8 is any amino acid
  Variant (11)..(11): Xaa in position 11 is any amino acid
  Variant (12)..(12): Xaa in position 12 is Thr or Val
  Variant (14)..(14): Xaa in position 14 is Ile or Val
  Variant (15)..(15): Xaa in position 15 is Phe, Ile, Leu or Val
  Variant (16)..(17): Xaa in position 16 to 17 is any amino acid
  Variant (18)..(18): Xaa in position 18 is Ala, Pro or Val
  Variant (19)..(21): Xaa in position 19 to 21 is any amino acid
  Variant (22)..(22): Xaa in position 22 is Asp, Gly, Ser or Thr
  Variant (23)..(23): Xaa in position 23 is Ile, Leu or Val
  Variant (24)..(25): Xaa in position 24 to 25 is any amino acid
  Variant (26)..(26): Xaa in position 26 is Ile, Leu or Val
  Variant (27)..(27): Xaa in position 27 is Ala, Glu, Gly or Ser
  Variant (28)..(36): Xaa in position 28 to 36 is any amino acid
  Variant (38)..(38): Xaa in position 38 is Lys or Arg
  Variant (39)..(41): Xaa in position 39 to 41 is any amino acid
  Variant (43)..(45): Xaa in position 43 to 45 is any amino acid
  Variant (46)..(46): Xaa in position 46 is Asp or Glu
  Variant (47)..(47): Xaa in position 47 is any amino acid
  Variant (48)..(48): Xaa in position 48 is Glu, Asn, Gln or Thr
  Variant (49)..(49): Xaa in position 49 is Gly or Ser
  Variant (50)..(50): Xaa in position 50 is Ala, Gly or Ser
  Variant (51)..(51): Xaa in position 51 is Cys, Asn or Thr
  Variant (52)..(52): Xaa in position 52 is any amino acid
  Variant (53)..(53): Xaa in position 53 is Ala, Ser or Thr
  Variant (54)..(54): Xaa in position 54 is Ile, Leu or Val
  Variant (55)..(55): Xaa in position 55 is Ser or Thr
  Variant (56)..(56): Xaa in position 56 is Asn or Ser
  Variant (57)..(57): Xaa in position 57 is any amino acid
AXXVXXXXGLXXPXXXXXXXXXXXXXXXXXXXXXXXAXXXXLXXXXXXXXXXXXXXXG

SEQ ID NO: 35480 - protein, 23 aa, Artificial sequence
  protein pattern
  Variant (4)..(4): Xaa in position 4 is Ile, Leu or Val
  Variant (5)..(5): Xaa in position 5 is Ile or Val
  Variant (6)..(6): Xaa in position 6 is any amino acid
  Variant (8)..(10): Xaa in position 8 to 10 is any amino acid
  Variant (11)..(11): Xaa in position 11 is Ala, Ser or Val
  Variant (12)..(20): Xaa in position 12 to 20 is any amino acid
  Variant (21)..(21): Xaa in position 21 is Ile, Leu, Met or Val
  Variant (22)..(22): Xaa in position 22 is Ala, Glu, Gly, Gln or Ser
  Variant (23)..(23): Xaa in position 23 is Ala, Asp, Asn, Gln or Thr
DHRXXXGXXXXXXXXXXXXXXXX

SEQ ID NO: 35481 - protein, 39 aa, Artificial sequence
  protein pattern
  Variant (2)..(13): Xaa in position 2 to 13 is any amino acid
  Variant (15)..(15): Xaa in position 15 is Gly, Ser or Thr
  Variant (18)..(18): Xaa in position 18 is Ala or Val
  Variant (19)..(19): Xaa in position 19 is Asp, Ser, Thr or Val
  Variant (20)..(20): Xaa in position 20 is Leu, Met or Val
  Variant (21)..(21): Xaa in position 21 is Asp, Glu or Gly
  Variant (22)..(22): Xaa in position 22 is Phe, Ile, Met or Val
  Variant (23)..(23): Xaa in position 23 is any amino acid
  Variant (24)..(24): Xaa in position 24 is Ala, Cys, Ser or Thr
  Variant (25)..(26): Xaa in position 25 to 26 is any amino acid
  Variant (27)..(27): Xaa in position 27 is Ala, Asp, Glu or Ser
  Variant (29)..(29): Xaa in position 29 is any amino acid
  Variant (30)..(30): Xaa in position 30 is Ile, Leu or Val
  Variant (31)..(32): Xaa in position 31 to 32 is any amino acid
  Variant (33)..(33): Xaa in position 33 is Ile, Leu, Met or Val
  Variant (34)..(37): Xaa in position 34 to 37 is any amino acid
  Variant (39)..(39): Xaa in position 39 is Ala, Asp, Glu, Gly, Gln, Ser or Thr
GXXXXXXXXXXXXEXDKXXXXXXXXXXGXXXXXXXXXGX

SEQ ID NO: 35482 - DNA, 2391 bp, Escherichia coli
  CDS (1)..(2391): transl_table=11
atggcaattaacaatacaggctcgcgacgattactcgtcacgctaacagccctttttgcagcgctttgcgggctgtatctactcattggcggaggctggctggtcgcgattggcggctcctggtactaccctatcgctggccttgtgatgctcggcgtcgcctggatgctgtggcgcagtaaacgcgccgcgctttggctatacgcagccctgctgctcggcaccatgatttggggcgtctgggaagttggtttcgacttctgggcgctgactccgcgcagcgacattctggtcttcttcggcatctggctgatcctgccgtttgtctggcgtcgcctggtcattcctgccagcggcgcagttgccgcactggtggtcgcactgctgattagcggtggtatcctgacctgggccggatttaacgatccgcaggagatcaacggcaccttaagcgccgatgccacacctgctgaagctatctcccccgtagccgatcaggactggcctgcctatggtcgtaatcaggaaggtcaacgcttttcgccgctgaaacaaattaacgccgataacgtccataatctgaaagaagcctgggtgttccgtactggcgatgtgaagcagccgaacgatccgggtgaaatcaccaatgaagtgacgccgattaaagtgggcgacaccctttacctgtgtaccgctcaccagcgcctgtttgcgcttgatgccgccagcggcaaagagaaatggcattacgatcctgagctgaaaaccaacgagtctttccagcacgtaacctgccgtggtgtctcttatcatgaagccaaagcagaaaccgcttcgccggaagtgatggcggattgcccgcgtcgtatcattcttccggtcaatgatggtcgactgattgcgattaacgctgaaaacggcaaactgtgcgaaaccttcgccaataaaggcgtgctcaatctgcaaagcaatatgccagacaccaaaccgggtctgtatgaaccgacttcgccaccgattatcaccgataaaaccatcgtgatggccggttcagttaccgataacttctcaacccgcgaaacgtctggcgtgatccgtggttttgatgtcaacaccggggagctgctgtgggcttttgatcccggcgcgaaagatccgaacgcaatcccgtctgacgaacacacctttacctttaactcgccaaactcctgggcaccagcggcctatgacgcgaagctggatctggtctatctgccgatgggcgtgaccacgccggatatctggggcggtaaccgcacaccggaacaggaacgttatgccagctcgattctggcgctgaatgccactaccgggaaactggcgtggagctaccagaccgttcaccacgacctgtgggacatggatcttccggcacagccgacgctggcggacatcaccgttaatggtcagaaagtgccagttatttacgctccggcgaaaaccggcaacatttttgtgctcgatcgtcgtaatggcgaactggtggttccggcaccggaaaaaccggttccccaaggtgcagcgaaaggcgattacgtaaccccaactcaaccgttttctgaactgagcttccgtccgacgaaagatttgagcggtgcggatatgtggggagccaccatgtttgaccaactggtgtgccgcgtgatgttccaccagatgcgctatgaaggcattttcaccccgccatctgaacagggtacgctggtcttcccgggtaacctggggatgttcgaatggggcgggatttccgttgatccaaatcgtgaagtggcgattgccaacccaatggcactgccgtttgtttcgaaactgatcccgcgtggtcctggcaacccgatggagcagccgaaagatgccaaaggcacgggtacggaatccggcattcagccacagtacggtgtaccgtatggtgtcacgctcaacccgttcctctcaccatttggtctgccatgtaaacagccagcatggggttatatctcggcgctggatctgaaaactaatgaagtggtgtggaagaaacgtattggtacgccgcaggacagtatgccgttcccgatgccggttccggtgccgttcaatatgggtatgccgatgctgggcgggccaatctccacggcgggtaacgtgctgtttatcgccgctacggcagataactacctgcgcgcttacaacatgagcaacggtgaaaaactgtggcagggtcgtttaccagcgggtggtcaggctacgccaatgacctatgaagtgaatggtaagcagtatgtggtgatctccgcaggcggtcacggttcatttggtacgaagatgggcgactatattgtggcttatgcgctgccggatgatgtgaagtaa

SEQ ID NO: 35483 - protein, 796 aa, Escherichia coli
MAINNTGSRRLLVTLTALFAALCGLYLLIGGGWLVAIGGSWYYPIAGLVMLGVAWMLWRSKRAALWLYAALLLGTMIWGVWEVGFDFWALTPRSDILVFFGIWLILPFVWRRLVIPASGAVAALVVALLISGGILTWAGFNDPQEINGTLSADATPAEAISPVADQDWPAYGRNQEGQRFSPLKQINADNVHNLKEAWVFRTGDVKQPNDPGEITNEVTPIKVGDTLYLCTAHQRLFALDAASGKEKWHYDPELKTNESFQHVTCRGVSYHEAKAETASPEVMADCPRRIILPVNDGRLIAINAENGKLCETFANKGVLNLQSNMPDTKPGLYEPTSPPIITDKTIVMAGSVTDNFSTRETSGVIRGFDVNTGELLWAFDPGAKDPNAIPSDEHTFTFNSPNSWAPAAYDAKLDLVYLPMGVTTPDIWGGNRTPEQERYASSILALNATTGKLAWSYQTVHHDLWDMDLPAQPTLADITVNGQKVPVIYAPAKTGNIFVLDRRNGELVVPAPEKPVPQGAAKGDYVTPTQPFSELSFRPTKDLSGADMWGATMFDQLVCRVMFHQMRYEGIFTPPSEQGTLVFPGNLGMFEWGGISVDPNREVAIANPMALPFVSKLIPRGPGNPMEQPKDAKGTGTESGIQPQYGVPYGVTLNPFLSPFGLPCKQPAWGYISALDLKTNEVVWKKRIGTPQDSMPFPMPVPVPFNMGMPMLGGPISTAGNVLFIAATADNYLRAYNMSNGEKLWQGRLPAGGQATPMTYEVNGKQYVVISAGGHGSFGTKMGDYIVAYALPDDVK

SEQ ID NO: 35484 - DNA, 2400 bp, Bradyrhizobium sp. ORS278
  CDS (1)..(2400): transl_table=11
atggccgcagcccgccatctgcagcgcgcgccgctgctgaccttcacggccgtcatcgtcggactgatgggcgtcgcactgctcgccggcggcttctggctcgccgcgatcggcggctcgctgtactacgtgattgccggtgcggcactgctcggcacggcgtggctgctgtggcagcggcgcgcttccgcgctatggctctacgcggcactgctgctgggcacgatgatctgggcggtctgggaggtcgggctggacttctggtcgctggcgccacgcggcgacgtgctggcaccgctcggcgtctggctgctgctgccgttcatcaccgcgcatctggccggtgacatgcgctcggcgcgctggggccttctcgccgtgctcgccgtcgcggtggtcgtgctcggcgcctccctgcgcggcgaccgcttcggcgtcaacggcgcgctgccgcaggccgcggctgccaccgccggcaccgatcccgggcccgcggaagcgcaggccgactggaccgcgtatggcgccagcaatttcggcacgcgcttctcgagcctgaagcagatcaccgccaataatgtgaagaacctgcaactcgcctgggaattccagaccggcgaccgcaaggggcccgacgatcccgacgagttcaccaatgaggtgacgccgctgaagatcggcgatctgctctacacctgctcgccgcaccagatcgtgttcgcgctcgatgcggccacgggcaagcagcgctggacgttcgatccgaagatcgagcaccacaagaatttccagcacatgacctgccgcggcgtcgcgtatcacgagaccaagcccggcgcagtcgacgtgtcgggcgccgcggctccgggcgaatgcgccaggcgcatcttcctgccgaccgacgacggacggctgttcgcgctcgacgccgacagcggcaagccgtgcgacggctttggcgatcacggccagatcgatctgaaggccggcaacgagatcaccacggtcggcttctacgaggggacctcgccgcccgttgtcaccgacaaggtgctgatcatggccggcgccgtgatcgacaactactccaacaaggtgccgtcgggcgcgatccgcggcttcgacgtctactcgggcaagctgttatgggcgttcgatcccggcaatcccgatccgaacgagatgccgtcggcgacgcatcatttcacgccgggctcgccgaacggctggagcgtcggcgcggccgacgaggcgctcggcctggtctacatcccgcttggctcgagctcgccggacatctgggccggcaaccgctcggccgacaacgagcgctatgattccgcgctggtcgcgctcgacatcgccaccggcaaattgcgctggtcgttccagaacgtgcatcacgatctctgggacatggacatgccgtcgcagccgagtctggtcgacatgccaggccaagacggcgtggtgccggcgatctatgtgccggccaagaccggcaacatcttcgtgctcgaccgccgcgacgggcacctgctggtccccgcgcccgaaaagcctgtgccgcaaggtgcggcgcccggcgatcatctgtcaccgactcagccattctccgagctgagcttccgtccgcgcaaccagctgacaggcgcgcagatgtggggcgcgacgatgttcgatcagctcgcctgccgtatcaagttcaagcggctgcgctacgagggcccgttcacgccgccctccgagcagggcacgctggtctatcccggcgatttcggcatgttcgaatggggcggcatcgcgatcgatcccgtcaggaagatcgcgatcgccaatccgcaatcgatcccgttcgtgtcgcggctggtgccgcgcggcaaggacaatccggcggcgccgaactccgcgcatccgccgggcaccgagctcggcgtgcagccgatgtacggcacgccctatggcgtcgatctcggcatcttcctgtcaccgctcggaatcccctgcatggccccgccctggggcagcctcgccgccatcgatctcaagaccaaccagatcgtctggcagcaccgcgtcggcaccattcgcgaccaggcccccgtgccactgccgttcaagctgggcgtgccgatgctcggcggcccgatggtgaccgcgggcggcgtcgccttcctcaccggcacgatggacgactacatccgcgccttcgacgtcaaggatggccggctgctctggcaggaccgcctgccggccggcggccagtcgacgccgatgacgtacgaagccggcggcaggcagtatgtcgtcaccgtcgatggcggccacggttcgttcggcaccaagctcggtgactatgtccgcgcctacgcattgcccggcaacgtcgcgagcagatag

SEQ ID NO: 35485 - protein, 799 aa, Bradyrhizobium sp. ORS278
MAAARHLQRAPLLTFTAVIVGLMGVALLAGGFWLAAIGGSLYYVIAGAALLGTAWLLWQRRASALWLYAALLLGTMIWAVWEVGLDFWSLAPRGDVLAPLGVWLLLPFITAHLAGDMRSARWGLLAVLAVAVVVLGASLRGDRFGVNGALPQAAAATAGTDPGPAEAQADWTAYGASNFGTRFSSLKQITANNVKNLQLAWEFQTGDRKGPDDPDEFTNEVTPLKIGDLLYTCSPHQIVFALDAATGKQRWTFDPKIEHHKNFQHMTCRGVAYHETKPGAVDVSGAAAPGECARRIFLPTDDGRLFALDADSGKPCDGFGDHGQIDLKAGNEITTVGFYEGTSPPVVTDKVLIMAGAVIDNYSNKVPSGAIRGFDVYSGKLLWAFDPGNPDPNEMPSATHHFTPGSPNGWSVGAADEALGLVYIPLGSSSPDIWAGNRSADNERYDSALVALDIATGKLRWSFQNVHHDLWDMDMPSQPSLVDMPGQDGVVPAIYVPAKTGNIFVLDRRDGHLLVPAPEKPVPQGAAPGDHLSPTQPFSELSFRPRNQLTGAQMWGATMFDQLACRIKFKRLRYEGPFTPPSEQGTLVYPGDFGMFEWGGIAIDPVRKIAIANPQSIPFVSRLVPRGKDNPAAPNSAHPPGTELGVQPMYGTPYGVDLGIFLSPLGIPCMAPPWGSLAAIDLKTNQIVWQHRVGTIRDQAPVPLPFKLGVPMLGGPMVTAGGVAFLTGTMDDYIRAFDVKDGRLLWQDRLPAGGQSTPMTYEAGGRQYVVTVDGGHGSFGTKLGDYVRAYALPGNVASR

SEQ ID NO: 35486 - DNA, 2358 bp, Mesorhizobium loti MAFF303099
  CDS (1)..(2358): transl_table=11
atggccgcgcgagcgcgcaacagtcgaaggagtatcatcttggctgtcaccatcacctccttcgttctctttctcctcggtctggcgcttggtggcggtggcatctggctggcttcgctggggggcagttggtactacatcgtcgtcggcctcgccttcctgatcgccgcctggctgctctaccggcgccgttccacggcgctctggctctatgcggcgattgtgctcggcacgctggcctgggcggtctgggaaatcggcttcgactggtgggagctcggcccgcgcggcggcatcatcgtgctggtcgggctgtggctgctgacgccgtgggcaaggcggggccttgccgggcctgacgggcgcgcgccgctgatcctggccgtgctggcatcgctggcggtggccggctattcgatgaccgccgacccgaaaggcattgacggcgcgctcgacaccgacaaggtgattcccaaagccaatctgggtaatgatgtgccggctggcgagtggcactattacggacgcacgcagtttggccaacgctattcgccgctcgaccagatcacgccggacaatgtcgccaatctgcagccggcatggacctatcgcaccggcgatgtgaaggggcccgacgacatcggcgagaccacctatcaggtgacgccgctgaagatcggcgacacgctctacatctgcacgccgcataatttcgccatcgcggtggacgccgcgaccggaaaggaaaaatggcgctacgatcccaagatcaagctcgacaaggaccgccagcaccagacctgccgcggcgtgtcctactatgccgataccgccatcgccgccggccagccctgcgcgacccgcatctacctgccgacctcggatgcgcggctgatcgcgctcgacgccgccagcggtcaggtctgtccggccttcgccgagggcggcacgctgaaccttctgaccaacatgccctatccgaaatcgggctactactattcgacctcggcgccgctgatatcaggcagcaagatcatcgtcggcggcgcggtcaacgacaactattcgacgcaggagccgtcgggggtcatccgcgcctatgatgtcggcaccggcgccctggtgtggaagtgggattccggcaacccggaccagacgacgccgctggcggcgggccagacctataccgccaactcgcccaacatgtggtcgacgccgagcgccgacgagaagcttgggctgctctatgtgccactcggcaaccagacgccggaccagctcggcgccgggcgtagcgccaatgtcgagaaattctcctcctcgatcgccgcgctcgacctcaacaccgggcagttgcgctgggtgcggcagaccgtgcaccatgacctctgggacatggacgtgccggcgcagccgagcctgattgacatcaccaaggccgacggcacagtggtgccggcgctggtcgggccgaccaagcagggcgacctctatgtgcttgaccggcgcaccggcgaaccgcttgttgcagtcaaggaagtgccggcgcccggcggcgccgtcgagggcgatcacacgtcgccgacgcaaccggtgtcggatctctccttcagcccgaagccgctgacggatgccgacatgtggggcatcaccatgttcgaccagatggcctgcaggattgccttccacaagctgcgctacgaaggccgttacacgccgccgtcggtgcagggatcgctgatctaccccggcaatttcggagtcttcaactggggcggggtggcagtcgatccggtgcggcaggtgatgttcggcatgccgacctatctggcgtttacgtcgagactcgtgccccgcgcggacgtaccgccgccgggcgatgacaccaagggcagcgagcaggggctgaaccgcaacgagggcgcgccctacgcagtggtgatggggccgttcctgtcgcctctcggcattccctgccaggcgccaccctggggttatgtcgcgggcgcggatctgcggaccggcaccatcgcctacaagcatcgcaacggtaccgtctacgatatgacgccgctgccgctgccgctgaaggtcggcgtgccgggcattggcgggccgatcatcactgccggcggcgtcgccttcctgggtgccgcggtcgacaactatctgcgcgcctatgacctgacgtcgggccggcaactctggcaggccaggctgcccgccggcggccagtcgacgccgatgacctatacggtcgccgacgggcgccagttcgtggtcatcgtcgccggcggccacggctcggtcggcaccaagccgggggattatgtgatggcttacgcgctgccgaaatag

SEQ ID NO: 35487 - protein, 785 aa, Mesorhizobium loti MAFF303099
MAARARNSRRSIILAVTITSFVLFLLGLALGGGGIWLASLGGSWYYIVVGLAFLIAAWLLYRRRSTALWLYAAIVLGTLAWAVWEIGFDWWELGPRGGIIVLVGLWLLTPWARRGLAGPDGRAPLILAVLASLAVAGYSMTADPKGIDGALDTDKVIPKANLGNDVPAGEWHYYGRTQFGQRYSPLDQITPDNVANLQPAWTYRTGDVKGPDDIGETTYQVTPLKIGDTLYICTPHNFAIAVDAATGKEKWRYDPKIKLDKDRQHQTCRGVSYYADTAIAAGQPCATRIYLPTSDARLIALDAASGQVCPAFAEGGTLNLLTNMPYPKSGYYYSTSAPLISGSKIIVGGAVNDNYSTQEPSGVIRAYDVGTGALVWKWDSGNPDQTTPLAAGQTYTANSPNMWSTPSADEKLGLLYVPLGNQTPDQLGAGRSANVEKFSSSIAALDLNTGQLRWVRQTVHHDLWDMDVPAQPSLIDITKADGTVVPALVGPTKQGDLYVLDRRTGEPLVAVKEVPAPGGAVEGDHTSPTQPVSDLSFSPKPLTDADMWGITMFDQMACRIAFHKLRYEGRYTPPSVQGSLIYPGNFGVFNWGGVAVDPVRQVMFGMPTYLAFTSRLVPRADVPPPGDDTKGSEQGLNRNEGAPYAVVMGPFLSPLGIPCQAPPWGYVAGADLRTGTIAYKHRNGTVYDMTPLPLPLKVGVPGIGGPIITAGGVAFLGAAVDNYLRAYDLTSGRQLWQARLPAGGQSTPMTYTVADGRQFVVIVAGGHGSVGTKPGDYVMAYALPK

SEQ ID NO: 35488 - DNA, 2412 bp, Pseudomonas aeruginosa PAO1
  CDS (1)..(2412): transl_table=11
atgagcgaaggtaaccgcagtcgatcgcgcctgctgccgagcctgctcggcctgttgatcctgctgtccggcctggcgctgctggccggcggcatcaagctggcgagcctgggcggctcgctgtactacctgctggccggcatcggcctggccctgagcggactgttgctgctgctgggcaagcgtgcggcgctaggcctgtacgctctggtgctgttcgccagcaccgtctgggcgctgtgggaagtcggcctggactggtggcaactggtgccgcgcctggctctgtggttcgtcttcggcctgctgctctggctaccctggttccgccgcccgctgctggccgacggtccggcgccgctgggcaccgcggcgctgggcgtggcggtggtcctggccggcgccgccgcggtgggcagccagttcaccaatccggggcagatcgtcggtcgcatcgaccgcgacagcggcatgaccagcaccgccccggcgatgccggacggcgactggcaggcctacgggcgcaccgagttcggcgaccgctactcgccgttgaagcagatcaccccggccaacgtcggccagctcgaggaagcctggcgcatccgtaccggcgacctgccgaccgccgacgatccgctcgaactgaccaacgagaacaccccgctgaaggtcaacggcatgctctacgcctgcaccgcgcacagcaaggtgctggccctcgacccggacaccggcgcggaaatctggcgcttcgatccgcagatccagagcccggtaggcttcaagggcttcgcccacatgacttgccgtggcgtctcctactacgacgaagagcagtacgccaggagcgacgtcggcgcgccgccggccgcgctctccgaggccggcaaggcggtcgccgccagttgtccgcggcgcctgttcctgcccaccgccgacgcccgcctgatcgcgatcaacgccgacaacggcaaggtctgcgaggacttcggggtcaagggcgcggtcgacctgacggccggcatcggtccgttcaccccgggcggctactactccacctcgccggcggcggtcacccgcaatctggtgatcatcggcggccacgtcaccgacaacgagtcgaccaacgagccgtccggggtgatccgcgccttcgacgtgcacgacggcaagctggtgtggaactgggacagcggcaacccggacgagaccgagcccctggcgcccggcaagttctatacccgcaactcgccgaacatgtggtcgctggccagcgtcgacgagaagctcggccaggtctacctgccgctgggcaaccagatgcccgaccagtggggcggcaaccgcacccctggcgccgagaagttcagcgccggcctggtggccctcgacctgaacaccggcaagctgcgctggaactaccagttcacccaccacgacctgtgggacatggacgtcggcagccagccgaccctgctcgacctgaagaccgccgatggcgtcaagccggcgctgatcgcgccgaccaagcagggcagcctgtacgtgctggaccgccgcgacggcacgccgatcgtgccgatccgcgaagtgccggcgccgcagggcgcggtggagggcgaccataccgcgccgacccaggcgcgttccgacctcaacctgctgcgcccgccgctgaccgagcgcgacatgtggggcagcagcccgttcgaccagatgctctgccgcatccagttccgctcgctgcgctacgagggccagtacaccccgccgtcggagcagggcagcctgatctatccgggcaacgtcggagtgttcaactggggcggggtgtcggtcgacccggtgcgccagatcctcttcaccagccccaactacatggccttcgtctcgcagatggtgccgcgcgacaaggtgcccagcggaagcaagcgcgagggcgagaccagcggcgtgcagccgaacaccggcgcgccctacgcggtgatcatgcatccgttcatgtcgcccatcggcctgccgtgccaggcgccgtcctggggtgacgtggcgggtatcgacctgaccaccgccaaggtcgtctggcagcacaagaacggcaccagccgcgacaacaccccggtgccgatcggcctcaccgtcggcgtaccgagcatgggcggctcgatcaccaccgccggcggcgtggccttcctcagcggcacgctcgaccagtacctgcgcgcctacgacgtgaaggacggcaagcagctctggcaggcgcgcctgccggccggcggccaggccacgccgatgagctacaccggcaaggacggtcgccagtacgtgctgatcgtcgctggcggacacggctccttcggtacccgcatgggcgactacatcatcgcctacgccctgcccaggcaatga

SEQ ID NO: 35489 - protein, 803 aa, Pseudomonas aeruginosa PAO1
MSEGNRSRSRLLPSLLGLLILLSGLALLAGGIKLASLGGSLYYLLAGIGLALSGLLLLLGKRAALGLYALVLFASTVWALWEVGLDWWQLVPRLALWFVFGLLLWLPWFRRPLLADGPAPLGTAALGVAVVLAGAAAVGSQFTNPGQIVGRIDRDSGMTSTAPAMPDGDWQAYGRTEFGDRYSPLKQITPANVGQLEEAWRIRTGDLPTADDPLELTNENTPLKVNGMLYACTAHSKVLALDPDTGAEIWRFDPQIQSPVGFKGFAHMTCRGVSYYDEEQYARSDVGAPPAALSEAGKAVAASCPRRLFLPTADARLIAINADNGKVCEDFGVKGAVDLTAGIGPFTPGGYYSTSPAAVTRNLVIIGGHVTDNESTNEPSGVIRAFDVHDGKLVWNWDSGNPDETEPLAPGKFYTRNSPNMWSLASVDEKLGQVYLPLGNQMPDQWGGNRTPGAEKFSAGLVALDLNTGKLRWNYQFTHHDLWDMDVGSQPTLLDLKTADGVKPALIAPTKQGSLYVLDRRDGTPIVPIREVPAPQGAVEGDHTAPTQARSDLNLLRPPLTERDMWGSSPFDQMLCRIQFRSLRYEGQYTPPSEQGSLIYPGNVGVFNWGGVSVDPVRQILFTSPNYMAFVSQMVPRDKVPSGSKREGETSGVQPNTGAPYAVIMHPFMSPIGLPCQAPSWGDVAGIDLTTAKVVWQHKNGTSRDNTPVPIGLTVGVPSMGGSITTAGGVAFLSGTLDQYLRAYDVKDGKQLWQARLPAGGQATPMSYTGKDGRQYVLIVAGGHGSFGTRMGDYIIAYALPRQ

SEQ ID NO: 35490 - DNA, 2391 bp, Escherichia coli O157:H7 EDL933
  CDS (1)..(2391): transl_table=11
atggcaattaacaatacaggctcgcgacgattactcgtcacgctaacagccctttttgcagcgctttgcgggctgtatctactcattggcggaggctggctggtcgcgattggcggctcctggtactaccctatcgctggccttgtgatgctcggcgtcgcctggatgctgtggcgcagtaaacgtgccgcgctttggctatacgccgccctgctgctcggcaccatgatttggggcgtctgggaagttggtttcgacttctgggcgctgactccgcgcagcgatattctggtcttcttcggcatctggctgatcctgccgtttgtctggcgtcgcctggtcattcctgccagcggcgcagttgccgcactggtggtggcactgctgattagcggtagtatcctgacctgggccggatttaacgatccgcaggaaatcaacggcaccttaagcgccgatgccacacctgcggaagctatctcacccgttgccgatcaggactggcctgcctatggtcgcaatcaggaaggtcaacgcttttcacctctgaaacaaattaacgccgataacgtccataatctgaaagaagcctgggtgttccgtactggcgatgtgaagcagccgaacgatccgggcgaaatcaccaatgaagtgacgccgattaaagtgggcgacaccctttacctgtgtaccgctcaccagcgcctgtttgcgctcgatgccgccagcggcaaagagaaatggcattacgatcctgagctgaaaactaacgagtctttccagcacgtaacctgccgtggcgtctcttatcatgaagccaaagcagaaacggcttcgccggaagtgatggcggattgcccgcgtcgtatcattcttccggtcaatgatggtcgcctgattgcgattaacgctgaaaacggcaagctgtgcgaaaccttcgccaataaaggcgtgctcaatctgcaaagcaatatgccagacaccaaaccgggtctgtatgaaccgacttcgccaccgattatcaccgataaaaccatcgtgatggcaggttcagttaccgataacttctcaacccgcgaaacgtctggcgtgatccgtggttttgatgtcaacaccggggagctgctgtgggcttttgatccgggcgcgaaagatccgaacgcaatcccgtctgacgaacacacctttacctttaactcgccaaactcgtgggcaccagcggcctatgacgcgaagctggatctggtgtatctgccgatgggcgtgaccacgccggatatctggggcggtaaccgcacaccggaacaggaacgttatgccagctcgattctggcgctgaatgccacaaccgggaaattggcgtggagctaccagaccgttcaccacgacctgtgggatatggatcttccggcacagccgacgctggcggacatcaccgttaatggtcagaaagtgccagttatttacgctccggcgaaaaccggcaacatttttgtgctcgatcgtcgtaatggcgaactggtggttccggcaccggaaaaaccggttccccaaggtgctgccaaaggcgattacgttacccctactcaaccattctcggaactgagcttccgtccgacgaaagatttgagcggtgcggatatgtggggagccaccatgtttgaccaactggtgtgccgcgtgatgttccaccagatgcgctatgaaggcattttcacgccgccatctgaacagggcacgctggtcttcccgggtaacctgggaatgtttgaatggggcgggatttccgttgatccaaatcgtgaagtggcaattgccaacccaatggcactgccgtttgtttcgaaactgatcccacgcggtccgggtaacccgatggagcagccgaaagatgccaaaggcacgggtacggaatccggcattcagccacagtacggtgtaccgtatggtgtcacgctcaacccgttcctctcaccatttggtctgccatgtaaacagccagcatggggttatatctcggcgctggatctgaaaactaatgaagtggtgtggaagaaacgtattggtacgccgcaggacagtatgccgttcccgatgcctgtaccggtgccgttcaatatgggtatgccgatgctgggcgggccaatctccacggcgggtaacgtgctgtttatcgccgctacggcagataactacctgcgcgcttacaacatgagcaacggtgaaaaactgtggcagggtcgtttaccagcgggtggtcaggcgacgccaatgacctatgaagtgaatggtaagcagtatgtggtgatctccgcaggcggtcacggttcatttggtacgaagatgggtgactatattgtggcttatgcgctgccggatgatgtgaagtaa

SEQ ID NO: 35491 - protein, 796 aa, Escherichia coli O157:H7 EDL933
MAINNTGSRRLLVTLTALFAALCGLYLLIGGGWLVAIGGSWYYPIAGLVMLGVAWMLWRSKRAALWLYAALLLGTMIWGVWEVGFDFWALTPRSDILVFFGIWLILPFVWRRLVIPASGAVAALVVALLISGSILTWAGFNDPQEINGTLSADATPAEAISPVADQDWPAYGRNQEGQRFSPLKQINADNVHNLKEAWVFRTGDVKQPNDPGEITNEVTPIKVGDTLYLCTAHQRLFALDAASGKEKWHYDPELKTNESFQHVTCRGVSYHEAKAETASPEVMADCPRRIILPVNDGRLIAINAENGKLCETFANKGVLNLQSNMPDTKPGLYEPTSPPIITDKTIVMAGSVTDNFSTRETSGVIRGFDVNTGELLWAFDPGAKDPNAIPSDEHTFTFNSPNSWAPAAYDAKLDLVYLPMGVTTPDIWGGNRTPEQERYASSILALNATTGKLAWSYQTVHHDLWDMDLPAQPTLADITVNGQKVPVIYAPAKTGNIFVLDRRNGELVVPAPEKPVPQGAAKGDYVTPTQPFSELSFRPTKDLSGADMWGATMFDQLVCRVMFHQMRYEGIFTPPSEQGTLVFPGNLGMFEWGGISVDPNREVAIANPMALPFVSKLIPRGPGNPMEQPKDAKGTGTESGIQPQYGVPYGVTLNPFLSPFGLPCKQPAWGYISALDLKTNEVVWKKRIGTPQDSMPFPMPVPVPFNMGMPMLGGPISTAGNVLFIAATADNYLRAYNMSNGEKLWQGRLPAGGQATPMTYEVNGKQYVVISAGGHGSFGTKMGDYIVAYALPDDVK

SEQ ID NO: 35492 - DNA, 2337 bp, Agrobacterium tumefaciens str. C58
  CDS (1)..(2337): transl_table=11
atggcagtcaccgtcactgcggtcattcttacgctgatcggccttgcgctgttcggcttcggctctcagctcgtcatgttgggcgggagcttttattatcttctttccggactggcctttctgttgacggccgttctgctgttcaagcgcaatcgcgccgcccttcacgtttatgccgttttcattgtcgcgacgcttgcctgggcagtctgggaagtcggatttgactggtggcagcttggaccgcggggcggcgtcattattctcattggtctttggctgctggtgccgtgggtcaggaaaccgcttggcttttcaagcccgaccggtctgagttacagccctaacgcttggccgctggtgctttccgttctcgcctcctttgcagttgccggctactccatggcgcaggacccgcatgatcaggcgggttcgttaccgcaggagatcgcatctgcggcacctgtctatggcggcgaagtgcctgacggtgactggcatcaatatggccgcacaccctatggccagcgttattcgccgctgacgcaggtgaatgtggacaatgtctcgcagttgaaggaagcctggcgttatcagacgggggacgtgaagctgcctgatgatgtgggtgagaccacctatcaggtcacgccactcaagatcggcaatacgctttatatctgcacgccgcataattgggcgatcgccatcgatgccgccaccggcaaggaaaaatggaaatacgaccccaatgtcggtctcaatcctgatcgccagcaccagacgtgccgtggcgtttcctattatgccgaaccgaacgccgctgccggcacggcctgcgcccagcgcgtctacctgccgacctcggacgcgcggctgatcgcgctcgatgcggccaccggccaggtctgcacctcctttgccgatcagggtgtgctgcatcttgaacagggcatgaagtacaatcccgccggttattattattcgacctcgccgccggtcatcgcggctggcaaaatcatcatcggcggcgcggtgaacgacaattattcgacgcaggagcagtccggcgtcatccgcgctttcgatgtgaatagcggtgctctcatctggaactgggattccggcaacccgcagaagaccgagccgatcgcggcgggtgagacctatacgaccaactcacccaacagctggtcggtgctgagttatgacgaaggcctcggcctcgtctacgtgccgcttggcaaccaggtgccggaccagcttggcatgggccgcagcgagaatgtcgagaaatattcctcctcgattgtcgcgctcgatatcaatacgggcaaggaccgctgggtgcgccagacggtacatcacgatctctgggacatggatgtgccggcccagccggtgctgctcgacatcaccaaggatggccagacggttccggccctcgtgggtcccaccaagcagggcgacatctacgtgctcgacaggcgcaccggtgagccgcttctgccgattaccgaggaaccggcgccgaccggagccatccctgaagacttcacatccccgacgcagccaacctcggcgctgtcgttcaagccggaaccgctgcaggaaaagaacatgtggggcgtctccatgttcgaccagctcgcctgccgcatccgcttccatcagctgaattacaagggccgctatacaccgccttcgctcaacggctcgatcatctatcccggcaatttcggcacgttcaactggggcagcgtggcggtcgatcccgagcgtcaggtgatgttcgggatgccaacctatctcgccttcacctcgcagctcgtgccgcgcgccgacattccgccgaagggacaggatgaaaagggcagcgaacagggcctcaaccgcaatgacggtgcgccctatggcgtctttatggggccattcctcggtccgctaaaaatcccctgccaggccccgccatggggttatgtcgcgggtgccgatctgcggaccggcgatgtcgcctacaagcataagaacggcacggtctatgacatgacgccgctgccgctacccttcaaggtgggggtgccgggcattggcggaccgatgatcaccaagggcggcgtcgccttcctcggtgcggccgtcgacaactatctgcgcgcctatgatctcaccacgggcaaagagctctgggaagcgcgtctgccagccggcggtcaggcaacgcccatgacctactcgctcgaaaacggaaaacaatatgtagtgatggtcgcgggcggccacggttcggttggtaccaagcccggtgattacgtcatcgcgtatacgctgccctga

SEQ ID NO: 35493 - protein, 778 aa, Agrobacterium tumefaciens str. C58
MAVTVTAVILTLIGLALFGFGSQLVMLGGSFYYLLSGLAFLLTAVLLFKRNRAALHVYAVFIVATLAWAVWEVGFDWWQLGPRGGVIILIGLWLLVPWVRKPLGFSSPTGLSYSPNAWPLVLSVLASFAVAGYSMAQDPHDQAGSLPQEIASAAPVYGGEVPDGDWHQYGRTPYGQRYSPLTQVNVDNVSQLKEAWRYQTGDVKLPDDVGETTYQVTPLKIGNTLYICTPHNWAIAIDAATGKEKWKYDPNVGLNPDRQHQTCRGVSYYAEPNAAAGTACAQRVYLPTSDARLIALDAATGQVCTSFADQGVLHLEQGMKYNPAGYYYSTSPPVIAAGKIIIGGAVNDNYSTQEQSGVIRAFDVNSGALIWNWDSGNPQKTEPIAAGETYTTNSPNSWSVLSYDEGLGLVYVPLGNQVPDQLGMGRSENVEKYSSSIVALDINTGKDRWVRQTVHHDLWDMDVPAQPVLLDITKDGQTVPALVGPTKQGDIYVLDRRTGEPLLPITEEPAPTGAIPEDFTSPTQPTSALSFKPEPLQEKNMWGVSMFDQLACRIRFHQLNYKGRYTPPSLNGSIIYPGNFGTFNWGSVAVDPERQVMFGMPTYLAFTSQLVPRADIPPKGQDEKGSEQGLNRNDGAPYGVFMGPFLGPLKIPCQAPPWGYVAGADLRTGDVAYKHKNGTVYDMTPLPLPFKVGVPGIGGPMITKGGVAFLGAAVDNYLRAYDLTTGKELWEARLPAGGQATPMTYSLENGKQYVVMVAGGHGSVGTKPGDYVIAYTLP

SEQ ID NO: 35494 - DNA, 2430 bp, Agrobacterium tumefaciens str. C58
  CDS (1)..(2430): transl_table=11
atgggtaatccagcaacttcattgtcgctcccggccagattatggctgttggcgctcggcgcggtcatcatcgctgcgggcctgttctttgccattggcggctggcagctcgtcgccctcggtggcagcccctatttcatcatcgcaggtctttcgctcatcgtttcgggcctgctgatcctgctgcgcaagccggcaggcgcgcttcttttcggtcttgttttcatcctcaccggcgtctgggctgtatgggaagcgggccttcatttctggccgctgatttcccgtctgctggccatcggggttggcgcaaccgtcgttgccctgtcatacccgctgctgcgccgtgcagccggcaaaacgccggcatatggctcttctttcgcggtagccgctgttctcgccatcgcttccggggccggttttgccggcatgttcgtggcgcatccgaccgttgccttcaatggcgagccggcggcgctgacgccggtcaagccggaaacggagcagaagaactgggaacattacggcaatacgtccggcggcagccgtttcgtggcgcttgatgaaattacccgagacaacatcaagaacctcgaagtcgcctggacctaccacaccggcgataccccgatcagccccggcgccaacggtgcggaagaccagcagacgccgctgcaggtaggtgacaccgtgttcctgtgcacgccgcacaacaatgtcatcgctctcgatgccgataccggaaccgagaagtggaaggcggaaatcaattcgaaatcctccgtctggatgcgttgccgcggccttgcctatttcgatgccaaggcgccgctgaagcaaccgactgcgccgggctccacgcccgtcacggccgcggttgtggccgaaggcgcactttgccagcgccgtattctgatgaacaccatcaatgcggaactcatcgcgcttgatgcggacacgggcgcgttttgccctgacttcggcacaaatggccgcgtcgatctgaagatcggtatgggagatgcaccggacccgcaatatgtcctgacctcggcacccacgctggccggcacgaccgtcgttgtcggcggccgtatcgccgataacgtgcaggtggacatgcccggcggtgtgatgcgcggtttcgacgtggtcacgggcgagcttcgctgggcttttgaccccggcaatcccgatatcaccaagctgccgcctccgggccagacttacacacgttccacgccgaacgtctgggcatccatgtcctacgatccggacctgaacacggtcttcatgcccgtcggcagcccttcggtcgatctttatggcgcgacacgcacgccgctcgaccataaatatggtgcctccatgctggcgctcgatgccacgaccggccgcgaaaagtgggtataccagacggttcataacgacctctgggacttcgacgtgccgatgcagccgagcttcgtcgatttcccgaaggctgacggaaccagcgttccggcgctggtcttcggcaccaaggcggggcagctctacgtgctcgaccgcgcgacgggacagccgctgaccaaggtggaagaggtttccgtcaaggctgccaatattcccaatgagccctacgcccccacgcagccgcgttccgtcggcatgccgcagatcggtgcgcagacgctgacggaagccgatatgtggggtgcgaccccgttcgaccagcttttgtgccgcatcgccttcaagggcatgcgttatgaggggctgtatacggcgcccggcacggacctctcgctcgccttcccgggttcgctcggcggcatgaactggggcggtctgtcgaccgatccgaccaccaacactatcttcgtcaacgatatgcgcctcggtctctggatcgagatgaaggaagccgcccccaccaaggccgttgccagcggtggcgaaagcgtcaataccggcatgggcgtcgttccgatgaagggcacgccctatgcggtgaacaagaaccgcttcctgtcggctctcggcatcccatgccaggctccgccctatggcaccatgaccgcgatcgacatgaagacgcagcagatcaagtggcaggtgccggtcggcaccgtcgaggatacgggtccgctcggtatcaagatgggtctgccgatcccgatcggcatgccgacgctcggcggcacgctcgccacccagggcggcctcgtcttcatcgccggtacgcaggattattatctgcgcgccttcgatacggcgaccggcaaggaagtctggaaggcccgccttccggtcggcagccagggcggaccgatgagctacaagtctccgaagacgggcaagcaatatgtcgtcatctcggccggcggtgcccgccagtctcccgatcgcggcgactacgtcatcgcttatgcattgcccaactga

SEQ ID NO: 35495 - protein, 809 aa, Agrobacterium tumefaciens str. C58
MGNPATSLSLPARLWLLALGAVIIAAGLFFAIGGWQLVALGGSPYFIIAGLSLIVSGLLILLRKPAGALLFGLVFILTGVWAVWEAGLHFWPLISRLLAIGVGATVVALSYPLLRRAAGKTPAYGSSFAVAAVLAIASGAGFAGMFVAHPTVAFNGEPAALTPVKPETEQKNWEHYGNTSGGSRFVALDEITRDNIKNLEVAWTYHTGDTPISPGANGAEDQQTPLQVGDTVFLCTPHNNVIALDADTGTEKWKAEINSKSSVWMRCRGLAYFDAKAPLKQPTAPGSTPVTAAVVAEGALCQRRILMNTINAELIALDADTGAFCPDFGTNGRVDLKIGMGDAPDPQYVLTSAPTLAGTTVVVGGRIADNVQVDMPGGVMRGFDVVTGELRWAFDPGNPDITKLPPPGQTYTRSTPNVWASMSYDPDLNTVFMPVGSPSVDLYGATRTPLDHKYGASMLALDATTGREKWVYQTVHNDLWDFDVPMQPSFVDFPKADGTSVPALVFGTKAGQLYVLDRATGQPLTKVEEVSVKAANIPNEPYAPTQPRSVGMPQIGAQTLTEADMWGATPFDQLLCRIAFKGMRYEGLYTAPGTDLSLAFPGSLGGMNWGGLSTDPTTNTIFVNDMRLGLWIEMKEAAPTKAVASGGESVNTGMGVVPMKGTPYAVNKNRFLSALGIPCQAPPYGTMTAIDMKTQQIKWQVPVGTVEDTGPLGIKMGLPIPIGMPTLGGTLATQGGLVFIAGTQDYYLRAFDTATGKEVWKARLPVGSQGGPMSYKSPKTGKQYVVISAGGARQSPDRGDYVIAYALPN

SEQ ID NO: 35496 - DNA, 2334 bp, Sinorhizobium meliloti 1021
  CDS (1)..(2334): transl_table=11
atggtcatcgtcctgaccgccgtcgtcttcgccgtgatcggcctcgccctctgtgggggcggcacgcggctcctgctgctcggcggcagcccgtattatctcatcgccggcttgggctttctgctcaccgcgtttttgctctttcgccgccgcgccgccgcgctttgggtctatgcgctggtcgttctcgggtcgctcgcatgggcgatctgggaggtgggcttcgattggtggcaactcgggcctcggggcggcgtgatcatcctgctcgggctgtggctgctaaccccatggatccggcgacccctcggcttcgtcagccccaccggcgagcaatatggggcaagcgcctggccgcttgcactggtgagcctcctctcggtcggtgtcgccctctattcgatgacgcaggacccccatgacattcgcggcgatctgcccggcgaagtcgcggcgaacgcgaacctcgggggcaacgtaccgccgggcgaatggcaccaatatggtcgcacgcccttcggtcaacgttactccccgctcgaccagatccgtccggaaaacgtcgccaacctgcaggtggcgtggcaataccagaccggagacgtgaagctgcccgaagacgtcagcgaaaccacttatcaggtgacgccgctgaaggtgaaggacacgctctatgtctgcacgccgcacaactgggcgatcgcgctcgacgcagccaccggtcaggagaagtggaaatacgattccaattccggcatgaacccggatcgccagcatcagacctgccgcggcgtcacctattgggccgatccggccgcagcgcccggcagcccctgcgccgagcgcgtctatctgccgacatcggacgcccgcctgatcgcgctcgacgcgacgaatggcgaggtctgcaccagcttcgccgacaacggcgtcctgcatctcgaacagggcatgaagcacaaccccgccggctactactattcgacctcgccgcccgtcgccgtcggcgacaggctcatcatcggcggggcggtcaacgacaactattccaccacggaacagtccggcgtgatccgcgctttcaacatcaacaccggcgcactcatctggaattgggacagcgggaatccggacgtaacggcgcccctccctccgggtcaaacctacaccaccaattcgccaaacagctggtccgtcttcagctatgacgaagggctcggcctcgtctacatccccatgggcaaccaggtgcccgaccagctcggcatgggccgcagcgagcatgtggagaaatactcctcctccatcgtcgccctggacatcaatacgggcgcggtacgctgggtacggcagacggtgcatcacgatctctgggatatggacgtacccgcccaacctgcccttctcgacatcacgagagaggacggaaccgtcgtgccggcactcgtcgggcctaccaagcagggcgacatctatgtgctcgaccggcgaagcggggagccgatcatcccgatcgaggaagtacccgctcccggcggtgcgatccccgaggatttcacggcccccacccagcccgtctcaggtctcaccttcatgcccccgccgctcatggagcgcgacatgtgggggatcagcatgttcgaccagcttgcatgccgcatcgaattcagaacgctgaaatacgagggacgctacacgccgccttccctcgaggggacgatcgtctatcccggcaatttcgggactttcaactggggctccgtcgccgtggatccggagcgccaggtgatgttcgggatgccgacctatctcgccttcacctcgcggctcgttccgcgcgaccagatcgccccgaagggcgaaggcgaaaagggtagcgaacagggcctcaaccgcaatgaaggcgcaccttacggggtctttatgggtccgttcctcggcccgctcgggattccctgccaggcaccgccatggggttatgtcgcaggcgccgatctcagaacgggcaagatcgcctacaagcacaagaacggcacggtctacgacatgacgccgctgccgctgcccttcaagctgggcgttccgggcatcggcggacccatgataaccaagggcgggctcgctttcctgggtgccgcggtcgacgattacttccgggcttacgacctgaccacgggcgaacagctctgggaagcgcggcttccggccggcggccagtcgacgccgatgacctatacggtcggcgagaagcagtatgtcctgatcgtcgcgggcggacacggttcggtcggcaccaagccgggcgactatgtcatcgcctatacgctgccctga

SEQ ID NO: 35497 - protein, 777 aa, Sinorhizobium meliloti 1021
MVIVLTAVVFAVIGLALCGGGTRLLLLGGSPYYLIAGLGFLLTAFLLFRRRAAALWVYALVVLGSLAWAIWEVGFDWWQLGPRGGVIILLGLWLLTPWIRRPLGFVSPTGEQYGASAWPLALVSLLSVGVALYSMTQDPHDIRGDLPGEVAANANLGGNVPPGEWHQYGRTPFGQRYSPLDQIRPENVANLQVAWQYQTGDVKLPEDVSETTYQVTPLKVKDTLYVCTPHNWAIALDAATGQEKWKYDSNSGMNPDRQHQTCRGVTYWADPAAAPGSPCAERVYLPTSDARLIALDATNGEVCTSFADNGVLHLEQGMKHNPAGYYYSTSPPVAVGDRLIIGGAVNDNYSTTEQSGVIRAFNINTGALIWNWDSGNPDVTAPLPPGQTYTTNSPNSWSVFSYDEGLGLVYIPMGNQVPDQLGMGRSEHVEKYSSSIVALDINTGAVRWVRQTVHHDLWDMDVPAQPALLDITREDGTVVPALVGPTKQGDIYVLDRRSGEPIIPIEEVPAPGGAIPEDFTAPTQPVSGLTFMPPPLMERDMWGISMFDQLACRIEFRTLKYEGRYTPPSLEGTIVYPGNFGTFNWGSVAVDPERQVMFGMPTYLAFTSRLVPRDQIAPKGEGEKGSEQGLNRNEGAPYGVFMGPFLGPLGIPCQAPPWGYVAGADLRTGKIAYKHKNGTVYDMTPLPLPFKLGVPGIGGPMITKGGLAFLGAAVDDYFRAYDLTTGEQLWEARLPAGGQSTPMTYTVGEKQYVLIVAGGHGSVGTKPGDYVIAYTLP

SEQ ID NO: 35498 - DNA, 2391 bp, Salmonella typhimurium LT2
  CDS (1)..(2391): transl_table=11
atggcagaaaataacgcacgatcgccacgattactcgtgacgctgacggccctctttgcagcactttgtgggctgtatcttcttatcggaggtgtctggctggttgctattggcggttcctggtactaccccatcgcgggcctcgtgatgctggttgtggccggattgctatggcgcagtaaacgtgccgcactgtggctgtatgccgccctgctgctggcgacaatgatttggggcgtgtgggaagtcgggttcgacttctgggcgctcacgccgcgtagcgatatcctggtgtttttcggcatctggctaatattaccgtttgtctggcatcggctggtggttccttccagtggcgcagtggcggcgctggtcgtggcgttgctgattagcggcggcattctgacctgggccggcttcaacgacccgcaggagatcaacggtacgcttcgcgccgacgccacgcccgccgcaacaagttcgtcgatcgccgacgaagactggccggcctatgggcgcaatcaggaaggccaacgctattcgccgctgaaacagatcactgcggataacgttcaccaactgaaagaagcgtgggtcttccgcaccggcgatctgaaacagcccaacgatccgggtgaaatcaccaacgaagtgaccccgataaaagtcggcgatacgctttatctgtgtacagctcaccagcgtctgttcgcgctggacgccgccagcggtaaagagaagtggcattttgatcctcagttgaagaccgattcgtctttccagcatgtgacctgccgcggcgtctcttatcatgaggccaaagcggataccgcctcgccggaggtcatcgccgactgtccgcgccgtattatcctcccggtcaacgacggtcgccttttcgcggtgaatgccgaaaccggcaagctgtgtgaaaccttcgccaacaaaggcgtcctgaatctgcaaaccaatatgccggataccacaccgggactgtatgaaccgacgtcgccgccgattatcaccgataaaacaattgtcattgccggttcggtcacggataacttctctacccgcgaaacgtccggcgttatccgaggttttgatgttaatagcggtaaactcatgtgggccttcgatccgggggcgaaagatccgaacgcgattccagccgatgagcacgcttttacctttaactcgccgaactcctgggcgcctgccgcctatgatgcgaaactggatctggtctatctgccgatgggcgtgaccacgccggatatctggggcggtaaccgcacgccggagcaggagcgttatgccagctccatcctggcgctgaatgccaccaccgggaaactggcctggagttatcagaccgtccatcacgatctgtgggatatggacctgccggcacagccgacgctggcggatattaccgttgacggtactaccgttccggttatctatgcgccagcgaaaaccggtaatatctttgtgctggacagacgtaatggcgagctggtcgtgcccgccccggaaaaaccggtcccgcagggcgcggcaaaaggcgattacgtcgccaaaactcagccgttctctgatttaaccttccgcccgaaaaaagatctctccggcgcggatatgtggggcgcgaccatgttcgaccaactggtgtgccgcgtcatgttccaccagttgcgctatgaaggtatcttcaccccgccgtccgagcaggggacattggtattccctggcaacctggggatgtttgaatggggcggtatttccgtcgatccagaccgtcaggtcgctatcgctaacccgatggcgctgccgtttgtctcgaagctgatcccacgcggcccgggtaatccaatggagccgccgaaagacgcgaaaggtaccggtacagaagcgggtattcagccacagtacggcgtaccattcggcgtcacgctgaatccgttcctttcgccgtttggcctgccgtgtaaacaaccggcctggggctatatttccgcgttggatctgaagaccaatgaaatcgtgtggaagaaacgtatagggacgccgcgcgacagtatgccgttcccgatgccggttccggtgccgttcaacatggggatgcccatgctgggcgggccaatctcaaccgccggtaatgtgctgttcattgccgcgaccgccgacaactacctgcgcgcttataacatgagcaacggggaaaaactgtggcagggacgtttacccgccggaggccaggcaacgcctatgacctatgaggtaaacggtaagcagtacgtggtcgtttctgccggaggccacggttcgtttggtacgaagatgggcgactatatcgtggcctatgctttgcctgacgacgcgaaataa

SEQ ID NO: 35499 - protein, 796 aa, Salmonella typhimurium LT2
MAENNARSPRLLVTLTALFAALCGLYLLIGGVWLVAIGGSWYYPIAGLVMLVVAGLLWRSKRAALWLYAALLLATMIWGVWEVGFDFWALTPRSDILVFFGIWLILPFVWHRLVVPSSGAVAALVVALLISGGILTWAGFNDPQEINGTLRADATPAATSSSIADEDWPAYGRNQEGQRYSPLKQITADNVHQLKEAWVFRTGDLKQPNDPGEITNEVTPIKVGDTLYLCTAHQRLFALDAASGKEKWHFDPQLKTDSSFQHVTCRGVSYHEAKADTASPEVIADCPRRIILPVNDGRLFAVNAETGKLCETFANKGVLNLQTNMPDTTPGLYEPTSPPIITDKTIVIAGSVTDNFSTRETSGVIRGFDVNSGKLMWAFDPGAKDPNAIPADEHAFTFNSPNSWAPAAYDAKLDLVYLPMGVTTPDIWGGNRTPEQERYASSILALNATTGKLAWSYQTVHHDLWDMDLPAQPTLADITVDGTTVPVIYAPAKTGNIFVLDRRNGELVVPAPEKPVPQGAAKGDYVAKTQPFSDLTFRPKKDLSGADMWGATMFDQLVCRVMFHQLRYEGIFTPPSEQGTLVFPGNLGMFEWGGISVDPDRQVAIANPMALPFVSKLIPRGPGNPMEPPKDAKGTGTEAGIQPQYGVPFGVTLNPFLSPFGLPCKQPAWGYISALDLKTNEIVWKKRIGTPRDSMPFPMPVPVPFNMGMPMLGGPISTAGNVLFIAATADNYLRAYNMSNGEKLWQGRLPAGGQATPMTYEVNGKQYVVVSAGGHGSFGTKMGDYIVAYALPDDAK

SEQ ID NO: 35500 - DNA, 2472 bp, Xanthomonas campestris pv. campestris str. ATCC 33913
  CDS (1)..(2472): transl_table=11
atgtcgacattgcttcgtccctcccgtcgcggccattgggccctggcgattctgggaggcgtgattgtgctgctggggctggtgctgctggcaggtggtgcgtggctcgccacgctgggcggatcctggtattacgcaccggcaggcctggcgatgctgatcgctggcgtgttgctgttccgcggccgcaatgccggcgcgtggtggtttgccgccgtcgtggccgccacgctgctgtggacgtggtgggaatcgggcagtgattactggcgctgggtgccgcggctcgggttgatcgtgggcctggcgtttgtgctggcgctgctgttgcccaagctcgagcgcccggtgtcgcgcgccgtctcgcgcagcgtggctggcggactggcagtggtgtttgtggtggcctttgcgttggccttcgtgccgttcggaatcaccgaggccgagggtgcattgacgcaggtggcaggcatcgccgcaggtgtggtcaatcgccccgccgatggcgcacagccggcacagcccgccaatgcgccggtcgatgacgactgggccgcatatggacgcagccaggctgggcagcgctattcgccactcacccaaatcaatcgcgacaatgtcagccagctgcagcaggcgtgggtgttccataccggcgatgtgccgaccaagcgctggggcgccgaaaccacaccgttgaaggtcggcgacagcctgtatctgtgtagcgcgcgcaatcaggtgatcgcgctggacgcctccaccggcaagcagcgctggcgctacgaccccaaggtcaaggacgaggccattccatacaccgcggcctgccgcggggtgtcgtattacgaagtgccgacggcggcgccggccgcaaatgacgcagccgcttcgcaggcggcgacggcgcctgcgctgtgccgtacgcgcgtgatcgaaggcacgctggatgggcgcctgattgcattggatgcgcgcaccgggacaccatgcgcggacttcggcactcacggtcaggtcgacatcaccgtcggcatgggcgagacgccaccgggctacatctcgatcaactcgccgccggccatcgtgcgcggcgtggtggtcatcgggcatcaggtccttgacgggcaaaagcgttatgagccctcgggcgtgatccagggctttgacgcggtcaccggccagttgcgctgggcctgggacatgacccatcccgaatggaatggtgcaccgccgcctggccagacctggacgcgcggcacccccaacatgtggaccaccgcagcggccgacgagcagctgggttacgtgtatctgccgatgggcaattccaccgcggactactggagcagctcgcgcacgccgccggaaaaccgctatgccacctcgctggtggcgttggatgtgaccaccggcaagccggtgtggaatttccagaccacgcatatcgacgcatgggattacgacctcggctcgcagcccagcctgatcgatttccccaaggatggcgtcaacgtgccggccgtgttgctgccgagcaagcagggcgagttgtacgtgctggaccgtcgcaccggcgagccgctggttggcgtggaagagcgcgccgtgcccggcggtggtgtggagccgcagatgcgctccaagacccagccgttctcgctgtatcacacgctgcgcaagccggatctgaccgagcgcgacatgtggggcatgaccccgatcgatcagctggtgtgccgtatccagttccgcaaggcgagctacaagggcatctacacgccgcccgaagccgaccggcattccatcgaataccccggctataacggcggctcggactggggcagcgtggcggtggatccgcaccgtggcgtgatcgtggccaactacaacgacatgcccaactacaacatcctggtgccgcgcgccaaggcggacaaactgggctgggctccgcgcgatcaggtgcgtggcgatgccggtggtgccgaaggcgccggcgacccgcaggccggcacgccctacgcggtaaacgtcaacgccggctggcgtttgccgttcaccaagctgctgtgcaagcagccaccctatggcggcattcgcgccatcgatctgaagagcggcaagaccctgtgggaccgtccctttggcagtgcgcgcggcaacgggccgttcgggattcgctccggcctgccgatcgaaatcggcacgccgaacaacggtggctcggtggtcactgcgggtggtctgatcttcattgccgccgcaaccgatgacctgatccgtgcgatcgacctggccaccggcaaggagctgtggcacgccaagctgccggccggtggccaggccaatccgatggtctacgcgtacggcggccgcgagtatctggtgatcatggcggccggtcaccacttcatggaaacaccggcaggcgatgccctggtggcctacgcgttgccgcagcggtaa

SEQ ID NO: 35501 - protein, 823 aa, Xanthomonas campestris pv. campestris str. ATCC 33913
MSTLLRPSRRGHWALAILGGVIVLLGLVLLAGGAWLATLGGSWYYAPAGLAMLIAGVLLFRGRNAGAWWFAAVVAATLLWTWWESGSDYWRWVPRLGLIVGLAFVLALLLPKLERPVSRAVSRSVAGGLAVVFVVAFALAFVPFGITEAEGALTQVAGIAAGVVNRPADGAQPAQPANAPVDDDWAAYGRSQAGQRYSPLTQINRDNVSQLQQAWVFHTGDVPTKRWGAETTPLKVGDSLYLCSARNQVIALDASTGKQRWRYDPKVKDEAIPYTAACRGVSYYEVPTAAPAANDAAASQAATAPALCRTRVIEGTLDGRLIALDARTGTPCADFGTHGQVDITVGMGETPPGYISINSPPAIVRGVVVIGHQVLDGQKRYEPSGVIQGFDAVTGQLRWAWDMTHPEWNGAPPPGQTWTRGTPNMWTTAAADEQLGYVYLPMGNSTADYWSSSRTPPENRYATSLVALDVTTGKPVWNFQTTHIDAWDYDLGSQPSLIDFPKDGVNVPAVLLPSKQGELYVLDRRTGEPLVGVEERAVPGGGVEPQMRSKTQPFSLYHTLRKPDLTERDMWGMTPIDQLVCRIQFRKASYKGIYTPPEADRHSIEYPGYNGGSDWGSVAVDPHRGVIVANYNDMPNYNILVPRAKADKLGWAPRDQVRGDAGGAEGAGDPQAGTPYAVNVNAGWRLPFTKLLCKQPPYGGIRAIDLKSGKTLWDRPFGSARGNGPFGIRSGLPIEIGTPNNGGSVVTAGGLIFIAAATDDLIRAIDLATGKELWHAKLPAGGQANPMVYAYGGREYLVIMAAGHHFMETPAGDALVAYALPQR

SEQ ID NO: 35502 - DNA, 2475 bp, Xanthomonas campestris pv. campestris str. ATCC 33913
  CDS (1)..(2475): transl_table=11
atgactgatcaatcctctaaacgcgggctcggcacttggctgttggtagcctatgccgtggtgctcgccgtgcttggtgcggcgctcgcctatgaaggcgggcgcctggtggccgttggcggctcctggtattacgtgctggccggtatcgccgtgctggtggccggtgtgctgctggcactgggcaaacgcgctggcctgtggctgtttggcgctacgttggcggccaccatcgtgtgggcgctgtgggaagtgggcctggatggctggggcctgatcccacgtctggcctggatctcggtgctcggcctggtgctgttgccgttctggggcgtggcgcggcggcgcatgcagccgttgtccgggctcggctatgtcgtggtcaccggcgtgctgccggtgctgggtgcggcgctgatcctgtggccgctgctggtgccgcgcaatgtggaactggccgatgcatccaagcagccggccgatgcggcaacgccgttcagccgtggcagcgtgcccagcccggacgggaacgtggcggccaaccacgatgccagtaactggaccgcctacgccggttccaacctgtccaaccattacacccccggcgcgcagatcacgccggagaacgtcaagggcctcaaggtggcctgggaattccataccggcgatctcaagccgaaggattccaagctgggctatgcgttccagaacaccccgctcaaggtcggcgacctgctctacatctgcaccccgacccagaaggtgattgcggtggaggcggccaacggcaaggagcgctggcgcttcgacccgcagaccaatccgaaggcgatggccggcgtggccgccaccacatgccgcggcgtgtcgtactaccaggcgccggaaggcactgccgagtgcccgacgcggatcttctggccgatggtcgatggccgcctgggtgcgctggatgcgcagaccggcaagctctgcgccagcttcggtaacaacggctatgtggacctcaatgccggcaccggcaacaccaagccgggcttcgtcggcccgacctcgccgccggtggtcatgcgcggtgtggtgatccagcccaccgggcaggtgcgcgacggtcaggaacgcgatgcgccgtccggcgtggtgcgcggcttcgacgcgctcaccggccagctgcgctgggcctgggatctgggcaacccggccatcaccgccgaaccgccggccggccagacctatacccgctccaccccgaacgtgtggtcgctgatggccgccgatgacgagctggggctggtgtatctgcccaccggcaacgctgccggcgacttcttcggcaagggccgcaccccgcaggaagaggaatacaccgcctcgctggtggccgtggatgcggcaaccggcaaggagcgctggcacttccgtaccgtcaatcacgatctgtgggactacgacatcggcccgcagccgaacctggttgattggccggttgccggcggtggcacccgccccgccgtgatccaggccaccaagtccggccaggtgttcgtgctcgaccgcgccaccggccagccgatcatgcctgtcaagcagatcgccgtgccgcagggcaccgaccatggcgactggaccgcatccacccagccggtgtcgccgggcatgcccaacaccgtgggtgcgcccagccgtgactacgagaccatcgttgaatctgacgcgtggggcatgaccccgttcgaccagctcgcttgccgcatcgagttcaagaagctgcggtacgaaggcatgttcaccccgccaagcctgcagggctcgctgtcgttcaccggcaaccatggcggcatcaactggggcggcgtgtcggtcgatctgcagcgcggcatcatggtgatgaacagcaatcgcctgccctataccgagcacgtctacccgcgcacggtgatgaacgagctgggcgtggtgtcggtgttcaacggcagcagcaagaccaagggctacatggcgcaggaaggcctggcctatggcgcgcgcaaggagccgtggatgtcgccgctcaacacgccgtgcgtggcaccgccgtggggctatatctccggcgtggatctgcgcacgcagcaggtgatctggcgccgtccgctgggcaccggttacgaccagggcccaatgggcatcccgtccaagaccaagttcgagatcggcaccccgaacaacagcggctcgctggccactgccggcggcgtcaccttcatcggtgccagcctggacaacttcatccgcggctttgacacccgcaccggcaagcaggtctgggagacccgcgtgcctgcgggcccgcaggccgcgccgctgagctacaccatcgatggcaagcagtacatcgttgccgcggtgggtggccatgaccgcatggaaaccaagtccggcgacagcgtcattgcctgggcactgcccgacgacgcggccgccagcgccaaataa

SEQ ID NO: 35503 - protein, 824 aa, Xanthomonas campestris pv. campestris str. ATCC 33913
MTDQSSKRGLGTWLLVAYAVVLAVLGAALAYEGGRLVAVGGSWYYVLAGIAVLVAGVLLALGKRAGLWLFGATLAATIVWALWEVGLDGWGLIPRLAWISVLGLVLLPFWGVARRRMQPLSGLGYVVVTGVLPVLGAALILWPLLVPRNVELADASKQPADAATPFSRGSVPSPDGNVAANHDASNWTAYAGSNLSNHYTPGAQITPENVKGLKVAWEFHTGDLKPKDSKLGYAFQNTPLKVGDLLYICTPTQKVIAVEAANGKERWRFDPQTNPKAMAGVAATTCRGVSYYQAPEGTAECPTRIFWPMVDGRLGALDAQTGKLCASFGNNGYVDLNAGTGNTKPGFVGPTSPPVVMRGVVIQPTGQVRDGQERDAPSGVVRGFDALTGQLRWAWDLGNPAITAEPPAGQTYTRSTPNVWSLMAADDELGLVYLPTGNAAGDFFGKGRTPQEEEYTASLVAVDAATGKERWHFRTVNHDLWDYDIGPQPNLVDWPVAGGGTRPAVIQATKSGQVFVLDRATGQPIMPVKQIAVPQGTDHGDWTASTQPVSPGMPNTVGAPSRDYETIVESDAWGMTPFDQLACRIEFKKLRYEGMFTPPSLQGSLSFTGNHGGINWGGVSVDLQRGIMVMNSNRLPYTEHVYPRTVMNELGVVSVFNGSSKTKGYMAQEGLAYGARKEPWMSPLNTPCVAPPWGYISGVDLRTQQVIWRRPLGTGYDQGPMGIPSKTKFEIGTPNNSGSLATAGGVTFIGASLDNFIRGFDTRTGKQVWETRVPAGPQAAPLSYTIDGKQYIVAAVGGHDRMETKSGDSVIAWALPDDAAASAK

SEQ ID NO: 35504 - DNA, 2478 bp, Xanthomonas axonopodis pv. citri str. 306
  CDS (1)..(2478): transl_table=11
atgactgatcaatcctcaaaacgtgggctaggcacctggttgctggtggcctatgccgtggtgatcgccgtgcttggcgcggtgctcgcctaccagggcggccgcctggtggccgtgggcggctcctggtattacctgatcgcgggtattgccctgttcctggcgggcgtcctgctcgcgctgggcaagcgcgccgggctgtggctgtttggcgccacgctggccggtaccatcgcctgggcgctgtgggaagtgggcctggatggctggggcttggtgccgcgcctggccatgatgtcggtgctggggctggtgctgctgccgttctggggggtggcgcgtcgtcgcatgcagccgttgtccggcctgagctatgcgctggtgaccggcgtgctgccaatcctgggcgccgcgctgatcctgtggccgctgctgatgccgcgcaatgtcgagctggccgatgcctccaagttgccggccgacagcgccacggccttcagccgcggcaccgtgcccagccccgacggcaacgtcgcggccaatcatgacgccagcaactggacctcctatgcgggttccaacctgtccaaccactacacgcccggcgcgcagatcacgccggacaacgtgaagaatctcaaggtggcctgggaattccacaccggcgacctcaagcccaaggactccaagctgggctacgccttccagaacaccccgctcaaggtcggcgacctgctctacatctgtacccccacccagaaagtgatcgcggtggaagcggccaacggcaaggagcgctggcgcttcgatccgcagaccaacccaaaggcgatggcgggcgtggctgccaccacctgccgtggcgtgtcgtactaccaggcgcccgaaggcaccgccgagtgcccgacccggatcttctggccgatggtcgatggccgcctcggcgcgctggatgcgcagaccggcaagctgtgcaccagcttcggcaacaacggctatgtcgatctgaatgcgggcaccggcaacaccaagccgggcttcgtcggccccacctcgccgccggtggtgatgcgtggtgtggtgatccagccgaccggccaggtccgcgatggtcaggaaggcgatgcgccgtccggcgtggtgcgtggcttcgatgcgctcaccggccagctgcgctgggcctgggacctgggcaacccggcgatcaccgccgagccgccggccggccagacctacacgcgctcaaccccgaacgtatggtcgctgatggccgccgacgacgagctgggcctggtctatctgcccaccggcaatgcatccggcgacttcttcggcaagggccgcaccccgcaggacgaggaatacaccgcctcgctggttgcggtggatgccgccaccggcaaggaacgctggcacttccgtaccgtcaaccacgacctgtgggactacgacatcggcccgcagccgaacctggtcgattggccggtcgctggcggcggcacgcgtactgcggtgatccaggccaccaagtccggccaggtgttcgtgctggaccgcgccaccggcgagccgatcatgccggtcaagcagattccggtaccgcagggaaccgaccacggcgactggaccgccgccacgcaaccgatctcgccgggcatgcccaacaccgtgggcgcgccgagccgtgagttcgaaaaaatcatcgaatccgatgcctggggcatgactccgttcgaccagttggtctgccgtatccagttcaagcagctgcgctacgaaggcatgttcaccccgcccaccctgcaggggtcgctggccttcaccggcaaccacggcggcatcaactggggcggcgtttcggtggacctgcagcgcggcatcatggtgatgaacagcaatcgcctgccctacaccttgcaggtgtatacccgccagaagatggacgagctgggcgtggtgtcggtgttcgacggcaagagcaagacccccggctacatggcgcagaagggcctggcctacggcgcccgcaaggagccgtggatgtcgccgctcaacaccccgtgcgtggcaccgccgtggggctacatcgccggtgtggacctgcgcacgcagcaggtgatctggcgtcgtccgctgggcaccggttacgaccagggtccgatggccatcccgtccaagaccaagttcgagatcggcacgcccaacaacagcggctcgctggccaccgctggcggggtgaccttcatcggcgcgaccctggacgacttcatgcgcggcttcgacacccttaccggcaagcaggtctgggaaacccgcgtccccgccgggccgcaggcagcgccgatgagctacaccatcaacggcaagcaatacatcgtggccgccgtcggtggacacgaccgcatggaaaccaagtcgggcgacagcgtcattgcctgggccctgcccgacgatgcgcaggccgcgcctgccaagtaa

SEQ ID NO: 35505 - protein, 825 aa, Xanthomonas axonopodis pv. citri str. 306
MTDQSSKRGLGTWLLVAYAVVIAVLGAVLAYQGGRLVAVGGSWYYLIAGIALFLAGVLLALGKRAGLWLFGATLAGTIAWALWEVGLDGWGLVPRLAMMSVLGLVLLPFWGVARRRMQPLSGLSYALVTGVLPILGAALILWPLLMPRNVELADASKLPADSATAFSRGTVPSPDGNVAANHDASNWTSYAGSNLSNHYTPGAQITPDNVKNLKVAWEFHTGDLKPKDSKLGYAFQNTPLKVGDLLYICTPTQKVIAVEAANGKERWRFDPQTNPKAMAGVAATTCRGVSYYQAPEGTAECPTRIFWPMVDGRLGALDAQTGKLCTSFGNNGYVDLNAGTGNTKPGFVGPTSPPVVMRGVVIQPTGQVRDGQEGDAPSGVVRGFDALTGQLRWAWDLGNPAITAEPPAGQTYTRSTPNVWSLMAADDELGLVYLPTGNASGDFFGKGRTPQDEEYTASLVAVDAATGKERWHFRTVNHDLWDYDIGPQPNLVDWPVAGGGTRTAVIQATKSGQVFVLDRATGEPIMPVKQIPVPQGTDHGDWTAATQPISPGMPNTVGAPSREFEKIIESDAWGMTPFDQLVCRIQFKQLRYEGMFTPPTLQGSLAFTGNHGGINWGGVSVDLQRGIMVMNSNRLPYTLQVYTRQKMDELGVVSVFDGKSKTPGYMAQKGLAYGARKEPWMSPLNTPCVAPPWGYIAGVDLRTQQVIWRRPLGTGYDQGPMAIPSKTKFEIGTPNNSGSLATAGGVTFIGATLDDFMRGFDTLTGKQVWETRVPAGPQAAPMSYTINGKQYIVAAVGGHDRMETKSGDSVIAWALPDDAQAAPAK

SEQ ID NO: 35506 - DNA, 2331 bp, Shigella flexneri 2a str. 301
  CDS (1)..(2331): transl_table=11
ttgcagcgctggctgtatctactcattggcggaggctggctggtcgcgattggcggctcctggtactaccctatcgctggccttgtgatgctcggcgtcgcctggatgctgtggcgcagtaaacgcgccgcgctttggctatacgcagccctgctgctcggcaccatgatttggggcgtctgggaagttggtttcgacttctgggcgctgactccgcgcagcgatattctggtcttcttcggcatctggctgatcctgccgtttgtctggcgtcgcctggtcattcctgccagcggcgcagttgccgcactggtggtcgcactgctgattagcggtggtatcctgacctgggccggatttaacgatccgcaggagatcaacggcaccttaagcgccgatgccacacctgccgaagctatctcccccgttgccgatcaggactggcctgcgtatggccgcaatcaggaaggtcaacgcttttcaccactgaagcaaattcacgccgataacgtccacaagctgaaagaagcctgggtgttccgtactggcgatgtgaagcagccgaacgatccgggtgaaatcaccaatgaagtgacgccgattaaagtgggcgataccctttacctgtgtaccgctcaccagcgcctgtttgcgcttgatgccgccagcggcaaagagaaatggcattacgatcctgagctgaaaaccaacgagtctttccagcacgtaacctgccgtggcgtctcttatcatgaagccaaagcagaaacggcttcgccggaagtgatggcggattgcccgcgtcgtatcattcttccagtgaatgatggtcgcctgattgcgattaacgctgaaaacggcaaactgtgcgaaaccttcgccaataaaggcgtgctcaatctgcaaagcaatatgccagacaccaaaccgggtctgtatgagccgacttctccgccaattatcaccgataaaaccatcgtgatggccggttcagtcaccgataacttctcaacccgcgaaacgtctggcgtgatccgtggttttgatgtcaacaccggggagctgctgtgggcttttgatccgggcgcgaaagatccgaacgcaatcccgtcagacgaacacacctttacctttaactcaccaaactcgtgggcaccagcggcctatgacgcgaagctggatctggtctatctgccgatgggcgtgaccacgccggatatctggggcggtaaccgcacaccggaacaggaacgttatgccagctcgattctggcgctgaatgccactaccgggaaactggcgtggagctaccagaccgttcaccacgacctgtgggacatggatcttccggcacagccgacgctggcggacatcaccgttaatggtcagaaagtgccgattatttacgctccggcgaaaaccggtaacatttttgtgctcgatcgtcgtaatggcgaactggtggttccggccccggaaaaaccggttccccaaggtgctgccaaaggcgattacgttacccctactcaaccattctcggaactgagcttccgtccgacgaaagatttgagcggtgcggatatgtggggagccaccatgtttgaccaactggtgtgccgcgtaatgttccaccagatgcgctatgaaggcattttcacgccgccatctgaacagggtacgctggtcttcccgggtaacctggggatgttcgaatggggcgggatttccgttgatccaaatcgtgaagtggcaattgccaacccaatggcactgccgtttgtttcgaaactgctcccgcgtggtcctggcaacccgatggagcagccgaaagatgccaaaggcacgggtacggaatccggcattcagccacagtacggtgtaccgtatggtgtcacgctcaacccgttcctctcaccatttggtctgccatgtaaacagccagcatggggttatatctcggcgctggatctgaaaactaatgaagtggtgtggaagaaacgtattggtacgccgcaggacagtatgccgttcccgatgccggttccggtgccgttcaatatgggtatgccgatgctgggcgggccaatctccacggcgggtaacgtgctgtttatcgccgctacggcagataactacctgcgcgcttacaacatgagcaacggtgaaaaactgtggcagggtcgtttaccggcgggtggtcaggcaacaccgatgacctatgaagtgaatggcaagcagtacgtggtgatctccgcaggcggtcacggttcatttggtacgaagatgggcgactatattgtggcttatgccctgccggatgatgtgaaataa

SEQ ID NO: 35507 - protein, 776 aa, Shigella flexneri 2a str. 301
MQRWLYLLIGGGWLVAIGGSWYYPIAGLVMLGVAWMLWRSKRAALWLYAALLLGTMIWGVWEVGFDFWALTPRSDILVFFGIWLILPFVWRRLVIPASGAVAALVVALLISGGILTWAGFNDPQEINGTLSADATPAEAISPVADQDWPAYGRNQEGQRFSPLKQIHADNVHKLKEAWVFRTGDVKQPNDPGEITNEVTPIKVGDTLYLCTAHQRLFALDAASGKEKWHYDPELKTNESFQHVTCRGVSYHEAKAETASPEVMADCPRRIILPVNDGRLIAINAENGKLCETFANKGVLNLQSNMPDTKPGLYEPTSPPIITDKTIVMAGSVTDNFSTRETSGVIRGFDVNTGELLWAFDPGAKDPNAIPSDEHTFTFNSPNSWAPAAYDAKLDLVYLPMGVTTPDIWGGNRTPEQERYASSILALNATTGKLAWSYQTVHHDLWDMDLPAQPTLADITVNGQKVPIIYAPAKTGNIFVLDRRNGELVVPAPEKPVPQGAAKGDYVTPTQPFSELSFRPTKDLSGADMWGATMFDQLVCRVMFHQMRYEGIFTPPSEQGTLVFPGNLGMFEWGGISVDPNREVAIANPMALPFVSKLLPRGPGNPMEQPKDAKGTGTESGIQPQYGVPYGVTLNPFLSPFGLPCKQPAWGYISALDLKTNEVVWKKRIGTPQDSMPFPMPVPVPFNMGMPMLGGPISTAGNVLFIAATADNYLRAYNMSNGEKLWQGRLPAGGQATPMTYEVNGKQYVVISAGGHGSFGTKMGDYIVAYALPDDVK

SEQ ID NO: 35508 - DNA, 2412 bp, Pseudomonas putida KT2440
  CDS (1)..(2412): transl_table=11
atgagcactgaaggtgcgaaccaaggaagccgctggctaccgcgcctgattggcgcgctgctgttgctgatgggcctggccctgctggccggcggtatcaagctgagccagctgggcggatcgctgtactacctgatcgccggtattggctttgccctttcgggcgtcctgctgctggcccaacgccagatcgccctgggcctgtatggcctggtgctgctgggcagcaccgtgtgggccctgttcgaagtaggcctggactggtggcaactggtgccacggctggctatctggttcgccatcggcgtggtgttgctgctgccgtgggcacgtcgcccgctgatcggcccagccagcaaagccaacactgcactgctcggcgtggcagtggtcgcttcgggcgcttgcgcgctggccagccagttcacccatcccggtgaagtgttcggcgaactgggccgcgacagcagcgaaatggccagcgccgccccggccatgcccgacggcgaatggcaggcctacggccgtaccgagcatggcgaccgctactcgccgctgcgccagatcaccccgcagaacgcctaccgtctggaagaagcctggcgcattcgcaccggtgatctgccaaccgaaaacgacccggtggagctgaccaaccagaacaccccgctgaaggtcaacggcatgctttacgcctgcaccgcgcacagtcgcctgctggcgctggacccggacactggcgcagaaatctggcgctacgacccgcaggtcaagagcccgaccggcaccttcaagggctttgcccacatgacctgccgtggcgtctcgtactatgacgaaaaccgctacgtcagccgcgacggcagcccggcgccgaaaattaccgatgcaggccaggccgtggcccaagcctgcccgcgtcgcctctatctgcctaccgcggatgcccgcctgatcgccatcaacgccgacaacggcaaggtctgcgaaggcttcgccaaccagggcgtgatcgacctcaccaccggcattggcccattcaccgccggcggctattactccacctcgcctgctgcgattacccgtgacctggtgatcatcggtggccacgtcaccgacaacgagtcgaccaatgagccgtccggggtgatccgcgcctacgacgtgcacgacggccacctggtgtggaactgggacagtaacaacccggacgacaccaagccattggctgccggcaaaatgtacagccgcaactcggccaacatgtggtcgatcgccagcgtcgacgaagaccttggcatgatctacctgccgctgggcaaccagaccccggaccagtggggcgccgaccgcaccccgggcgccgagaagtacagcgccggcgtggtcgcccttgacctggccaccggcaaggcacgctggaactatcagttcacccaccacgacctgtgggacatggacgtcggcagccagccgaccctggtacacctgaaaaccgacgatggtgtgaaaccggcgatcatcgtaccgaccaagcaaggcagcctgtacgtgctcgaccgccgcgacggtacgccaatcgtgccgatccgcgagatccccaccccacaaggcgcagtggaaggcgaccacacctcgcccacccaggcccgctccgacctcaacctgctcggcccagagctgaccgaacaggccatgtggggcgccacgcctttcgaccagatgctgtgccgcatccagttccgcgaactgcgctacgaaggccagtacaccccgccatccgaacaaggttcgttggtctaccccggcaacgtcggtgtattcaactggggcagcgtgtcggtcgacccggtgcgccagctgctgttcacttcgcccaactacatggcgttcgtgtcgaagatggtcccgcgtgagcaggttgccgaaggcagcaagcgcgaaagcgagaccagcggcgtgcagccgaacaccggcgcaccgtatgcagtgatcatgcacccgttcatgtcgccgctcggtgtaccgtgccaggcacccgcctggggctacgtcgccgccatcgacctgttcaccaacaaggtggtgtggaaacacaagaacggcaccacccgcgacagcaccccgctaccgatcggcctgccggttggcgtgccgagcatgggtggctcgatcgtcaccgccggtggcgtcggcttcctcagcggcacgctcgaccagtacctgcgcgcctatgacgtgaacaacggcaaggagttgtggaaagcacgcctgccagcgggtggccaggctacgccgatgagctacaccggcaaggacggcaagcagtacgtgctggtgactgccggcggccatggctcgctgggcaccaagatgggcgattacatcattgcttacaaattagccgagtaa

SEQ ID NO: 35509 - protein, 803 aa, Pseudomonas putida KT2440
MSTEGANQGSRWLPRLIGALLLLMGLALLAGGIKLSQLGGSLYYLIAGIGFALSGVLLLAQRQIALGLYGLVLLGSTVWALFEVGLDWWQLVPRLAIWFAIGVVLLLPWARRPLIGPASKANTALLGVAVVASGACALASQFTHPGEVFGELGRDSSEMASAAPAMPDGEWQAYGRTEHGDRYSPLRQITPQNAYRLEEAWRIRTGDLPTENDPVELTNQNTPLKVNGMLYACTAHSRLLALDPDTGAEIWRYDPQVKSPTGTFKGFAHMTCRGVSYYDENRYVSRDGSPAPKITDAGQAVAQACPRRLYLPTADARLIAINADNGKVCEGFANQGVIDLTTGIGPFTAGGYYSTSPAAITRDLVIIGGHVTDNESTNEPSGVIRAYDVHDGHLVWNWDSNNPDDTKPLAAGKMYSRNSANMWSIASVDEDLGMIYLPLGNQTPDQWGADRTPGAEKYSAGVVALDLATGKARWNYQFTHHDLWDMDVGSQPTLVHLKTDDGVKPAIIVPTKQGSLYVLDRRDGTPIVPIREIPTPQGAVEGDHTSPTQARSDLNLLGPELTEQAMWGATPFDQMLCRIQFRELRYEGQYTPPSEQGSLVYPGNVGVFNWGSVSVDPVRQLLFTSPNYMAFVSKMVPREQVAEGSKRESETSGVQPNTGAPYAVIMHPFMSPLGVPCQAPAWGYVAAIDLFTNKVVWKHKNGTTRDSTPLPIGLPVGVPSMGGSIVTAGGVGFLSGTLDQYLRAYDVNNGKELWKARLPAGGQATPMSYTGKDGKQYVLVTAGGHGSLGTKMGDYIIAYKLAE

SEQ ID NO: 35510 - DNA, 2418 bp, Pseudomonas putida KT2440
  CDS (1)..(2418): transl_table=11
atgaaagaaacaccgcgcgcctctggcgccacaaacttcatcctggtcggcctgggcgtgatcatcgccctgctcggcctcctcctcgctgccggcggcgtcaagctcgccggtctgggcggttcctggtacttcctgatcggcggcttggccatggccatcgccggtgtcctcattgctcgccgcaagaaggcgggcgcctggctgtatgccgtgttcctggtcggtactgccatctgggcactgatcgatgcgggcctggtgttctggccgctgttctcgcgcctgttcatgttcggcgcaatcggcatggtcgtggcgctggtctacccgctgctggcgcgtgccaacggcgccagcgccggccgcggtgcctacggcgtcgccggggtaatggccgtggtactggtggtcgcggtcggcaacatgttcgttgctcacccaagcgtcgcgcccaccggcaaaggcccgggcatgaccccggtcgaaaccggcaaggaacagaaagactgggcccactacggcaacaccgaaggtggcagccgcttcgccgcgcttgaccagatcaaccgggacaacgtcaacaagctgaaagtggcctggacctaccaaaccggcgacgttgcaatcagtgacggcaacggtgccgaagaccagctcaccccgctgcagatcggcagcaaggtgttcatctgcaccccgcacaacaacctgatcgcactcgatgccgacaccggcaaagagttgtggaagaacgaaatcaacgcccagtccaaggtctggcagcgttgccgtggcatggcctacttcgacgccactgccgccatcgcccagccaacccagccgaacagctcgccgatcaccggcgttagcgtagcggccggtgccaactgccagcgtcgcctgctgaccaacaccatcgacggccgcctgattgccgtcgacgccgacaccggcgagttctgccagggcttcggcaacaacggccaggtcgacctcaaggcaggcctgggtgatgtcccggactcctactaccagctgtcctcggcaccgctgatggccggcactaccgtagtggtcggcggccgtgttgccgacaacgtccagaccgacatgccaggcggcgtgatccgtggttttgacgtgatcaccggtgaaatgcgctgggccttcgacccgggcaacccggaagaccgccaggctccgcagggcgacaagacctacgtgcgcagcaccccgaacagctgggcaccgatgtcctacgacccggcaatgaacaccgtgttcctgccgatgggctcgtcctccaccgacatctacggcgttgagcgcagcaaactggaccacacttacggcgcttcggtgctggctttggacgccaccaccggcaaccagaaatgggtgttccagaccgtgcacaacgacctctgggacttcgacctgcccatgcagccaagcctgatcgacttcaccaaggacgacggccagtcggtgcctgcggtggtgatcggcaccaaggccgggcagatctacgtgctcgaccgcgccactggcaagccgctgacccaggtcgacgaagtaccggtcaagccaagcaacatcccgaacgagccgtactccccaacccagcccaagtcggtgggcatgccacagatcggcgcgcagaccctgaccgaatcggacatgtggggcgccaccccgtatgaccagctgctatgccgcatcgacttcaagaagatgcgctacgacggcctgtacaccgcgccgggtaccgacctgtcgctgagcttcccgggttcgctgggtggcatgaactggggcagcatttctaccgacccggtacatggcttcatcttcgtcaacgacatgcgtctgggcctgtggatccagatgatcccgtcgcagaacaaaggtggcgcggcttccggtggcgaagcactgaacactggcatgggcgcggtaccgctcaagggcaccccgtatgccgtgaacaagaaccgcttcctgtcggtcgccggcattccatgccaggcaccgccgtttggcaccctgaccgccatcgacatgaagacccgccaggtggcctggcaggtgccggtaggcaccgttgaagacaccggcccgctcggcatccgcatgcacctgccgatcaagatcggcctgccaacccttggcggcaccctgtcgacccaaggcggcctggtgttcatcgcaggtacccaggacttctacctgcgcgcctacgacagcagcaacggtaacgaaatctggaaggctcgcctgcccgtgggcagccagggcggcccgatgacctacgtctcgccgaagaccggcaagcagtacgtggtgatcactgctggcggcgcccgccagtcgactgaccgtggcgactatgtgatttcttacgctctgccgtaa

SEQ ID NO: 35511 - protein, 805 aa, Pseudomonas putida KT2440
MKETPRASGATNFILVGLGVIIALLGLLLAAGGVKLAGLGGSWYFLIGGLAMAIAGVLIARRKKAGAWLYAVFLVGTAIWALIDAGLVFWPLFSRLFMFGAIGMVVALVYPLLARANGASAGRGAYGVAGVMAVVLVVAVGNMFVAHPSVAPTGKGPGMTPVETGKEQKDWAHYGNTEGGSRFAALDQINRDNVNKLKVAWTYQTGDVAISDGNGAEDQLTPLQIGSKVFICTPHNNLIALDADTGKELWKNEINAQSKVWQRCRGMAYFDATAAIAQPTQPNSSPITGVSVAAGANCQRRLLTNTIDGRLIAVDADTGEFCQGFGNNGQVDLKAGLGDVPDSYYQLSSAPLMAGTTVVVGGRVADNVQTDMPGGVIRGFDVITGEMRWAFDPGNPEDRQAPQGDKTYVRSTPNSWAPMSYDPAMNTVFLPMGSSSTDIYGVERSKLDHTYGASVLALDATTGNQKWVFQTVHNDLWDFDLPMQPSLIDFTKDDGQSVPAVVIGTKAGQIYVLDRATGKPLTQVDEVPVKPSNIPNEPYSPTQPKSVGMPQIGAQTLTESDMWGATPYDQLLCRIDFKKMRYDGLYTAPGTDLSLSFPGSLGGMNWGSISTDPVHGFIFVNDMRLGLWIQMIPSQNKGGAASGGEALNTGMGAVPLKGTPYAVNKNRFLSVAGIPCQAPPFGTLTAIDMKTRQVAWQVPVGTVEDTGPLGIRMHLPIKIGLPTLGGTLSTQGGLVFIAGTQDFYLRAYDSSNGNEIWKARLPVGSQGGPMTYVSPKTGKQYVVITAGGARQSTDRGDYVISYALP

SEQ ID NO: 35512 - DNA, 2409 bp, Escherichia coli CFT073
  CDS (1)..(2409): transl_table=11
ttgaaatggtgtctctttatggcaattaacaataccggctcgcggcgattactcgtcacgctaacagccctttttgcagcgctttgcgggctgtatctactcattggcggaggctggctggtcgcgattggcggctcctggtactaccctatcgctggccttgtgatgctcggcgtcgcctggatgctgtggcgcagtaaacgcgccgcgctttggctgtacgcagccctgctgctcggcactatgatttggggcgtctgggaagttggtttcgacttctgggcgctgactccgcgcagcgacattctggtcttcttcggcatctggctgatcctgccgtttgtctggcgtcgcctggtcattcctgccagcggcgcagttgccgcactggtggtcgcactgctgattagcggtggtatcctgacctgggccggatttaacgatccgcaggaaatcagcggcaccttaagcgccgataccacgccagcagaagccatctcccccgttgccgatcaggactggcctgcctatggtcgcaatcaggaaggtcaacgcttttcaccactgaagcaaattaacgctgataacgtccacaagctgaaagaagcctgggtgttccgtactggcgatgtgaagcagccgaacgatccgggcgaaatcaccaatgaagtgacgccaattaaagtgggcgacaccctttacctgtgtaccgcgcatcaacgtctgtttgcgctggatgccgccagcggtaaagagaaatggcattacgatcctgagctgaaaaccaacgagtccttccagcatgtaacctgccgtggcgtctcttatcatgaagccaaagcagaaactgcttcgccggaagtgatggcggattgcccgcgtcgtatcattcttccggtcaatgatggtcgtctgattgcaattaacgctgaaaacggcaagctgtgcgaaaccttcgccaataaaggcgtgctcaatctgcaaagcaatatgccggacaccaaaccgggtctgtatgaaccgacttcgccgccgattatcaccgataaaaccatcgtgatggccggttcagtcaccgacaacttctcaacccgcgaaacgtctggcgtgatccgtggttttgatgtcaacaccggggagctgctgtgggcttttgatccgggcgcgaaagatccgaatgcgatcccgtctgacgaacacacctttacctttaactcaccaaactcgtgggcaccagcggcctatgacgcgaagctggatctggtctatctgccgatgggcgtcaccacgccagatatctggggtggtaaccgcacaccggaacaggaacgttatgccagctcgattctggcgctgaatgccactaccgggaaactggcgtggagctatcagaccgttcaccacgacctgtgggatatggatcttccggcacagccgacgctggcggacatcaccgttaatggtcagaaagtgccggttatttacgctccggcgaaaaccggcaacatttttgtgctcgatcgtcgtaatggtgaactggtggttcctgccccggaaaaaccggttccccaaggtgctgctaaaggcgattacgtgacccctactcaacccttctcggaactgagcttccgtccgacgaaagatttgagcggtgcggatatgtggggagccaccatgtttgaccagttggtgtgccgcgtgatgttccaccagatgcgctatgaaggcattttcacgccgccatctgaacagggtacgctggtcttcccgggtaacctggggatgttcgaatggggcgggatttccgttgatccgaatcgtgaagtggcgattgccaacccaatggcactgccgtttgtttcgaaactgatcccacgcggtcctggtaacccgatggaacagccgaaagatgccaaaggcacgggtacggaatccggcatccagccgcagtacggtgtaccgtatggcgtcacgctcaacccgttcctctcaccgtttggtctgccatgtaaacagccagcatggggctatatctcggcattggatctgaaaaccaatgaagtggtgtggaagaaacgtattggtacgccgcaggacagtatgccattcccgatgcctgtaccggtgccgttcaatatgggtatgccgatgcttggcgggccaatctccacggcgggtaacgtgctgtttatcgccgctacggcagataactacctgcgcgcttacaacatgagcaacggtgaaaaactgtggcagggtcgtttaccagcgggtggtcaggctacgccaatgacctatgaagtgaatggcaagcagtatgtggtgatctccgcaggcggtcacggttcatttggtacgaagatgggcgactatattgtggcttatgcgctgccggatgatgtgaagtaa

SEQ ID NO: 35513 - protein, 802 aa, Escherichia coli CFT073
MKWCLFMAINNTGSRRLLVTLTALFAALCGLYLLIGGGWLVAIGGSWYYPIAGLVMLGVAWMLWRSKRAALWLYAALLLGTMIWGVWEVGFDFWALTPRSDILVFFGIWLILPFVWRRLVIPASGAVAALVVALLISGGILTWAGFNDPQEISGTLSADTTPAEAISPVADQDWPAYGRNQEGQRFSPLKQINADNVHKLKEAWVFRTGDVKQPNDPGEITNEVTPIKVGDTLYLCTAHQRLFALDAASGKEKWHYDPELKTNESFQHVTCRGVSYHEAKAETASPEVMADCPRRIILPVNDGRLIAINAENGKLCETFANKGVLNLQSNMPDTKPGLYEPTSPPIITDKTIVMAGSVTDNFSTRETSGVIRGFDVNTGELLWAFDPGAKDPNAIPSDEHTFTFNSPNSWAPAAYDAKLDLVYLPMGVTTPDIWGGNRTPEQERYASSILALNATTGKLAWSYQTVHHDLWDMDLPAQPTLADITVNGQKVPVIYAPAKTGNIFVLDRRNGELVVPAPEKPVPQGAAKGDYVTPTQPFSELSFRPTKDLSGADMWGATMFDQLVCRVMFHQMRYEGIFTPPSEQGTLVFPGNLGMFEWGGISVDPNREVAIANPMALPFVSKLIPRGPGNPMEQPKDAKGTGTESGIQPQYGVPYGVTLNPFLSPFGLPCKQPAWGYISALDLKTNEVVWKKRIGTPQDSMPFPMPVPVPFNMGMPMLGGPISTAGNVLFIAATADNYLRAYNMSNGEKLWQGRLPAGGQATPMTYEVNGKQYVVISAGGHGSFGTKMGDYIVAYALPDDVK

SEQ ID NO: 35514 - DNA, 2367 bp, Pseudomonas syringae pv. tomato str. DC3000
  CDS (1)..(2367): transl_table=11
atgacaaacaagcaagacacaggagctggcagcaggttgctgttgctcgggttgggcgtgctgatcgctctgatcgggctcggtctggcaggtggcggcggctacctggtgacattgggcgggagttggttcttcctgctgatggggctggcgatgctggtcagcggtgcgctgatcgcagcccgcaaacccaagggcgcagtgctgtatggcatcgccttgatattgactgcgctctgggcggtctgggatgcaggcctgcattactggccgctggtgtcccgcgtattgacctttgccgtgatcggcctggtggttgcgctgatttacccgacgctgattcgcgcttcgggtgcgcaggcaggtcgtggcgcttatggcctggccggcgtgctggccatcggtgttgtcgcgaccatgggttacatgttcgtcccaagccatgtggttagcgccagcagcgtgccggccgtcgttccggtggcacccggcgccgagcagaaggactgggcacactggggcaacaccccggcaggcaaccggttcgcggcgctggatcagatcaacaagggcaacgtcgaaaagttgcaggtcgcctggaccttccacaccggcgacatcccgcagagcaccggcgcaggtgcggaagaccagaacacgccactgcagatcggtgacaccgtctacacctgcaccgcctacggcaaagtcttcgcactggatgccgacaccggcacccagcgctggaagttcgacccgcagggcagcggacccaactggcaacgctgccgaggcctgggctacttcgccacgccaggtgccgacgtatctgctcagccggcggctgctgtttgcgccacacgtgtgtttctaccgacaggcgatgctcgcctgatcgcactggatgccaaaaccggcgagacctgcaaggactttggcaatcaaggcgtcgtcgatctgaaaaccgacatgggcgaagtcaaggaaggctactaccagcaaacctcgacgccgctggtggcgggcaatgtcgttgtagtgggcggtagagtcgccgacaacttctctaccggcgagccaccgggcgtcgttcgcgcctttgacgtgcacagtggtgagctggtctgggcctgggatccgggcaacccgaacaccagcaagcgtccgccagccggggagacctacacgcgcggcacgccgaacgtctggtcggcaatgtcctacgacgaaaaacttggcctgatctacctgccgaccggcaacgccacgcctgacttcttcggcgggacgcgtaccgagctggatgacaaatggtcctcgtcagtggtcgccgtagacgtcaagaccggccaggtacgctggaacttccagatgacccaccacgacctgtgggacttcgacattccggcgcagccgttgctgtatgacattccggacggcaagggcggtacgcagcctgcgctggcacaagtcaccaagcagggcgaaattttcctcctcaaccgtgaaaccggtgtgccgatctcgcgtgtcgaagagcgtgccgtgccacaaggtaatgtgccgggcgagcgctattcgccgactcagccgttctcggtggacatgccgtcgattggcaaccagaccctgaaagagtccgacatgtggggcgccaccgcattcgatcaactgatgtgccgcatcgcctttaaaggcctgcgccacgagggcgtttatacgccaccaggcctggaccctgcgttgcagttccctggctcgctgggcggcatgaactggggcagtgtctcggtcgacccgaccaacagctacatgttcgtcaacgacatgcgcctgggcctggccaactacatgatcccgcgcgataagatcgccgctggtgccagcggcatcgaaatgggcgtcgtaccgcagaccggcacgccattcggcgcaatgcgtcagcgtttcctgtcagctgtcggaatcccgtgccaggcaccgccgttcggcaccatgtcggcgattgacctgaagaccaaaaagctcatgtggcaggtcccggtcggcaccgtaaaagacaccggcccgatgggtatccgcatgggcctgccgattccgatcggcatgccgacgctgggcgcatcgttgtccacacagtcgggcttgctgttcttcgcaggcacccaggacttctacctgcgcgccttcgacagcggcaacggcaacgaaatctggaaggcccgcctgcccgtaggcagccagtccggcccgatgacctacgtgtcgcccaagaccggcaagcagtacatcctgctcaccgccggcggcgcccgccaatcgcctgaccgtggtgactacgtgattgcgtacgcgttacccaagtaa

SEQ ID NO: 35515 - protein, 788 aa, Pseudomonas syringae pv. tomato str. DC3000
MTNKQDTGAGSRLLLLGLGVLIALIGLGLAGGGGYLVTLGGSWFFLLMGLAMLVSGALIAARKPKGAVLYGIALILTALWAVWDAGLHYWPLVSRVLTFAVIGLVVALIYPTLIRASGAQAGRGAYGLAGVLAIGVVATMGYMFVPSHVVSASSVPAVVPVAPGAEQKDWAHWGNTPAGNRFAALDQINKGNVEKLQVAWTFHTGDIPQSTGAGAEDQNTPLQIGDTVYTCTAYGKVFALDADTGTQRWKFDPQGSGPNWQRCRGLGYFATPGADVSAQPAAAVCATRVFLPTGDARLIALDAKTGETCKDFGNQGVVDLKTDMGEVKEGYYQQTSTPLVAGNVVVVGGRVADNFSTGEPPGVVRAFDVHSGELVWAWDPGNPNTSKRPPAGETYTRGTPNVWSAMSYDEKLGLIYLPTGNATPDFFGGTRTELDDKWSSSVVAVDVKTGQVRWNFQMTHHDLWDFDIPAQPLLYDIPDGKGGTQPALAQVTKQGEIFLLNRETGVPISRVEERAVPQGNVPGERYSPTQPFSVDMPSIGNQTLKESDMWGATAFDQLMCRIAFKGLRHEGVYTPPGLDPALQFPGSLGGMNWGSVSVDPTNSYMFVNDMRLGLANYMIPRDKIAAGASGIEMGVVPQTGTPFGAMRQRFLSAVGIPCQAPPFGTMSAIDLKTKKLMWQVPVGTVKDTGPMGIRMGLPIPIGMPTLGASLSTQSGLLFFAGTQDFYLRAFDSGNGNEIWKARLPVGSQSGPMTYVSPKTGKQYILLTAGGARQSPDRGDYVIAYALPK

SEQ ID NO: 35516 - DNA, 2244 bp, Pseudomonas syringae pv. tomato str. DC3000
  CDS (1)..(2244): transl_table=11
atgaccgggcgtgcggctgccctgggtctgtacgcgctgctgctgttcgcaagcacggtatggtcgttgtgggaagtcggcctggactggtggcaactggtgccgcgtctggcgctatggtttgcactgggcatcgtattgctgctgccgtggttccgtcggccgctgctgctcaacggcccggcgcgcatgggcactggcgcactgagcatcgctgtggtgctggccggtctggccgcgctggccagccagttcaccaaccctggccgtatcgaaggtcaactggaccgcgaaacggctggcaccaccaacaccgcgccggctatgcctgacggcgactggcagtcctatggacgtaccgctttcggcgatcgctattcgccactggcgcaaatcacgccgcaaaacgtcaacacgctgcagccggcctggacctatcgcacgggcgatattccagggccgaacgatccgggcgaaaccactgccgagaacaccccgctcaaggtcaacggcatgctttacgtgtgcacaccgcacagccaggtgatcgcgcttgatccggattcaggcaaggaaatctggcgctttgaccctaagctcagcactcagaatgcggccaacttcaagggttgggcgcatatgacctgccgtggcgtgacttaccacgacgacgccgcctatgccgccagcgctccggcgcaaagcccggcagcaccggccgcagtcagcgccacgtcaagtgtctgcccacgcagaatctttctgccgactgccgatacccgtctgatcgccctgaacgccgacaccggcaagatgtgcgaagactttggcaacaagggctcggttgacctgacggccaacatgggcacgttcgcaccgggcggctactactccacttcgccacccgcagtgaccaaggacctggtgatcatcggcggccacgtgaccgataacgtttcgatggacgaaccgtccggcgtgatccgtgcgtacgacgtgcacaccggtcgtctggtctggaactgggacagcggcaacccggaagaaacggctccgatagccgacggcaagatctacacgcgcaattcgccgaacatgtggtccatgttcagcgtcgatgaaaagctgggcatgatctacctgccgatgggcaatcagacgccggaccaatggggcggcaaccgtaccaaggagtccgagaagtacagcgcgggtctggttgcactggacatcgcgaccggccgtgtacgctgggacttccagttcactcaccatgacctgtgggacatggacgtgggcggtcaaccgacgctgctggacatgaaaaccgctgatggcgtgaagcctgcggtattggcctcgaccaagcagggcagcatctacgtgctggatcgcagcaccggcaagcctatcgtgccggtcaacgaagtgccggttccgcagggcgctgtcgcaggtgactggacttcgccgactcagcccaagtccgacctgaacttcatgccgccgccgcttaaagagcgcgacatgtggggcgtgacaccgtttgaccagatgatgtgccggatcgacttcaagtcgctgcgttacgacggcccgtttacgccgccatcgttgcagggttcgattgtgtatccgggtaacttcggtgtgttcgactggggcggcatctctgtcgatccggttcgccagatcgccttcgtcaatccgaactacatggcgttccgctccaggctggtgccttctgccgaagttgaaggcggcccgggccgcaagagcgaaaccgaaggcgtgcagccgaacaagggcgcaccgtatggcgtgattctggaaccactgctgtcaccgatgggcctgccgtgtcaggcaccggcatggggttatgtggcggcggtcgatctgaccaaccagaagaccatctggatgcacaaaaacggcaccgtgcgtgacagctcgccgatccccattccgctgaccatgggtgttccaagcctggggggtacattcaccaccgccagcggcctggcgttcatgagcgccacgcttgaccagtacctgcgtgcttatgacgtgcgtaacggcaagcaactgtgggaagcccgcctgccagcaggcgcgcaaaccacaccgatgacctacacgggcaaggacggtcagcaatacgtgctggtcgtggccggcggtcacggctcactgggcaccaaacagggtgactacgtgatggcgttcaaactgcccaagtaa

SEQ ID NO: 35517 - protein, 747 aa, Pseudomonas syringae pv. tomato str. DC3000
MTGRAAALGLYALLLFASTVWSLWEVGLDWWQLVPRLALWFALGIVLLLPWFRRPLLLNGPARMGTGALSIAVVLAGLAALASQFTNPGRIEGQLDRETAGTTNTAPAMPDGDWQSYGRTAFGDRYSPLAQITPQNVNTLQPAWTYRTGDIPGPNDPGETTAENTPLKVNGMLYVCTPHSQVIALDPDSGKEIWRFDPKLSTQNAANFKGWAHMTCRGVTYHDDAAYAASAPAQSPAAPAAVSATSSVCPRRIFLPTADTRLIALNADTGKMCEDFGNKGSVDLTANMGTFAPGGYYSTSPPAVTKDLVIIGGHVTDNVSMDEPSGVIRAYDVHTGRLVWNWDSGNPEETAPIADGKIYTRNSPNMWSMFSVDEKLGMIYLPMGNQTPDQWGGNRTKESEKYSAGLVALDIATGRVRWDFQFTHHDLWDMDVGGQPTLLDMKTADGVKPAVLASTKQGSIYVLDRSTGKPIVPVNEVPVPQGAVAGDWTSPTQPKSDLNFMPPPLKERDMWGVTPFDQMMCRIDFKSLRYDGPFTPPSLQGSIVYPGNFGVFDWGGISVDPVRQIAFVNPNYMAFRSRLVPSAEVEGGPGRKSETEGVQPNKGAPYGVILEPLLSPMGLPCQAPAWGYVAAVDLTNQKTIWMHKNGTVRDSSPIPIPLTMGVPSLGGTFTTASGLAFMSATLDQYLRAYDVRNGKQLWEARLPAGAQTTPMTYTGKDGQQYVLVVAGGHGSLGTKQGDYVMAFKLPK

SEQ ID NO: 35518 - DNA, 2391 bp, Salmonella enterica subsp. enterica serovar Typhi Ty2
  CDS (1)..(2391): transl_table=11
atggcagaaaataacgcacgatcgccacgattactcgtgacgctgacggccctctttgcagcactttgcgggctgtatcttcttatcggaggtgtctggctggttgctattggcggttcctggtactaccccatcgcgggcctcgtgatgctggttgtggccggattgctatggcgcagtaaacgtgccgcactgtggctgtatgccgccctgctgctggcgacaatgatttggggcgtgtgggaagtcgggttcgacttctgggcactcacgccgcgtagcgatatcctggtgtttttcggcatctggctaatattgccgtttgtctggcatcggctggtggttccttccagcggcgcagtggcggcgctggtcgtggcgctgctgattagcggcggcattctgacctgggctggcttcaacgacccgcaggagatcaacggtacgcttcgcgccgacgccacgcccgccgcaacaagttcgtcgatcgccgacgaagactggccggcctatggacgtaatcaggaaggccaacgctattcgccgctgaaacagatcactgcggataacgttcaccaactgaaagaagcgtgggtcttccgcaccggcgatctgaaacaacccaacgatccgggtgaaatcaccaacgaagtgaccccgataaaagtcggtgatacgctttatctgtgtacagctcaccagcgtctgttcgcgctggacgccgccagcggtaaagagaagtggcattttgatcctcagttgaagaccgattcgtctttccagcatgtgacctgccgcggcgtctcttatcatgaggccaaagcggataccgcctcgccggaggtcatcgccgactgtccgagccgcattatcctcccggtcaacgacggtcgccttttcgcggtgaatgccgaaaccggcaagctgtgtgaaaccttcgccaacaaaggcgtcctgaatctgcaaaccaatatgccggataccacgccgggactgtatgaaccgacgtcgccgccgattatcaccgataaaacaattgtcattgccggttcggtcacggataacttctctactcgcgaaacgtccggcgttatccgtggttttgatgttaatagcggtaaactactgtgggccttcgatcctggggcgaaagatccgaacacgattccagccgatgagcacgcttttacctttaactcgccgaactcctgggcccctgccgcctatgatgcgaaactggatctggtctatctgccgatgggcgtgaccacgccggatatctggggcggtaaccgcacgccggagcaggaacgttatgccagctccatcctggcgctgaatgccaccaccgggaaactggcctggagttatcagaccgtccatcacgatctgtgggatatggacctgccggcacagccgacgctggcggatattaccgttgacggtactaccgttccggttatctatgcaccagcgaaaaccggtaatatctttgtgctggacagacgtaatggcgagctggtcgtgcccgctccggaaaaaccggtcccgcagggcgcggcaaaaggcgattatgtcgccaaaactcagccgttctctgatttaaccttccgcccgaaaaaagatctctccggcgcggatatgtggggcgcgaccatgttcgaccaactggtgtgccgcgttatgttccaccagttgcgctatgaaggtatcttcaccccgccatccgagcaggggacattggtattccctggcaacctggggatgtttgaatggggcggtatttccgtcgatccagaccgtcaggtcgctatcgctaacccgatggcgctgccgtttgtctcgaagctgatcccacgcggcccgggtaatccaatggaaccgccgaaagacgcgaaaggtaccggtacagaagcgggtattcagccgcagtacggcgtaccgttcggcgtcacgctgaatccgttcctttcgccgtttggtttgccgtgtaaacaaccggcctggggctacatttccgcgttggatctgaagaccaatgaaatcgtgtggaagaaacgtatagggacgccgcgcgacagtatgccgttcccgatgccggttccggtgccgttcaacatggggatgcccatgctgggcgggccaatctcaaccgccggtaacgtgctgttcattgccgcgaccgccgacaactacctgcgcgcttataacatgagcaacggggaaaaactgtggcagggacgtttacccgccggaggccaggcaacgccgatgacctatgaggtaaacggtaagcagtacgtggtcatttctgccggaggccacggttcgtttggtacgaagatgggcgactatatcgtggcctatgctttgcctgacgacgcgaaataa

SEQ ID NO: 35519 - protein, 796 aa, Salmonella enterica subsp. enterica serovar Typhi Ty2
MAENNARSPRLLVTLTALFAALCGLYLLIGGVWLVAIGGSWYYPIAGLVMLVVAGLLWRSKRAALWLYAALLLATMIWGVWEVGFDFWALTPRSDILVFFGIWLILPFVWHRLVVPSSGAVAALVVALLISGGILTWAGFNDPQEINGTLRADATPAATSSSIADEDWPAYGRNQEGQRYSPLKQITADNVHQLKEAWVFRTGDLKQPNDPGEITNEVTPIKVGDTLYLCTAHQRLFALDAASGKEKWHFDPQLKTDSSFQHVTCRGVSYHEAKADTASPEVIADCPSRIILPVNDGRLFAVNAETGKLCETFANKGVLNLQTNMPDTTPGLYEPTSPPIITDKTIVIAGSVTDNFSTRETSGVIRGFDVNSGKLLWAFDPGAKDPNTIPADEHAFTFNSPNSWAPAAYDAKLDLVYLPMGVTTPDIWGGNRTPEQERYASSILALNATTGKLAWSYQTVHHDLWDMDLPAQPTLADITVDGTTVPVIYAPAKTGNIFVLDRRNGELVVPAPEKPVPQGAAKGDYVAKTQPFSDLTFRPKKDLSGADMWGATMFDQLVCRVMFHQLRYEGIFTPPSEQGTLVFPGNLGMFEWGGISVDPDRQVAIANPMALPFVSKLIPRGPGNPMEPPKDAKGTGTEAGIQPQYGVPFGVTLNPFLSPFGLPCKQPAWGYISALDLKTNEIVWKKRIGTPRDSMPFPMPVPVPFNMGMPMLGGPISTAGNVLFIAATADNYLRAYNMSNGEKLWQGRLPAGGQATPMTYEVNGKQYVVISAGGHGSFGTKMGDYIVAYALPDDAK

SEQ ID NO: 35520 - DNA, 2391 bp, Shigella flexneri 2a str. 2457T
  CDS (1)..(2391): transl_table=11
atggcaattaacaatacagcctcgcgacgattactcgtcacgctaacagccctttttgcagcgctttgcgggctgtatctactcattggcggaggctggctggtcgcgattggcggctcctggtactaccctatcgctggccttgtgatgctcggcgtcgcctggatgctgtggcgcagtaaacgcgccgcgctttggctatacgcagccctgctgctcggcaccatgatttggggcgtctgggaagttggtttcgacttctgggcgctgactccgcgcagcgatattctggtcttcttcggcatctggctgatcctgccgtttgtctggcgtcgcctggtcattcctgccagcggcgcagttgccgcactggtggtcgcactgctgattagcggtggtatcctgacctgggccggatttaacgatccgcaggagatcaacggcaccttaagcgccgatgccacacctgccgaagctatctcccccgttgccgatcaggactggcctgcgtatggccgcaatcaggaaggtcaacgcttttcaccactgaagcaaattcacgccgataacgtccacaagctgaaagaagcctgggtgttccgtactggcgatgtgaagcagccgaacgatccgggtgaaatcaccaatgaagtgacgccgattaaagtgggcgataccctttacctgtgtaccgctcaccagcgcctgtttgcgcttgatgccgccagcggcaaagagaaatggcattacgatcctgagctgaaaaccaacgagtctttccagcacgtaacctgccgtggcgtctcttatcatgaagccaaagcagaaacggcttcgccggaagtgatggcggattgcccgcgtcgtatcattcttccagtgaatgatggtcgcctgattgcgattaacgctgaaaacggcaaactgtgcgaaaccttcgccaataaaggcgtgctcaatctgcaaagcaatatgccagacaccaaaccgggtctgtatgagccgacttctccgccaattatcaccgataaaaccatcgtgatggccggttcagtcaccgataacttctcaacccgcgaaacgtctggcgtgatccgtggttttgatgtcaacaccggggagctgctgtgggcttttgatccgggcgcgaaagatccgaacgcaatcccgtcagacgaacacacctttacctttaactcaccaaactcgtgggcaccagcggcctatgacgcgaagctggatctggtctatctgccgatgggcgtgaccacgccggatatctggggcggtaaccgcacaccggaacaggaacgttatgccagctcgattctggcgctgaatgccactaccgggaaactggcgtggagctaccagaccgttcaccacgacctgtgggacatggatcttccggcacagccgacgctggcggacatcaccgttaatggtcagaaagtgccgattatttacgctccggcgaaaaccggtaacatttttgtgctcgatcgtcgtaatggcgaactggtggttccggccccggaaaaaccggttccccaaggtgctgccaaaggcgattacgttacccctactcaaccattctcggaactgagcttccgtccgacgaaagatttgagcggtgcggatatgtggggagccaccatgtttgaccaactggtgtgccgcgtgatgttccaccagatgcgctatgaaggcattttcacgccgccatctgaacagggtacgctggtcttcccgggtaacctggggatgttcgaatggggcgggatttccgttgatccaaatcgtgaagtggcaattgccaacccaatggcactgccgtttgtttcgaaactgctcccgcgtggtcctggcaacccgatggagcagccgaaagatgccaaaggcacgggtacggaatccggcattcagccacagtacggtgtaccgtatggtgtcacgctcaacccgttcctctcaccatttggtctgccatgtaaacagccagcatggggttatatctcggcgctggatctgaaaactaatgaagtggtgtggaagaaacgtattggtacgccgcaggacagtatgccgttcccgatgccggttccggtgccgttcaatatgggtatgccgatgctgggcgggccaatctccacggcgggtaacgtgctgtttatcgccgctacggcagataactacctgcgcgcttacaacatgagcaacggtgaaaaactgtggcagggtcgtttaccggcgggtggtcaggcaacaccgatgacctatgaagtgaatggcaagcagtacgtggtgatctccgcaggcggtcacggttcatttggtacgaagatgggcgactatattgtggcttatgccctgccggatgatgtgaaataa

SEQ ID NO: 35521 - protein, 796 aa, Shigella flexneri 2a str. 2457T
MAINNTASRRLLVTLTALFAALCGLYLLIGGGWLVAIGGSWYYPIAGLVMLGVAWMLWRSKRAALWLYAALLLGTMIWGVWEVGFDFWALTPRSDILVFFGIWLILPFVWRRLVIPASGAVAALVVALLISGGILTWAGFNDPQEINGTLSADATPAEAISPVADQDWPAYGRNQEGQRFSPLKQIHADNVHKLKEAWVFRTGDVKQPNDPGEITNEVTPIKVGDTLYLCTAHQRLFALDAASGKEKWHYDPELKTNESFQHVTCRGVSYHEAKAETASPEVMADCPRRIILPVNDGRLIAINAENGKLCETFANKGVLNLQSNMPDTKPGLYEPTSPPIITDKTIVMAGSVTDNFSTRETSGVIRGFDVNTGELLWAFDPGAKDPNAIPSDEHTFTFNSPNSWAPAAYDAKLDLVYLPMGVTTPDIWGGNRTPEQERYASSILALNATTGKLAWSYQTVHHDLWDMDLPAQPTLADITVNGQKVPIIYAPAKTGNIFVLDRRNGELVVPAPEKPVPQGAAKGDYVTPTQPFSELSFRPTKDLSGADMWGATMFDQLVCRVMFHQMRYEGIFTPPSEQGTLVFPGNLGMFEWGGISVDPNREVAIANPMALPFVSKLLPRGPGNPMEQPKDAKGTGTESGIQPQYGVPYGVTLNPFLSPFGLPCKQPAWGYISALDLKTNEVVWKKRIGTPQDSMPFPMPVPVPFNMGMPMLGGPISTAGNVLFIAATADNYLRAYNMSNGEKLWQGRLPAGGQATPMTYEVNGKQYVVISAGGHGSFGTKMGDYIVAYALPDDVK

SEQ ID NO: 35522 - DNA, 2397 bp, Acinetobacter sp. ADP1
  CDS (1)..(2397): transl_table=11
ttgaaagtatggtgttttatacttgggctggcgttacttattactggtgcattttatgttatcggtggtggaaaactgattagcttgggtggttcatggtacttcctgattgctggtttaatgattactacctcagctttttttatgttcaagaaaaaagcaaccggggtctggttatatgctttggccttcattggtactgttatttgggcgttaattgatgctggtttcgaattttggccattgcattcacgtttgatgttcccagcaggtttatttgctgcggtcatgttaaccttgccatctattcgtaaataccaatatcaaaccccaatgagcgctccagcatatgtcattggtggtttgaccgttttaggaatgctcggtggtctgtatggaatgtttattccacatgaaactgtgaaagcatctggcgaagaactaccacttgttccagttgaccctgccaaaaaacaggtaaattgggatcattatggtaatgatgctggcggcagtcgttttgtagcgcttgatcagattaaccgtaacaacgtatctaaattaaaagaagcttggcgtttccgtacaggtgattttacgactggtacaggtaacggtgcagaagatcaaatgacaccattgcaagttggcaataaagtattcttgtgtacaccacataataatatatttgcaattgatgcagactctggaaagcagctttggaaagcagaagttaactctactgcggatgcatgggaacgttgtcgtggcgtcgcttattttgattcgacacaaccattggtacaacctacattggctggtgcaacacctgtagctgctttagcagcaaatactgagtgtccgcgacgtgtatataccaatactgtagatggccgtttgattgcagtaaatgcagatacaggcgctcgttgtaaagactttggtgttaatggtacagtgaatttacatgaaggacttggtgaaaatactaaggcacctcgctttgaagtcacttcggcacctaccattgcaggtacaacgattgtcgtgggaagccgtattgcagataacgtggcagccgatatgcctggtggagtcattcgtgcctatgatgtgattacaggtaaattacgttgggcatttgatccacgtaatccagatccaaactacgttttaaaaccaggtgagatttacaaacgcagttctacgaactcatgggcagccatgtcttatgacccgcaaatgaataccgtgttcttgccaatgggaagttcatctgtagacgtttggggtggtaatcgtactgcagccgaccataaatataatacctctgtacttgcacttgatgcgacgacaggtaaagaaaaatgggtttataatactgttcataatgacctttgggattttgacttaccaatgcaaccaagtttggtagacttcccaatgaaagatggtacaactaaacctgcggttgttattggcactaaatcaggtcagttttatgtacttgatcgtgtgacaggtaaaccactgactaaagtgatcgagcagccaattaaagtggctgatattcctggcgaacaatacagtaaaactcagccgcgttcagttgaaatgccgcaaattggtaatcagacacttaaagagtctgatatgtggggcgcgacgccatttgatcagttgatgtgtcgtatcaactttaaatcaatgcgttatgacgggctttacaccgcaccaggtactgatgtatcactgagcttcccgggttctctgggtggtatgaactggggttctatcgcatttgatccaacgcaccgttatatgtttgtgaatgacatgcgtttagggctttggattcaattgatcaagcagactcctgaagatatcaaaattcaggcaaatggtggcgagaaagttaatacaggtatgggtgcagttccaatgaaaggtacgccatataaagtgaataaaaaccgctttatgtcagcgttgggcattccatgtcaaaaaccaccttttggtaccatgactgcaattgatatgaaaacacgtcaagtggcttggcaagtaccattgggtacgattcaagacacgggtccaatgggtattaaaatgggcttgaaagcaccaattggtatgccaaccattggtggtcctatggcgactcaaggcgggttagtattctttgctgcaacgcaagactactacttacgtgcgtttaactcatctaatggtaaagagttgtggaaagcacgtcttcctgtgggtagtcaaggtacgcctatgagttatatgtcaccaaaaactggaaaacaatacgttgttgtttcagcaggtggtgcacgtcagtctccagatcatggtgactacgtgattgcatatgcccttgaaaaataa

SEQ ID NO: 35523 - protein, 798 aa, Acinetobacter sp. ADP1
MKVWCFILGLALLITGAFYVIGGGKLISLGGSWYFLIAGLMITTSAFFMFKKKATGVWLYALAFIGTVIWALIDAGFEFWPLHSRLMFPAGLFAAVMLTLPSIRKYQYQTPMSAPAYVIGGLTVLGMLGGLYGMFIPHETVKASGEELPLVPVDPAKKQVNWDHYGNDAGGSRFVALDQINRNNVSKLKEAWRFRTGDFTTGTGNGAEDQMTPLQVGNKVFLCTPHNNIFAIDADSGKQLWKAEVNSTADAWERCRGVAYFDSTQPLVQPTLAGATPVAALAANTECPRRVYTNTVDGRLIAVNADTGARCKDFGVNGTVNLHEGLGENTKAPRFEVTSAPTIAGTTIVVGSRIADNVAADMPGGVIRAYDVITGKLRWAFDPRNPDPNYVLKPGEIYKRSSTNSWAAMSYDPQMNTVFLPMGSSSVDVWGGNRTAADHKYNTSVLALDATTGKEKWVYNTVHNDLWDFDLPMQPSLVDFPMKDGTTKPAVVIGTKSGQFYVLDRVTGKPLTKVIEQPIKVADIPGEQYSKTQPRSVEMPQIGNQTLKESDMWGATPFDQLMCRINFKSMRYDGLYTAPGTDVSLSFPGSLGGMNWGSIAFDPTHRYMFVNDMRLGLWIQLIKQTPEDIKIQANGGEKVNTGMGAVPMKGTPYKVNKNRFMSALGIPCQKPPFGTMTAIDMKTRQVAWQVPLGTIQDTGPMGIKMGLKAPIGMPTIGGPMATQGGLVFFAATQDYYLRAFNSSNGKELWKARLPVGSQGTPMSYMSPKTGKQYVVVSAGGARQSPDHGDYVIAYALEK

SEQ ID NO: 35524 - DNA, 2406 bp, Acinetobacter sp. ADP1
  CDS (1)..(2406): transl_table=11
atgtctcaaccatcttcaaattcaggacttagaacattgaccgtagttatcgctgcggtgattggtctattcctgctcgttggaggtatatggcttactgtactcggtgggtcattctattatgtgattgcaggattggcattactgatctttgcatggctcttgctcaaacgatcaagcacttctatctggttgtatgctgcattaatgctcggtacaacgctatggggtatttgggaagttggtacagacttctgggccttggcaccgcgtctggacattttaggcgtacttggtctatggattttaattccagccgtgagccgtggaatggacaatgcaaaatcaagcaaaattgcgttgtcttctacacttgtgattgcaattgtggtcatggtttattctatttttaatgatccgcaagaaattaatggtgtcattaaaaatgagcaacccaaaactgcacaagcagttgaaggtgttgatgctgctgattggcctgcctatggtcgtacccagggtggtgtacgttattcgcctttaacgcagattaatgatcagaacgttaaagatttgaaagtggcatggaccttccgtacaggtgacttaaaaactgcaaatgactcgggtgaaaccaccaatcaggttacgccaatcaaagttggcaataacatgtacatgtgtaccacccaccaatggttaattgcacttgaccctgcaacaggtaaagaaaaatggcgttttgatccgaaattaaaagcagataaaacctatcaacatttaacctgtcgtggtgtgatgtattacgatgccaataataccagtgagttcgcaaccagcttgcaagccaaaaaatcagcatcgacagaatgcccacgtaaagtctttttacctgtgaatgatggtcgtctggttgctatcaatgcagatactggtaaggcatgctctgactttggtacgaagggtgaagtcgatttacaaaagttgatgccatatgcttatccaggcggttataacccaacatcgccaggtattgtttctggtacaacagtggtgattgcaggttctgtcacagataactactccaataaagagccatcaggtgtcattcgtggttacgatgtaaacacgggtaaactgctttgggcatttgatacgggtgcacaagatccaaatgcacttcctggcgaaaattcgacgtttgtacacaattctccaaatgcatgggcgccattggcatacgatccgaagctggatatcgtctatgtaccaacaggtgtcggtacgccagatatctggggtggagatcgtaccgagttgaaagagcgttatgcaaattcaatgctggcaatcaacgccacaaccggtaaacttgtttggcatttccagaccacacatcatgatttgtgggatatggatgtaccatcacagccttcactggcagatgttaaagacaagtctggtcagactgttccagcgatttatgtgttaaccaaaacaggcaatgtttttgttctagatcgtcgtaatggtaaggcgattgtgccaattacagaaaaagcggtaccacagaccgtgaaacgtggcccacaaaccaagggtgaacgttattctgcgacacaaccattttctgcacttgatttagcaccaaaagacaaacttacagacaaacaaatgtggggtgccacaatgtttgatcagttgatgtgtcgcgtgtcattcaagcgtctgaactatgacggtatttatacaccaccatctgaaaacgggactttagtgttcccaggaaatctgggtgtatttgaatggggtgggatgtcggtcaatcaggatcgtcagattgcagtcatgaatccgttggcgctaccgtttgtgagccgtctgattccgatggatccgaaccgtaaggaaactgcacgtggtgcaggaacagagcatggtattcaaccgatgtatggtgtgccttatggtgtggaaatcaatgcattcttgtcgcctcttggtttgccttgtaagcagcctggctggggctatattgctggtgtcgatttaaattcacatgaagtggtctggaaaaaacgtatcggtactatccgtgatagtttgccaaatctattccagttgccagcacttaaaattggtgtacctggcttgggtggaaccatttcaactgcaggtaacgtaatgtttgttggtgcaacccaggataactatatccgtgcgtttaatgttagtaatggtgaaaaactgtgggaagcacgtttaccagcaggtggtcaagccacaccgatgacctatgaaatcaatggtaaacaatatgtggtaattatggcgggtggtcatggttcatttggcaccaagatgggtgactatcttgtggcttatgcattgccggataccaaataa

SEQ ID NO: 35525 - protein, 801 aa, Acinetobacter sp. ADP1
MSQPSSNSGLRTLTVVIAAVIGLFLLVGGIWLTVLGGSFYYVIAGLALLIFAWLLLKRSSTSIWLYAALMLGTTLWGIWEVGTDFWALAPRLDILGVLGLWILIPAVSRGMDNAKSSKIALSSTLVIAIVVMVYSIFNDPQEINGVIKNEQPKTAQAVEGVDAADWPAYGRTQGGVRYSPLTQINDQNVKDLKVAWTFRTGDLKTANDSGETTNQVTPIKVGNNMYMCTTHQWLIALDPATGKEKWRFDPKLKADKTYQHLTCRGVMYYDANNTSEFATSLQAKKSASTECPRKVFLPVNDGRLVAINADTGKACSDFGTKGEVDLQKLMPYAYPGGYNPTSPGIVSGTTVVIAGSVTDNYSNKEPSGVIRGYDVNTGKLLWAFDTGAQDPNALPGENSTFVHNSPNAWAPLAYDPKLDIVYVPTGVGTPDIWGGDRTELKERYANSMLAINATTGKLVWHFQTTHHDLWDMDVPSQPSLADVKDKSGQTVPAIYVLTKTGNVFVLDRRNGKAIVPITEKAVPQTVKRGPQTKGERYSATQPFSALDLAPKDKLTDKQMWGATMFDQLMCRVSFKRLNYDGIYTPPSENGTLVFPGNLGVFEWGGMSVNQDRQIAVMNPLALPFVSRLIPMDPNRKETARGAGTEHGIQPMYGVPYGVEINAFLSPLGLPCKQPGWGYIAGVDLNSHEVVWKKRIGTIRDSLPNLFQLPALKIGVPGLGGTISTAGNVMFVGATQDNYIRAFNVSNGEKLWEARLPAGGQATPMTYEINGKQYVVIMAGGHGSFGTKMGDYLVAYALPDTK

SEQ ID NO: 35526 - DNA, 2376 bp, Pseudomonas syringae pv. syringae B728a
  CDS (1)..(2376): transl_table=11
atgattctcaaagtgaccggtatcgtcatcgcgatactcagcctcattctgctattcatgggggcgcaactggtggctgccggcggttcaccggcctactcgatgatcgccctgggtttgctggccacagcaaccctggtattcctgaaaagaaagtcggcacttaccctgtatgcggtgatgatgtgggggattctgctctggatcatctatgaagcgggcctggacaaatggcagtggatccctcgcggcgatctgtttgcactgatcggcctgtggctggccatgccctgggtcgtgcggccgctttatcaagcgcggtcgagcaccgataagcgtcgttttcatccgttgctgggcggtacgcttggcgtaatgctgctgatcgtgattgcgctgatgtttcacgatccgtacccgcagcaagggcggatcgacagcgtggcgaccgcccgcagcgccgagtcggcaggcagtgactgggctgcatatggcggtagcaacgcgggccagcgcttttccagcctcgatcagatcaccccggacaacgtcggcaagctgtcggtggcctgggaataccacaccggtgacttgcgcgatgaagacgaggatgccggcgagtacacctttgaagcgacgcccctcaagatcaacgaccgggtgtatgtgtgcacgcctcataacgaagtgcatgcgctgaacccgcagaccgggcaactggcctggaaatacacccccgagaaaaaacgctcgtatttgcagcagcaccagacctgccgtggcgtcagctactattcggcagcctccagcccgacaggccagccacaacagcccgctcaatgcgccaaacgcatcatcaccgcgactgcagatgccaggctggtagcgcttgatgccgacagcggcaacctgtgcagcgacttcggcagcggcggggtgatcgacttgagcttcaacatgggcacgatccgcccgcacgcgctgatgcagacatccgcgccactgattgcaggcgatctgatagtgatcggcagctcgatcatggataacggttataacgacggcaacccgtcgggtgtgattcgcgcctacgacgtcatcaccggcaggctggtatggaatttcgatccgcaaaacccggacaacacccagcctatagcggctgaccagagctatccgcaggacacgccggtcgcctgggcaaccctgagcgctgatgtcaaaaacggtctggtgtacgtcccgttcggcaacgcttcgcccgacgaaaccggcacccggcgtaaccccgacagcaacaccgagaagtttcgcgatgcactggtggctctcgacctgaagagcggcgcgctgcgctggaaattccagacctcgaacaatgacctttgggatcgcgacaacccatcgcagccctcactgctggatctgggaaaagacggtagccgccagcctgccctggtgttgccgaccaaagtaggcaacatctttgtgcttgaccgactgacgggcgagccgatcgtgcctgtcgatcaggtcagtgtgcgcaccgcgggcggtgttgaaggcgagcgctttgcacccacccagccggtctcgcgacttaacttcatcccgccggtgttgaccgagaagtccatgtggggcgttacgccttttgaccagatggcttgccggatcgcgtacaacacccttcgttatgacggtaacccttggacaccggccaccgagtcgggatcgctgatctatcccggcaacataggcgtgttcaactggggttcggtggccgtggaccctgaccgccagttgctgatcaccgcaccggtgcgcctggcgtatgtctacaacctgatcaagcgccccgcgcaggcccgggaaaaacgcctgttcactcaggagggcaagccctactggaacgagaacttcgacggtgactatgccatccgtatttccagattcgcctcgagccttggcattccgtgcacagcgccaccgtgggggaccatggccggggtcgatctgacgaccggcaagacccaatggatgcgccgggttggtaccaccaaaaacctcaagaccagcttcatgcagggacgttttccggtcggttttcccatgggcatggtcgcccatggcggtccgatggtgacggcaggcggattggcctttcacggcgcgacggcggataactttttccgcgcctacgacgtcaatagcggcgaagtgctctgggaacacgagttacccgcgggtggccaatcgattccttcgacgtataccggcaacgacggcaaacagtacgtggtcattgctgccggcggtcacggatcgctcggtacgacgttgggcgacagcgtgattgccttccgggttgattga

SEQ ID NO: 35527 - protein, 791 aa, Pseudomonas syringae pv. syringae B728a
MILKVTGIVIAILSLILLFMGAQLVAAGGSPAYSMIALGLLATATLVFLKRKSALTLYAVMMWGILLWIIYEAGLDKWQWIPRGDLFALIGLWLAMPWVVRPLYQARSSTDKRRFHPLLGGTLGVMLLIVIALMFHDPYPQQGRIDSVATARSAESAGSDWAAYGGSNAGQRFSSLDQITPDNVGKLSVAWEYHTGDLRDEDEDAGEYTFEATPLKINDRVYVCTPHNEVHALNPQTGQLAWKYTPEKKRSYLQQHQTCRGVSYYSAASSPTGQPQQPAQCAKRIITATADARLVALDADSGNLCSDFGSGGVIDLSFNMGTIRPHALMQTSAPLIAGDLIVIGSSIMDNGYNDGNPSGVIRAYDVITGRLVWNFDPQNPDNTQPIAADQSYPQDTPVAWATLSADVKNGLVYVPFGNASPDETGTRRNPDSNTEKFRDALVALDLKSGALRWKFQTSNNDLWDRDNPSQPSLLDLGKDGSRQPALVLPTKVGNIFVLDRLTGEPIVPVDQVSVRTAGGVEGERFAPTQPVSRLNFIPPVLTEKSMWGVTPFDQMACRIAYNTLRYDGNPWTPATESGSLIYPGNIGVFNWGSVAVDPDRQLLITAPVRLAYVYNLIKRPAQAREKRLFTQEGKPYWNENFDGDYAIRISRFASSLGIPCTAPPWGTMAGVDLTTGKTQWMRRVGTTKNLKTSFMQGRFPVGFPMGMVAHGGPMVTAGGLAFHGATADNFFRAYDVNSGEVLWEHELPAGGQSIPSTYTGNDGKQYVVIAAGGHGSLGTTLGDSVIAFRVD

SEQ ID NO: 35528 - DNA, 2424 bp, Pseudomonas syringae pv. syringae B728a
  CDS (1)..(2424): transl_table=11
atgagcactgacagtgcttcaaatagaaatcgcctgttaccgaccctgctcgggctggtgatcctgttgatggggctggcgttgctggtcggtggtgcccgactgctgcaactggatggctcgttgtattacctgctggccggtatcggtttcgccgtgactggcgtgttgttgatcaccggtcgtgcggctgcgctgggcctttatgcactgctgctgttcgcgagcacggtctggtcgttgtgggaagtcggcctcgactggtggcaattggtgccacgcctggcgctgtggttcgccctgggtatcgtgttgctgctgccatggttccgcgagccgctactgcgcaacggtccggcacgcatgggcaccggtgcactgagcatcgctgtggtgctggccggcctgaccgcactggcaagccagttcactaacccgggtcgtatcgaaggccagctggaccgcgagacggctggcacgaccaacaccgccccggcgatgcctgacggcgactggcagtcctacggccgcaccgcgttcggtgaccgctactcgccactggcgcagatcacgccggaaaacgtcaacaagctggagccggcctggacctatcgcacgggtgacattccggggccgaatgacccgggtgaaaccactgccgagaacaccccgctcaaggtcaacggcatgctctacgtgtgcacgccgcacagtcaggtgatcgcccttgacccggattcgggcaaggaaatctggcgcttcgatccgaagctcagcactcagaacgctgccaacttcaagggttgggcgcacatgacctgccgtggcgtcacctatcatgacgacgctgcctatgccgccagtgccccggcgcaaagcccgacggtcccggctgctgacggtactgccaccgccagtgctgcctgcccgcgcagaatcttcctgccgactgccgacacccgtctgatcgcgctgaacgccgacaccggcaagatgtgcgaagacttcggcaacaagggttcggttgacctgaccgccaacatgggcaccttcgctccgggcggctactactccacgtcgccaccggcggtcaccaaggacctggtgattatcggtggccacgtcactgacaacgtttccatggacgagccgtccggcgtgatccgcgcctatgacgtacacactggccgtctggtgtggaactgggacagcggcaatccggaagaaactgcgccgattgccgaaggcaagatctacacgcgcaactcgccgaacatgtggtccatgttcagcgtcgatgaaaagctcggcatgatttacctgccgatgggtaaccagacgcctgaccagtggggcggcgaccgtacgccagagtccgagaagtacagcgcgggcctggttgcactggacatcgcaaccggccgcgtgcgctgggactaccagttcactcaccacgacctgtgggacatggacgtcggtggtcagccgaccctgctggacatgaaaaccgctgacggcatcaaacccgccgtactggcgtcgaccaagcagggcagcatctacgtcctggaccgtagcaccggcaaaccgatcgtgccgatcaatgaagtgccggtcccgcaaggcgctgtcgcgggtgatcacacctcgccaacccagcccaagtccgacctgaacttcatgccgccgccgcttaaagagcgcgacatgtggggcgtgacaccgtttgaccagatgatgtgccggatcgacttcaagtcgctgcgctacgatggtccgttcaccccgccttcgctgcagggttcgatcgtttatccgggcaacttcggtgtgttcgactggggtggtatttccgtcgacccggtgcgtcagatcgccttcgtcaatcctaactacatggctttccgttcgaagctggtgccttctgccgaagttgaaggcggcccgggccgcaagagcgaaaccgaaggcgtacagccgaacaagggcgcgccttatggtgtgatcctggaagcactgctgtcgccgatgggcctgccttgccaggcacctgcatggggttacgtggcggctgtcgacctgaccacccaaaaaaccatctggatgcacaagaacggcaccgtgcgcgacagctcgccgatcccgcttccgctgaccatgggcgttccaagcctgggtggtacgttcacaaccgccagcggcctggcgttcatgagcgctacgcttgaccagtacctgcgtgcttatgacgtgcgtaacggcaagcaattgtgggaagcccgcctgccagcaggcgcgcaaaccaccccgatgacctacaccggtaaggacggtcagcaatacgtgctggtcgttgcgggcggtcacggctcactgggcaccaaacagggtgactacgtgatggcgttcaaactgcctaagtaa

SEQ ID NO: 35529 - protein, 807 aa, Pseudomonas syringae pv. syringae B728a
MSTDSASNRNRLLPTLLGLVILLMGLALLVGGARLLQLDGSLYYLLAGIGFAVTGVLLITGRAAALGLYALLLFASTVWSLWEVGLDWWQLVPRLALWFALGIVLLLPWFREPLLRNGPARMGTGALSIAVVLAGLTALASQFTNPGRIEGQLDRETAGTTNTAPAMPDGDWQSYGRTAFGDRYSPLAQITPENVNKLEPAWTYRTGDIPGPNDPGETTAENTPLKVNGMLYVCTPHSQVIALDPDSGKEIWRFDPKLSTQNAANFKGWAHMTCRGVTYHDDAAYAASAPAQSPTVPAADGTATASAACPRRIFLPTADTRLIALNADTGKMCEDFGNKGSVDLTANMGTFAPGGYYSTSPPAVTKDLVIIGGHVTDNVSMDEPSGVIRAYDVHTGRLVWNWDSGNPEETAPIAEGKIYTRNSPNMWSMFSVDEKLGMIYLPMGNQTPDQWGGDRTPESEKYSAGLVALDIATGRVRWDYQFTHHDLWDMDVGGQPTLLDMKTADGIKPAVLASTKQGSIYVLDRSTGKPIVPINEVPVPQGAVAGDHTSPTQPKSDLNFMPPPLKERDMWGVTPFDQMMCRIDFKSLRYDGPFTPPSLQGSIVYPGNFGVFDWGGISVDPVRQIAFVNPNYMAFRSKLVPSAEVEGGPGRKSETEGVQPNKGAPYGVILEALLSPMGLPCQAPAWGYVAAVDLTTQKTIWMHKNGTVRDSSPIPLPLTMGVPSLGGTFTTASGLAFMSATLDQYLRAYDVRNGKQLWEARLPAGAQTTPMTYTGKDGQQYVLVVAGGHGSLGTKQGDYVMAFKLPK

SEQ ID NO: 35530 - DNA, 2421 bp, Pseudomonas fluorescens Pf-5
  CDS (1)..(2421): transl_table=11
atgagcactgagggtgcttcaagtccgagccgcttgctgccaagcctgctcgggatcttgctgctgctaatgggcctggccttgctggccggggggatcaagctgagcatgctcggcggctcgctgtactacgttttggccggtatcggcctgacgttgaccggcctcttgctgctggccggtaaacgcgcggcgctgggcctgtacgccctggtactgttcgccagtaccgtctggtcgctatgggaaatcggcctggactggtggcaactggtgccacgcctgtcgctgtggttcgccctcggcgtggtcctgctgctgccctggttccgtcgcccgctgctgcacgatggcccggccccgctgggcaccgctgccctgagcgtggccgtggtcctggccggtggcgccgccattggcagccagttcactaaccctggggaaatctccggtgacctgggccgcgacaccgcggacatgaccagcaccgcgccggccatccccgacggtgaatggcaggcctacggccgcaccgagttcggcgatcgctactcgccgctgaagcagatcaccccggccaacatcggcaagctgcaggaagcctggcgcatccgcaccggcgacatgccgaccgacaaggacccggtggaaatcaccaaccagaacaccccgctgaaggtcaacggcaagctctatgcctgcaccgcccacagcaaggtgctggccctggacccggataccggcaaggaaatctggcgcttcgacccgcagatccagggccccaacggcgacgacttccgtggctgggcacacatgacctgccgtggcgtgtcgtactacgacgaagccaacttcaagaacgccgacgccatcagccagccggccaccctgtcccccgcgggccaggccatcgccaccagctgcccgcgtcgcctgttcctgcctaccgccgatgcgcgcctgatcgccatcaacgccgacaccggcaaggtctgcgaagacttcggcaccaagggcgccgtggacctgaaggccggtatcggcccattcaccccgggcggctactactccacctccccggcggccatcacccgtaacctggtgatcattggcggccacgtgaccgacaacgagtcgaccaacgagccgtccggcgtgatccgcgccttcgacgtgcacgacggccacctggtgtggaactgggattcgggcaacccggacgagaccactccgctgccggaaggcaagacctatacccgcaactcaccgaacatgtggtccctggccagcgtcgacgagaaactgggcatggtctacctgccactgggcaaccagatgcctgaccaatggggcggcaaccgcaccgcaggcgccgagaaattcagcgccggcaccgtggccctggacatcgacaccggcaagctgcgctggaactaccagttcacccaccacgacctgtgggacatggacgtgggcagccagccgactctgctggacatgaagactgcggacggcgtcaagccggcgctgatccagccgaccaagcaaggcagcctgtacgtgctggaccgtcgcgatggcaccccgatcgtgccgatccgtgaagtaccggccccgaccggcgcagtcgaaggcgaccacaccgcgccaacccaggcccgttcggacctgaacctgctgccgccgccactggacgagaaagccatgtggggcgcgacgccgttcgaccagatgctgtgccgcatccagttcaaggagctgcgctatgaaggccagtacaccccgccgtcggtgcagggcagcctgatctacccgggtaacgtgggcgtgttcaactggggcagcgtgtccctggacccggttcgccaactgctgttcaccagcccgaactacatggccttcgtttccaagctggtgccgcgtgccgaagtggctgccgggagcaagcgcgaaagcgagacctcgggcgtgcaacccaacaccggcgcgccttacgcggtgatcatgcatccgttcatgtcgccgctcggcgtaccttgccaggctccggcctggggctacgtggccggtatcgacctgaccaccaacaaggtggtgtggaagcacaagaacggcaccagccgtgacagctcgccaatcccgatcggcctgccgatgggcgtgccgagcatgggcggctccatggttaccggtggtggcgtgggcttcctcagcggcaccctggaccagtacatccgcgcctatgacgtgaagaacggcaaggagctgtggaagtcccgcctgccagcgggtggccaggccacgccgatgagctacaccggcaaggatggcaagcagtacgtgctggtggtcgtgggcggccacggctccctgggcaccaagatgggcgactacatcattgcctacaaactgtcggaataa

SEQ ID NO: 35531 - protein, 806 aa, Pseudomonas fluorescens Pf-5
MSTEGASSPSRLLPSLLGILLLLMGLALLAGGIKLSMLGGSLYYVLAGIGLTLTGLLLLAGKRAALGLYALVLFASTVWSLWEIGLDWWQLVPRLSLWFALGVVLLLPWFRRPLLHDGPAPLGTAALSVAVVLAGGAAIGSQFTNPGEISGDLGRDTADMTSTAPAIPDGEWQAYGRTEFGDRYSPLKQITPANIGKLQEAWRIRTGDMPTDKDPVEITNQNTPLKVNGKLYACTAHSKVLALDPDTGKEIWRFDPQIQGPNGDDFRGWAHMTCRGVSYYDEANFKNADAISQPATLSPAGQAIATSCPRRLFLPTADARLIAINADTGKVCEDFGTKGAVDLKAGIGPFTPGGYYSTSPAAITRNLVIIGGHVTDNESTNEPSGVIRAFDVHDGHLVWNWDSGNPDETTPLPEGKTYTRNSPNMWSLASVDEKLGMVYLPLGNQMPDQWGGNRTAGAEKFSAGTVALDIDTGKLRWNYQFTHHDLWDMDVGSQPTLLDMKTADGVKPALIQPTKQGSLYVLDRRDGTPIVPIREVPAPTGAVEGDHTAPTQARSDLNLLPPPLDEKAMWGATPFDQMLCRIQFKELRYEGQYTPPSVQGSLIYPGNVGVFNWGSVSLDPVRQLLFTSPNYMAFVSKLVPRAEVAAGSKRESETSGVQPNTGAPYAVIMHPFMSPLGVPCQAPAWGYVAGIDLTTNKVVWKHKNGTSRDSSPIPIGLPMGVPSMGGSMVTGGGVGFLSGTLDQYIRAYDVKNGKELWKSRLPAGGQATPMSYTGKDGKQYVLVVVGGHGSLGTKMGDYIIAYKLSE

SEQ ID NO: 35532 - DNA, 2376 bp, Pseudomonas fluorescens Pf-5
  CDS (1)..(2376): transl_table=11
atgaaaaacacgggggctgccgccggcagcaaatggttgctcggggggctgggtatcctgattgccctgatcgggctgggcctggccgcaggcgggggttacctcctgagcctgggcggcagtgcctatttcctgttgatgggcctggcgatgctggtgtccgggctgttgatcgcgcggcgcaacccgcgtggtgcctggctgtatggggtggccctggtgctgacggcgatctgggcggtctgggatgcgggcctggaatactggccgctggtctcgcgggtactgaccttcgccgtgatcggcctcgtggtggcgctgatctacccgaccctggtgcgtgcctccggagcccatgccgggcgcggtgcctatggcctggctgggctgttggggatcggtgtggtcgcgaccctggcctacatgttcgtgccgacccatgtggtcaaggcggacaaggtgccagcggtccagccggtggctcccgggacggaacagaaagactgggcccactggggcaataccactgcgggcaatcgcttcgccgcactggaccagatcaacaagggcaacatcgaccagttgcaggtggcctggaccttccgcaccggtgacctgcccgaaagcaacggcgctggtgccgaagaccagaacacacccctgcagatcggcgataccgtctacacctgcaccgcctacggcaaggtgttcgccctggacgccgacaccggcgccgagcgctggaagttcgaccctcagggctacgcgccaaactggcagcgctgccgcggcctggggtatttcgacgcctctgccaccccggtagccgatgcttcggtgcctgctgctccggcggcctgcaccaagcgcctgttcctgccgaccggtgatgcgcgcctgatcgcgatcaacgctgaaaccggcaagccctgtgaagactttggcaaccagggcacggtcgatctgaaaaccgacatgggcgagatcaagccgggctactaccagcagacttcgacaccgttggtggcgggcaccgtggtgatcgtcggcggccgggtggcggacaacttctccaccggcgaaccgccgggcgtggttcgggctttcgatgtgcgcagcggcgagctgatgtgggcctgggacccgggcaacccggccaccaccaagcgcccgccggcgggtgaaacctacacccgtggcacgcccaacgtctggtcggcaatgtcctatgacgccaagctgggcctggtgtacctgcccactggcaacgccaccccggatttcttcggcggccagcgcaccgagttcgacgacaagtggaactcctccatcgtcgccatcgacgtgaagaccggccaggttcgctggcacttccagaccacccatcacgacctctgggacttcgacctgccggcacagccgctgctgtacgacattccggacgacaagggcggtgtgcaaccggcgctggcccaggtcaccaagcagggcgagatattcctgctcaaccgtgagaccggcaagccgattgcccgggtggaagagcgccccgtgccccagggcaatgtgccgggcgagcggtattcgccgacccagccgttctcggtggaaatgccgtcgatcggcaaccagaccctgaccgagtccgacatgtggggcgcgactcccttcgaccagctgatgtgccgtatccagttcaagggcatgcgccatgagggtgtttacaccccgccgggcctggatcatgcgttgcagtttccgggctccctgggcggcatgaactggggcagcgtgtcggtggaccccaccagcaactacatgttcgtcaacgacatgcgcctgggcctggccaactacatgattccccgggaccagatcgccgccggtgccagtggcatcgagatgggcgtggtgccccaggaaggcacgccgttcggcgccatgcgccagcgcttcctctcggcggcgggcattccctgccagaagccgccgttcggcaccatgtcggccatcgacctgaagacccgcaagctggtgtggcaagtgccggtgggtaccgtgcaggacaccggcccgctggggatccgcatgcacctgccgatcccgattggcatgccgaccctgggcgcgtccctggctacccaatccggtctgctgttcttcgccggtacccaggatttctacctgcgggccttcgataccggcaatggcaatgagatctggaaggcgcgcctgcccgtaggcagccagtcgggccccatgacctacgtgtcgcccaagaccggtcgccagtacatcctgctcaccgctggcggtgcgcggcagtcgacggatcgtggcgactacgtgattgcttacgcgttgcccaagaaataa

SEQ ID NO: 35533 - protein, 791 aa, Pseudomonas fluorescens Pf-5
MKNTGAAAGSKWLLGGLGILIALIGLGLAAGGGYLLSLGGSAYFLLMGLAMLVSGLLIARRNPRGAWLYGVALVLTAIWAVWDAGLEYWPLVSRVLTFAVIGLVVALIYPTLVRASGAHAGRGAYGLAGLLGIGVVATLAYMFVPTHVVKADKVPAVQPVAPGTEQKDWAHWGNTTAGNRFAALDQINKGNIDQLQVAWTFRTGDLPESNGAGAEDQNTPLQIGDTVYTCTAYGKVFALDADTGAERWKFDPQGYAPNWQRCRGLGYFDASATPVADASVPAAPAACTKRLFLPTGDARLIAINAETGKPCEDFGNQGTVDLKTDMGEIKPGYYQQTSTPLVAGTVVIVGGRVADNFSTGEPPGVVRAFDVRSGELMWAWDPGNPATTKRPPAGETYTRGTPNVWSAMSYDAKLGLVYLPTGNATPDFFGGQRTEFDDKWNSSIVAIDVKTGQVRWHFQTTHHDLWDFDLPAQPLLYDIPDDKGGVQPALAQVTKQGEIFLLNRETGKPIARVEERPVPQGNVPGERYSPTQPFSVEMPSIGNQTLTESDMWGATPFDQLMCRIQFKGMRHEGVYTPPGLDHALQFPGSLGGMNWGSVSVDPTSNYMFVNDMRLGLANYMIPRDQIAAGASGIEMGVVPQEGTPFGAMRQRFLSAAGIPCQKPPFGTMSAIDLKTRKLVWQVPVGTVQDTGPLGIRMHLPIPIGMPTLGASLATQSGLLFFAGTQDFYLRAFDTGNGNEIWKARLPVGSQSGPMTYVSPKTGRQYILLTAGGARQSTDRGDYVIAYALPKK

SEQ ID NO: 35534 - DNA, 2535 bp, Psychrobacter arcticus 273-4
  CDS (1)..(2535): transl_table=11
atggaaaaattcgtagcgatcattatggcagtttttgccgcccccttgcttatcggtggcgcttatctgctctctttaggcggtagtccatactatctctttgctggcattgtcatgctagcgacagcatttttattgttcaaaaaacattggagtgcttacgggctctacgctatttttatagtagcgactattgcttgggctctttgggagtccggcttttattggtgggcactggcacctcgtgttggcttcccattgatctttggtctattaatgttattgccgtgggtatctaataagatgcgcgggcagcgcgctcaagtagcgacaagcactgctaatagtgcaataactccaaacacggttaaaaagaatcctctttattattgggggttgctcgctagtgtggttgtaggtgcactcctttcttttgggagcttagcaaacaacgccacggacaagttaggtgaacttgatttaagtgcctctgataaagacacctctacaaatcttggcgattcattatcaactggcgaacaaacaccagatggcgaatggagcgcatatggccgtactgactatggccaacgctactctcctttgactcaaatcaccactgataatgtcaaagatttagagctggcttggcaaattcaaacgggtgatgttaaaggccctaacgatgttggcgagaccacttatcaggcaacgccgttaaaaatcggcaatgcgctgtacttatgtacgcctcataactgggtaatggcactagatgctgactctggtgagacactatggaagtttgatccaaaagtagaaaaaaacctacaacgccaacaccaaacctgtcgaggtgtgtcttactatgctggtcagtctggcacggatagcactcctccagtggctaataatgagacaagcagtaccattagcaatgcagctgtcagcaatcaacccgctgcaaccagcgatatgatagtgcaaaaaattgctggtaatacctttgaaaatgcatctaagcaatgcgatgctaagatatttatcccaacttctgatgccaaactatatgcactcgatccaaatactgggcaacgctgtcaagattttggtgaagatggcgcattagatttgatgcacaatatgccatttacacaggcgggctactactattcgacgtcgcctccgatagtggtaggcaatacgattgttgtggcaggggccgtcaatgacaactatgatgtaaattcaccttctggtgttatccgtgcttatgatgtcaatactggtgagctattgtggaactgggattcaggcgaccctgacaacaccgcgccttttgatgtcaatgatcctactcagacgtacaaaaccagctcgccaaattcatgggcgatcgctagtgctgatgaagagcttggtttggtttacttccctatgggtaaccgcacgccagatcagctgggcagctaccgaaacgctgctgaagaaaaatatgcaacctctgttgtcgcgttagatattaatacaggcgaagcgcgctgggtacagcagtttgtccatcatgatctttgggatatggatacacctgctcagccaacgttgcttgacttagatacagctgatggcgtccaacctgctttggttgtaccgaccaaacaaggtgatgtctatgtcttgaaccgcgcaacaggcgagcctattgtaccaatcaaagaacgtgatgcaccgcaaggctatctcattgcaggtgaacacgccgcacccactcagccttattctggtttgagttttgagccaccaatgttgaaagaaaaagacatgtggggtgccagcctgattgatcagatgatgtgccggattgaatttaaccagcttaattatgatggtcgttatacaccaccatcaacgaatggcagcatagtctatcctggtaactttggtacctttaactggggcggaatcgccgtcgatcctgaaaatggcgtgatgtttggtatgccaacttaccttgcctttacctcaaaactcattcccaaagaaacacttggtgatgttgaaaccaataaaggtgagcaaggtgtgaatgccaatgaaggcgcagattatgcggtagaaatgggaccgtttttatcaccgcttggcgtaccttgtcagcagccaccatggggcacgatagcaggtgctgatttggccacaggcgagattgcttatcaacgcaaaaatggtaccgtacaagacttatctcctattccattaaaattggagttaggtgtccctggtatcggtggacctatcatcactaaaggtggcgtcgcactcttatcagcggcgaccgaaaacaacttccgcgcttatgatttgaaaaatggtgatgtactatggaatgtgcgtattccagcaggtggtcaagccacgcctatgacttacttgaactctaaaggtgagcaaatggtagtattggttgctggtggacatggttcagtgggtacaaccattggtgattatgtcatggcctataagcttgctaagtga

SEQ ID NO: 35535 - protein, 844 aa, Psychrobacter arcticus 273-4
MEKFVAIIMAVFAAPLLIGGAYLLSLGGSPYYLFAGIVMLATAFLLFKKHWSAYGLYAIFIVATIAWALWESGFYWWALAPRVGFPLIFGLLMLLPWVSNKMRGQRAQVATSTANSAITPNTVKKNPLYYWGLLASVVVGALLSFGSLANNATDKLGELDLSASDKDTSTNLGDSLSTGEQTPDGEWSAYGRTDYGQRYSPLTQITTDNVKDLELAWQIQTGDVKGPNDVGETTYQATPLKIGNALYLCTPHNWVMALDADSGETLWKFDPKVEKNLQRQHQTCRGVSYYAGQSGTDSTPPVANNETSSTISNAAVSNQPAATSDMIVQKIAGNTFENASKQCDAKIFIPTSDAKLYALDPNTGQRCQDFGEDGALDLMHNMPFTQAGYYYSTSPPIVVGNTIVVAGAVNDNYDVNSPSGVIRAYDVNTGELLWNWDSGDPDNTAPFDVNDPTQTYKTSSPNSWAIASADEELGLVYFPMGNRTPDQLGSYRNAAEEKYATSVVALDINTGEARWVQQFVHHDLWDMDTPAQPTLLDLDTADGVQPALVVPTKQGDVYVLNRATGEPIVPIKERDAPQGYLIAGEHAAPTQPYSGLSFEPPMLKEKDMWGASLIDQMMCRIEFNQLNYDGRYTPPSTNGSIVYPGNFGTFNWGGIAVDPENGVMFGMPTYLAFTSKLIPKETLGDVETNKGEQGVNANEGADYAVEMGPFLSPLGVPCQQPPWGTIAGADLATGEIAYQRKNGTVQDLSPIPLKLELGVPGIGGPIITKGGVALLSAATENNFRAYDLKNGDVLWNVRIPAGGQATPMTYLNSKGEQMVVLVAGGHGSVGTTIGDYVMAYKLAK

SEQ ID NO: 35536 - DNA, 2334 bp, Pseudomonas syringae pv. phaseolicola 1448A
  CDS (1)..(2334): transl_table=11
ttgctgctgcttgggctgggagtactgatcgccctgatcgggctcggtctggcaggtggcggcggctatctggtgacattgggcggcagctggttcttcctgctgatgggactggcgatgctggtcagtggtgcgctgatcgccgtgcgcaaacccaaaggtgccgggttgtatggcatcgccctgatactgaccgccgtctgggctatctgggatgcaggcctgcactattggccgctggtgtcccgcctattgacctttgccgtgatcggcctggtgattgcgctgatctacccgacactggttcgcgcttcgggtgctcaggcaggccgcggtgcctatggtctggccggtctgttggccatcggtgttgtggcgaccatcggctacatgttcgttccgagccatgtggtcagcgccagcagcgtgccggctattgtcccggtggcaccgggtgccgagcagaaggactgggcacactggggcaataccccggcaggtaaccggttcgctgctctggatcagatcaacaagagcaacgtcgacaagctgcaggttgcctggaccttccacaccggcgacattccgcagagcacaggtgccggtgcagaagaccagaacaccccgctgcagatcggcgacacggtgtacacctgcaccgcctacggcaaagtattcgcactggatgctgacaccggcactcagcgctggaagttcgacccgcagggcagtgcgcccaactggcagcgctgccgaggcctgggctacttccccgcacccgcagctgcacccgacgcacctgcccagccagccgccgcgtgcgccacacgcgtgtttctgccgactggcgacgctcgcctgatcgcactcgatgccaggaccggcgagacctgcaaggactttggtaatcaaggcgtagtcgatctgaaaaccgacatgggcgaagtcaaggaaggctactaccagcagacctcgacgccgctggtggcgggcaatgtggttgtggtgggcggtcgggttgccgacaacttctccaccggcgaacctccaggcgtggtgcgtgctttcgacgtacacagcggcgagctggtctgggcatgggatccgggtaacccgaataccaacaagcgtccgccagcaggcgaaacctatacgcgtggcacgccgaacgtctggtcggccatgtcctacgatgacaagctcggcctgatctacctgccgaccggtaacgctacacccgacttcttcggcgggacgcgtaccgagcaggacgacaaatggtcctcatcagtcgttgcggtggacgtaaagaccggtcaggtgcgctggaacttccagatgacccaccatgatctatgggacttcgacattccggcgcagccgttgctgtatgacatcccggacggcaagggcggtacgcagccggcattggcgcaagtcaccaagcagggcgagatttttctgctcaaccgcgaaaccggcgtgccgatttcgcgtgtcgaagaacgccctgtgccgcagggcaatgtgccgggcgagcgctattcgccgacccagccgttctcggtggacatgccgtcgattggcaaccagaccctcaaagagtcggacatgtggggtgctacggcgttcgaccagctgatgtgccgcatcgctttcaaaggcatgcgtcacgagggcgtttacacaccgccaggcctggcccctgcgttgcagttccccggctcgctgggcggcatgaactggggcagcgtctcggtcgacccgaccaacaactatatgttcgtcaatgacatgcgcctgggcctggccaactacatgatcccgcgcgacaagatcgccgccggtgccagtggtatcgagatgggcgtcgtgccgcaaaccggcacgccgtttggtgccatgcgccagcgcttcctgtctgccgtcggcataccgtgccaggcaccgccgttcggcaccatgtcggcgattgacctgaaaaccaaaaagctgatgtggcaggttccggtcggcaccgtgaaagacacaggtccgatgggcatccgcatgggcctgccgattccgattggcatgccgacgctgggcgcttcgttgtctacccagtcgggcttgctgttcttcgccggtacccaggacttctacctgcgtgccttcgacagcggcaacggcaacgaagtctggaaggcccgtctgccagtcggcagtcagtccggcccgatgacctacgtgtcgcccaaaaccggcaagcaatacatcctgctcaccgccggcggcgcccgccaatcgccggatcgtggcgattacgtgattgcctacgcgttacccaagtaa

SEQ ID NO: 35537 - protein, 777 aa, Pseudomonas syringae pv. phaseolicola 1448A
MLLLGLGVLIALIGLGLAGGGGYLVTLGGSWFFLLMGLAMLVSGALIAVRKPKGAGLYGIALILTAVWAIWDAGLHYWPLVSRLLTFAVIGLVIALIYPTLVRASGAQAGRGAYGLAGLLAIGVVATIGYMFVPSHVVSASSVPAIVPVAPGAEQKDWAHWGNTPAGNRFAALDQINKSNVDKLQVAWTFHTGDIPQSTGAGAEDQNTPLQIGDTVYTCTAYGKVFALDADTGTQRWKFDPQGSAPNWQRCRGLGYFPAPAAAPDAPAQPAAACATRVFLPTGDARLIALDARTGETCKDFGNQGVVDLKTDMGEVKEGYYQQTSTPLVAGNVVVVGGRVADNFSTGEPPGVVRAFDVHSGELVWAWDPGNPNTNKRPPAGETYTRGTPNVWSAMSYDDKLGLIYLPTGNATPDFFGGTRTEQDDKWSSSVVAVDVKTGQVRWNFQMTHHDLWDFDIPAQPLLYDIPDGKGGTQPALAQVTKQGEIFLLNRETGVPISRVEERPVPQGNVPGERYSPTQPFSVDMPSIGNQTLKESDMWGATAFDQLMCRIAFKGMRHEGVYTPPGLAPALQFPGSLGGMNWGSVSVDPTNNYMFVNDMRLGLANYMIPRDKIAAGASGIEMGVVPQTGTPFGAMRQRFLSAVGIPCQAPPFGTMSAIDLKTKKLMWQVPVGTVKDTGPMGIRMGLPIPIGMPTLGASLSTQSGLLFFAGTQDFYLRAFDSGNGNEVWKARLPVGSQSGPMTYVSPKTGKQYILLTAGGARQSPDRGDYVIAYALPK

SEQ ID NO: 35538 - DNA, 2418 bp, Pseudomonas syringae pv. phaseolicola 1448A
  CDS (1)..(2418): transl_table=11
atgagcactgacagtgcttcaaatagaaatcgcctgttgccgaccctgctcgggctggtgatcctgttgatggggctggccttgctggtcggtggtgcccgactgctgcaactggatggctcgttgtattacctgttggccggtatcggcttcgccgtgaccggcgtgttgctgatcactggtcgcgcggctgcgctgggcctttatgcactgctgctgttcgcgagcaccgtatggtcgttgtgggaagtcggactcgattggtggcaactggtgccacgcctggcgctgtggttcgcactgggcatcgtcctgctgctgccgtggttccgcaagccactgctgcgcaatggcccggcgcgcctgggcactggcgcattgagcgttgctgtcgtgctggccggtctgaccgcgctggcgagccagttcaccaaccctggccgtatcgaaggccagctggaccgcgaaactgctggcaccaccaacaccgctccggccatgcctgacggcgactggcagtcctacggccgtaccgcattcggcgaccgctactcgcctctggcacagatcaccccggaaaacgtcaacaaactggaaccggcctggaccttccgcactggcgacatccctgggccgaacgacccgggtgaaaccactgccgagaacaccccgctcaaggtcaacggcatgctctacgtgtgtacgccgcacagccaggtgatcgcgcttgatccggattcgggcaaggaaatctggcgcttcgatccgaagctcagcacccagaatgcgaaaaacttcaaaggctgggcgcacatgacctgccgtggcgtcacttatcatgacgacgcagcctatgcagccagcgccccggcacaaagcccggcagcaccggccgcagccagtgccacttcaagtgcctgtccacgcagaatcttcctgccgactgccgacacccgtctgatcgcgctgaacgccgataccggcaagatgtgtgaagatttcggcaacaagggttcggttgacctgaccgccaacatgggcacattcgcgccgggcggctattactccacgtcgccaccggcagtgaccaaagacctggtgatcatcggcggccacgttaccgataacgtctccatggatgaaccgtccggcgtgatacgtacctacgacgtgcacactggccgtctggtctggaactgggacagcggcaacccggaagagactgcgccgattgccgaaggcaagatctacacgcgcaactcgccgaacatgtggtccatgttcagcgtcgatgaaaagctcggcatgatctacctgccgatgggtaaccagacgcctgaccaatggggcggcgatcgtacgccggattccgagaaatacagcgcgggcctggttgcgctggacatcgcgacgggtcgcgtacgttggaattaccagttcacccaccatgacctgtgggacatggacgtgggtggtcaaccgaccctgctggacatgaaaacggctgatggcgtgaagccggcggtattggcatcgaccaagcagggcagcatctacgtgctggaccgcagcaccggtcagcccattgtgccgatcaacgaaataccggttccgcaaggcgctgttgcaggcgatcacacctcgccgacccagcccaagtccgacctgaacttcatgccgccgccgcttaaagagcgcgacatgtggggcgtgacgccatttgaccagatgatgtgccggatcgacttcaagtcgctgcgctacgacggcccgttcacgccgccatcgctgcagggttcgattgtttatccaggtaacttcggtgtgttcgactggggcggtatttccgtcgacccggttcgtcagattgccttcgtcaacccgagctacatggcgttccgttcaaagctggtgcctgctgccgaagtcgaaggcggccctggccgcaagagcgaaaccgaaggcgtgcagccaaacaagggcgcaccttatggcgtgatcctggaagcactgctgtcgccaatggccctgccgtgccaggcaccggcgtggggttacgtggcggcggtcgatctgaccacccacaaaaccatctggatgcacaagaacggtaccgtgcgtgacagttcgccaatcccgatcccgctgaccatgggcgttccaagcctgggtggcccgatcacaacggcgagcggtctggccttcctgagcggtacgcttgaccaatacctgcgcgcctacgatgtacgtaacggcaaacagctgtgggaaggtcgcctgccagcaggcgcccaaaccacaccgatgacctacaccggcaaggacggtcagcaatacgtgctggtcgtggcgggcggtcacggttcactgggcaccaaacagggtgactacgtgatggcattcaaactgccgaagtga

SEQ ID NO: 35539 - protein, 805 aa, Pseudomonas syringae pv. phaseolicola 1448A
MSTDSASNRNRLLPTLLGLVILLMGLALLVGGARLLQLDGSLYYLLAGIGFAVTGVLLITGRAAALGLYALLLFASTVWSLWEVGLDWWQLVPRLALWFALGIVLLLPWFRKPLLRNGPARLGTGALSVAVVLAGLTALASQFTNPGRIEGQLDRETAGTTNTAPAMPDGDWQSYGRTAFGDRYSPLAQITPENVNKLEPAWTFRTGDIPGPNDPGETTAENTPLKVNGMLYVCTPHSQVIALDPDSGKEIWRFDPKLSTQNAKNFKGWAHMTCRGVTYHDDAAYAASAPAQSPAAPAAASATSSACPRRIFLPTADTRLIALNADTGKMCEDFGNKGSVDLTANMGTFAPGGYYSTSPPAVTKDLVIIGGHVTDNVSMDEPSGVIRTYDVHTGRLVWNWDSGNPEETAPIAEGKIYTRNSPNMWSMFSVDEKLGMIYLPMGNQTPDQWGGDRTPDSEKYSAGLVALDIATGRVRWNYQFTHHDLWDMDVGGQPTLLDMKTADGVKPAVLASTKQGSIYVLDRSTGQPIVPINEIPVPQGAVAGDHTSPTQPKSDLNFMPPPLKERDMWGVTPFDQMMCRIDFKSLRYDGPFTPPSLQGSIVYPGNFGVFDWGGISVDPVRQIAFVNPSYMAFRSKLVPAAEVEGGPGRKSETEGVQPNKGAPYGVILEALLSPMALPCQAPAWGYVAAVDLTTHKTIWMHKNGTVRDSSPIPIPLTMGVPSLGGPITTASGLAFLSGTLDQYLRAYDVRNGKQLWEGRLPAGAQTTPMTYTGKDGQQYVLVVAGGHGSLGTKQGDYVMAFKLPK

SEQ ID NO: 35540 - DNA, 2406 bp, Pseudomonas fluorescens PfO-1
  CDS (1)..(2406): transl_table=11
gtgaagcagagtcaacgcctctcgggcatatcaacattcattctggtcgggctgggcgtgatcatcgccctgctcggcctggcactggccgctggcggtgtgaaattggtcagcctgggaggctcctggtacttcctggtgggtggtctggtgatggccgtttccggtctgctgatcgcgcggcgcaagcctgccggtgcctggctgttcgcggcgtttctggttgggaccgccatctgggccgtgatcgacgcagggctggtgttctggccggtgttctctcgcctgttcatgttcagcgcggtgggtctggtggtcgcgctggtctatccgctgctcaaacgcgccaatggtgacgttgcaggtcgcggtgcttacggcgttgcggctgttctggccgttggactggccgtggctgccggcaacatgttcgtcgcgcacccgaccgtcgcccctaccggcaccggcccgggcctcaccccggtcgagccggaaaaggcgcagaaagactgggcccactacggcaataccgaaggcggcagccgcttcgccgcgctggaccagatcaaccgcagcaacgtcgacaagctgaaagtggcgtggacctaccacaccggcgacatcgccgagagcgatggcaacggtgccgaagaccagctgaccccactgcagattggcaacaaggtgttcatctgcaccccgcacaacaacctgattgcgctggatgccgataccggtaaagagctctggaaaaacgcgatcaacgctcaatccaaagtctggcagcgttgccgtggcatggcgtatttcgacgccagcgccgccgtcgccaaaccggccagcgcgccagtgagcgaaaccccgaccgctccaatcgccaactgcacacgtcgcttgctgaccaacaccatcgacgcccgcctgatcgcggttgatgccgacaccggcgagttctgccggggtttcggcaacaatggccaggtcgatctgaaggccggtctgggtgatgtcccggacagctactatcaactgtcctccgcgccgctgatggccggcaccactgtggtggttggcggtcgtgtggccgacaacgtgcagaccgacatgccgggcggcgtgatccgtggtttcgacgtgatgaccggtgccatgcgctgggcattcgacccgggcaatccaaccgatcgcaaggcacccgcagacggcagcacttatgtgcgcagcacgccgaacagctgggccccgatgtcctacgacccggcgaccaacaccgtattcctgccgatgggcagttcttccaccgacatctatggtgtcgagcgcagcaaactcgatcacacctacggtgcctccgtcctggcgctggacgccaacagcggcgaagaaaagtgggtattccagaccgtgcacaacgacctctgggacttcgacttgccgatgcagccaagcctgatcgacttcaccaaggacggtaaaaccgtaccggcggtggtcatcggcaccaaggccgggcagatttacgtgctcgaccgcgccactggcaaaccgttgaccgacgtaaaggaagtgccggtcaaggccgccaatatccccaacgagccgtactcgccgacccagccgaaatccgtgggcatgccgcaaatcggtgcccagcacttgactgaatcggacatgtggggcgccaccccgtacgaccagctgctgtgccggatcgatttcaagtcgatgcgttacgacggcttgtacaccgcgccgggcactgacaaatccctgagtttcccgggttcgctgggcggcatgaactggggcagcatttccactgacccggtgcacggtttcatcttcgtcaacgacatgcgtctgggcctgtggattcagatgatcccgtcgcagaacaaggctcaggcctcttccggtggcgaagcgctgaacaccggcatgggtgccgtgccgctcaagggcacgccttacgccgtgaacaaaaaccgcttcctgtcggtcgccggcattccgtgccaggccccgccgttcggtacgctgaccgccatcgacatgaaaacccagaaagtcgcctggcaagtgccggtcggcaccgttgaagacaccggtcccttgggcatccgcatgcacctgccgatcaagatcggtctgccaaccctcggcggcacgctgtcgacccagggcggcctgatcttcatcgccggcacccaggacttctacctgcgcgccttcaacagcgccaatggtgaagaaatctggaaagcgcgtctgccggtcggcagtcagggtggcccgatgacctatgtgtcgccgaaaaccggcaagcaatacgtggtcatcaccgccggtggcgctcgccagtcgactgatcgcggtgactacgtgatggcttacgccctgccgtaa

SEQ ID NO: 35541 - protein, 801 aa, Pseudomonas fluorescens PfO-1
MKQSQRLSGISTFILVGLGVIIALLGLALAAGGVKLVSLGGSWYFLVGGLVMAVSGLLIARRKPAGAWLFAAFLVGTAIWAVIDAGLVFWPVFSRLFMFSAVGLVVALVYPLLKRANGDVAGRGAYGVAAVLAVGLAVAAGNMFVAHPTVAPTGTGPGLTPVEPEKAQKDWAHYGNTEGGSRFAALDQINRSNVDKLKVAWTYHTGDIAESDGNGAEDQLTPLQIGNKVFICTPHNNLIALDADTGKELWKNAINAQSKVWQRCRGMAYFDASAAVAKPASAPVSETPTAPIANCTRRLLTNTIDARLIAVDADTGEFCRGFGNNGQVDLKAGLGDVPDSYYQLSSAPLMAGTTVVVGGRVADNVQTDMPGGVIRGFDVMTGAMRWAFDPGNPTDRKAPADGSTYVRSTPNSWAPMSYDPATNTVFLPMGSSSTDIYGVERSKLDHTYGASVLALDANSGEEKWVFQTVHNDLWDFDLPMQPSLIDFTKDGKTVPAVVIGTKAGQIYVLDRATGKPLTDVKEVPVKAANIPNEPYSPTQPKSVGMPQIGAQHLTESDMWGATPYDQLLCRIDFKSMRYDGLYTAPGTDKSLSFPGSLGGMNWGSISTDPVHGFIFVNDMRLGLWIQMIPSQNKAQASSGGEALNTGMGAVPLKGTPYAVNKNRFLSVAGIPCQAPPFGTLTAIDMKTQKVAWQVPVGTVEDTGPLGIRMHLPIKIGLPTLGGTLSTQGGLIFIAGTQDFYLRAFNSANGEEIWKARLPVGSQGGPMTYVSPKTGKQYVVITAGGARQSTDRGDYVMAYALP

SEQ ID NO: 35542 - DNA, 2412 bp, Pseudomonas fluorescens PfO-1
  CDS (1)..(2412): transl_table=11
atgagcactgaaggtgcttcgagtcgaagccgtcttctgccgaacctgctcggcattctgcttctgctgatgggcctggccatgctggccgggggaatcaagctgagtacgctcggcggctcgctgtattacctgctggccggtatcggcatcacgctgaccggcattctgatgctgatgcgccgtcgcgcagcattgggcctgtacgccatcgtgctgttcgccagcactgtctgggcgctgtgggaagttggtctggactggtggcaactggtgccgcgtctggcgctgtggtttgtcctcggtttcgtgatgctgctgccgtggttccgtcgtccgctgctgctcgcaggccctgcgccgatgggcaccggcggtttgaccgtggctgtgattctggccggcgtcactgccctggccagcctgttcacccacccgggcgaaaccttcggcgaactgggtcgcgacaccgccgacaccaccagcaccgccccgcaaatgccggacggcgactggcaggcctacggccgcaccgaattcggtgaccgctactcgccactgaaacagatcaccccggccaacgtcggcaagctgcaagaagcctggcgcatccagaccggcgacctgccgactgccgacgacccggtcgagctgaccaacgaaaacaccccgctgaaagccaacggcatgctttacgcctgcactgcgcacagcaaagtgctggcactggacccggacaccggcaaggaactatggcgcttcgatccgcagatcaaaagcccggaaggcttcaagggcttcgcccacatgacctgccgtggcgtgtcgtactacgacgaagccgcgtacgccaagtctgaaaacgcggcgtccaccgtgatctccgaggccggcaaagccgtcgcccaggcctgcccgcgtcgcctgtacctgcctaccgccgatgcccgcctgatcgcactgaacgccgacaccggcaagatctgcgaaggcttcggcaccaacggtgtggttgacctgacccagggcatcggcccgttcaccgctggcggttactactccacctctcctgccgcgatcacccgtgatctggtgatcatgggcggtcacgtcaccgacaacgaatcgaccaacgagccgtccggcgtgatccgcgcctacgacgtgcgcgacggccatctggtctggaactgggacagcaacaacccggacgccaccgaacccttggccccgggccagacctacagccgcaactcggccaacatgtggtcgctggccagcgtcgatgaaaaactcggcatggtctatctgccattgggcaaccagacgcctgaccagtggggcggcgatcgcacccccggtgccgagaaattcagcgccggcctggtcgcgctggacctggcgaccggcaaggtgcgctggaactaccagttcacccaccacgacctgtgggacatggacgtcggcagccagccaaccctgctggacatgaaaaccgccgacggcatcaagcctgcgctgatcgccccgaccaagcagggcagcctgtacgtcctcgaccgtcgtgacggcacgccgatcatcccgatccgcgagatcccggtgccgcaaggcgccgtgaaaggcgaccacaccgccccgacccaggcccgttcggacctgaacctgctggccccggaactgaccgaaaaagccatgtggggcgccagcccgttcgaccagatgttgtgccgcatccagttcaaggaactgcgctacgaaggccaatacacgcctccgtcggaacagggcagcctgatctacccgggtaacgtcggcgtgttcaactggggcggtgtttctgtcgacccggttcgccagatgctgttcaccagcccgaactacatggctttcgtctccaagatgatcccacgtgccgacgtacccgccgacagcaagcgcgaaagcgaaacttccggcatccagaaaaacaccggtgcgccgtatgccgtgaccatgcacccgttcatgtcgccactgggcgtaccttgccaggccccggcctggggctacgtcgccggtatcgacctgaccaccggcaaagtcgtctggaaacgcaaaaacggtaccagccgcgacagctcgccaatcccgatcggcttcaccctgggcgtgccaagcatgggcggctcgatcgtcactgccggcggcgtcggcttcctcagcggcacgctggaccagtacctgcgcgcctacgacgtgaacaccggtaaagaactgtggaaatcgcgtctgccggccggcggccaggcgaccccaatgacctacaccggcaaggacggcaagcaatacgtcctgctcgtggtgggtggtcacggctcgctgggcaccaagatgggtgactatgtgattgcctacaaactgccggaataa

SEQ ID NO: 35543 - protein, 803 aa, Pseudomonas fluorescens PfO-1
MSTEGASSRSRLLPNLLGILLLLMGLAMLAGGIKLSTLGGSLYYLLAGIGITLTGILMLMRRRAALGLYAIVLFASTVWALWEVGLDWWQLVPRLALWFVLGFVMLLPWFRRPLLLAGPAPMGTGGLTVAVILAGVTALASLFTHPGETFGELGRDTADTTSTAPQMPDGDWQAYGRTEFGDRYSPLKQITPANVGKLQEAWRIQTGDLPTADDPVELTNENTPLKANGMLYACTAHSKVLALDPDTGKELWRFDPQIKSPEGFKGFAHMTCRGVSYYDEAAYAKSENAASTVISEAGKAVAQACPRRLYLPTADARLIALNADTGKICEGFGTNGVVDLTQGIGPFTAGGYYSTSPAAITRDLVIMGGHVTDNESTNEPSGVIRAYDVRDGHLVWNWDSNNPDATEPLAPGQTYSRNSANMWSLASVDEKLGMVYLPLGNQTPDQWGGDRTPGAEKFSAGLVALDLATGKVRWNYQFTHHDLWDMDVGSQPTLLDMKTADGIKPALIAPTKQGSLYVLDRRDGTPIIPIREIPVPQGAVKGDHTAPTQARSDLNLLAPELTEKAMWGASPFDQMLCRIQFKELRYEGQYTPPSEQGSLIYPGNVGVFNWGGVSVDPVRQMLFTSPNYMAFVSKMIPRADVPADSKRESETSGIQKNTGAPYAVTMHPFMSPLGVPCQAPAWGYVAGIDLTTGKVVWKRKNGTSRDSSPIPIGFTLGVPSMGGSIVTAGGVGFLSGTLDQYLRAYDVNTGKELWKSRLPAGGQATPMTYTGKDGKQYVLLVVGGHGSLGTKMGDYVIAYKLPE

SEQ ID NO: 35544 - DNA, 2346 bp, Rhodobacter sphaeroides 2.4.1
  CDS (1)..(2346): transl_table=11
ttgaccgctaccctgaccgccatcgtccttgccctcgccgggctgggcctcctcatcccgggcgcctggctggccgttctgggcgggagctggttctacctcgtggccggagccctcatgctgctgacggcatggcaggtgttccgccgctcctcctccgccgaatggatctatggcggcctcatcctcggcgcgctcgtctggtccgtctgggaagtgggcttcgactggtgggaactcattccccgcggcggcatcatcgcgcttctgggcatctggctctacctgcccttcatgcggcggcagctgctgaccgaggacggccgccccgcgcccggcctgcccttggccctgccccttctggcggccatcggggccgccatctggtcatggaccggagacgaagcgggacatgcaggctcgctgccgacggaagtggtcagcgccgagcccgatctcggcccctccgcgcctcccggcgagtggcaccagtacggccgcacgcagtacgggcagcgctacagcccgctcgaacagatcaacatccagaatgtcgccgagctcgagcaggtctggcagtatcagaccggcgatgtgaagctgccgcaggacgtgaccgagaccacctatcaggtcacgccgctgaaggtcgccgaccgtctctacatctgcaccccgcacgatctggccatcgcgctcgatgcggcgaccggcaaggaagcctggcgcttcgacgcgcgctccgggctcgagtccgaccggcagcaccagacctgccgcggcgtgacctactggcgggatccggcacgcgccgagggagagctctgcgccgagcgggtctatctgccgacggccgatgcgcggctgatcgcgctcgacgcaaagtccggcgcggtctgcaccttcttcgccgacgagggtacgctccatctcgagaacgggatgccctacaccccggcaggcttctactattccacctccccgcccgtggcggtcggaggccggatcatcatcggcggcgcggtcaacgacaatttctcggtctattcgcagtcgggcgtgatccgggccttcgatgccaacaccggggcgctcctgtggaactgggacagcgccaaccccgacaagaccgcccccatcgactggatgaacggcgagacctataccgcaaattcgcccaactcctggtcggtcttctcggtcgatgaggaacgcggcctcgtctacatcccgctcggcaaccaggtccccgaccagctgggcttcaaccgctcgcccgccgtcgaggaacattcctcctcggtcgtggcgctcgacgtggcgacgggtcagaaggcctgggtgttccagaccgtgcaccatgacctgtgggacatggacgtgcccgcccagcccgttctgatcgatctcgacatcgacggtcagacggtgcccgcgctcgtgcagccgacgaagcagggcgacatctatgtgctcaaccgcgagacgggcgagccgatcctgcccgtcaccgaagagcccgccccgcaggagggcgctctgcgcgaagagacccctgccccgacgcagcccacctcggcgctgagcttcaaacccgaggcgctgcgcgagaaggacatgtggggcgtcacgctctacgaccagctcgcctgccggatccagtatcaccggttgaactacgagggccgctacacgcccccgtcgctgaacggcaccatcgtctatccgggcaatttcggcaccttcaactggggctccgtcgccgtcgatcccgagcggcaggtgatgttcggcatgcccacctacctgcccttcacgagccagctggttccggccgaggacatcccgccgcccggcgcagatcagaaggccagcgaacagggcctgaaccgcaacgagggcgcgccctacggcgtcatcatggggcccttcctcgggccgctcggcgtgccctgctcggcgccgccgtggggcttcgtcgcgggggcggacctccgcaccggagagatcgcctacatgcaccgcaacggcaccgtgcgcgacatgacgcccctgccgctgcccttcaaggtgggcgtgccggggatcggcgggccgatcgtcacgcgcggcggcgtggccttcctcggagcggcggtcgacgactacctgcgcgcctacgatgtgaccacgggcgatcagctctggcaggcgcggctgcccgcgggcggccagtcgacgccgatgacctacgagcaggacggccggcagttcgtggtgatcgtggcgggcgggcacggctcggtcggcacgaaaccgggcgactatgtgatcgcctacgccctgcccgacggctcggagggttga

SEQ ID NO: 35545 - protein, 781 aa, Rhodobacter sphaeroides 2.4.1
MTATLTAIVLALAGLGLLIPGAWLAVLGGSWFYLVAGALMLLTAWQVFRRSSSAEWIYGGLILGALVWSVWEVGFDWWELIPRGGIIALLGIWLYLPFMRRQLLTEDGRPAPGLPLALPLLAAIGAAIWSWTGDEAGHAGSLPTEVVSAEPDLGPSAPPGEWHQYGRTQYGQRYSPLEQINIQNVAELEQVWQYQTGDVKLPQDVTETTYQVTPLKVADRLYICTPHDLAIALDAATGKEAWRFDARSGLESDRQHQTCRGVTYWRDPARAEGELCAERVYLPTADARLIALDAKSGAVCTFFADEGTLHLENGMPYTPAGFYYSTSPPVAVGGRIIIGGAVNDNFSVYSQSGVIRAFDANTGALLWNWDSANPDKTAPIDWMNGETYTANSPNSWSVFSVDEERGLVYIPLGNQVPDQLGFNRSPAVEEHSSSVVALDVATGQKAWVFQTVHHDLWDMDVPAQPVLIDLDIDGQTVPALVQPTKQGDIYVLNRETGEPILPVTEEPAPQEGALREETPAPTQPTSALSFKPEALREKDMWGVTLYDQLACRIQYHRLNYEGRYTPPSLNGTIVYPGNFGTFNWGSVAVDPERQVMFGMPTYLPFTSQLVPAEDIPPPGADQKASEQGLNRNEGAPYGVIMGPFLGPLGVPCSAPPWGFVAGADLRTGEIAYMHRNGTVRDMTPLPLPFKVGVPGIGGPIVTRGGVAFLGAAVDDYLRAYDVTTGDQLWQARLPAGGQSTPMTYEQDGRQFVVIVAGGHGSVGTKPGDYVIAYALPDGSEG

SEQ ID NO: 35546 - DNA, 2400 bp, Burkholderia xenovorans LB400
  CDS (1)..(2400): transl_table=11
atgcacagttccgcctcaattcgcgtagcgcatttgcttagcgttctgtttgcctcattgtcgggggtgtacctgctggtcggcgggatctggctagcggcgaccggcggatcgctgtactacgttttcgccggtatcgtcatgctcgttacggcggttctgatttatcggcgttccccactagcactcggcctctacgcattactgctgttgtgcacgatcgtgtggtcgctgtgggaggtcggcacggatttctgggctcttgccccgcgtctggacgtactggtcgtcttcggcatctggctgctgttgccgtatgtctatcgcgcgttcgagccgtccgcaaaaacgcatggtctcgcgctcggggccacgttgatcgtgagcgtcgcagtgctggtttttgcagtcttcaacgacccacaggaaatcaacggcacgctggcgagcgcgcctgcccaggcggcggcgacgcccgccggcgagcgcgtcgccgagggcgactggcccgcctacggccgtacccagcacggtacgcgctactctccgctcaagcagatcaacgcggataacgtcaaggatctgaaggtcgcgtggatattccggaccggcgacatgaagcgctccaccgacccaggtgaaatcacgaacgaagttaccccgatcaaggtgggcgacatgctgtatctgtgctcgccgcaccagatactgttcgcgcttgacgctgccaccggccaggaaaaatggcgcttcgatcccaagctgaagaccgatcccagttttcagcatgtcacgtgccgtggggtgtcgtaccatgattcgaccgcttcgggcagtaacaacgacagcccggaccaggccccggctacggcgcctgcaatctgcgcgcgccgcgtctacctgcctgtcaacaacgggcatctgtacgcgctcgacgcgcagaccggccagctatgcccggacttcgccaatcacggcgacctcgacctgcaagtgggccagcccgtgacgaccgcgggtcaatatgaacccacttcgccgccggtcatcaccgggaaggtgatcgtaatcgcaggctcagtcgaggataactattcgacgcgggagccctcgggagtgatccggggtttcgatgtcaacaccggcaaactgttgtgggcgttcgatccgggcgcgaagaacccggaagcggtgctcggcgcaggccagcattattcggtcaactcgccgaactcctgggcaccggctgtttatgacgcaaagctcgatcttgtctatctgccgatgggcgtaagcacgcccgacatctggggcggctaccgcacgccggagcaggaacgctttgcgagcgggctgctcgcgctcaacgcgacgaccggcaagctcgcctggttttatcagacggtccaccacgacctgtgggacatggacctgccggcgcagccgacgctcgccgatatcacggaccggtcgggcaacctcgtgccggcggtctacgccccggcaaagacgggcaacattttcgttcttgaccgccgcacaggcacgccgatcgttcctgctccggagaagccggttccgcaaggcgcggcgcaaggcgatcacgtgtcgcccacccagccgttttcggcgctgaccttccggccggacaggaaactgaccggcgcggacatgtggggcgcaacgatgtttgaccagctcgtgtgccgagtgatgttccagcgcctgaactatgacggcacgtttacccctccgtcggtgaagggcaccctggtttttccgggtaacctcgggatgttcgagtggggcggcatagcagtggataccgatcgccagatcgcgattgcgaacccgatcgcactgccgttcgtgtccaggttgatgccgcgtgggccgggcaacccgatcgaaccggccgccggcggcacgggcggcagcggtaccgaatccggtatccagccgcagtacggcgtgcccttcggtgtgacgttgaatgccttcatgtcgccgctcggcctgccgtgcaagcagccggcgtggggctacatatccgcggtcgatctgaagaccaaccagattgtctggaaaaagcgcattggcaccgtgcgtgacagttcaccgctgccgctgccgttcaagatggggatgccgatgctcggcggcccgatgacaacggccggcgacgtgttcttcatcggggccaccgccgacaactacatccgcgcgttcgacaccaacaccggcaagcagttgtggcaagcacgtttgcccgcgggtggccaggcgacgccaatgacctacgaggcgaaagggaagcagtacgtggtcatcgcggccggcggccacggctcgttcggcaccaggttgggcgactacgtgatggcttatgcgctgccttga

SEQ ID NO: 35547 - protein, 799 aa, Burkholderia xenovorans LB400
MHSSASIRVAHLLSVLFASLSGVYLLVGGIWLAATGGSLYYVFAGIVMLVTAVLIYRRSPLALGLYALLLLCTIVWSLWEVGTDFWALAPRLDVLVVFGIWLLLPYVYRAFEPSAKTHGLALGATLIVSVAVLVFAVFNDPQEINGTLASAPAQAAATPAGERVAEGDWPAYGRTQHGTRYSPLKQINADNVKDLKVAWIFRTGDMKRSTDPGEITNEVTPIKVGDMLYLCSPHQILFALDAATGQEKWRFDPKLKTDPSFQHVTCRGVSYHDSTASGSNNDSPDQAPATAPAICARRVYLPVNNGHLYALDAQTGQLCPDFANHGDLDLQVGQPVTTAGQYEPTSPPVITGKVIVIAGSVEDNYSTREPSGVIRGFDVNTGKLLWAFDPGAKNPEAVLGAGQHYSVNSPNSWAPAVYDAKLDLVYLPMGVSTPDIWGGYRTPEQERFASGLLALNATTGKLAWFYQTVHHDLWDMDLPAQPTLADITDRSGNLVPAVYAPAKTGNIFVLDRRTGTPIVPAPEKPVPQGAAQGDHVSPTQPFSALTFRPDRKLTGADMWGATMFDQLVCRVMFQRLNYDGTFTPPSVKGTLVFPGNLGMFEWGGIAVDTDRQIAIANPIALPFVSRLMPRGPGNPIEPAAGGTGGSGTESGIQPQYGVPFGVTLNAFMSPLGLPCKQPAWGYISAVDLKTNQIVWKKRIGTVRDSSPLPLPFKMGMPMLGGPMTTAGDVFFIGATADNYIRAFDTNTGKQLWQARLPAGGQATPMTYEAKGKQYVVIAAGGHGSFGTRLGDYVMAYALP

SEQ ID NO: 35548 - DNA, 2430 bp, Burkholderia xenovorans LB400
  CDS (1)..(2430): transl_table=11
atgtccagacaatcggcatcgccgggtttcatcgccgtcatcacactcctgtttactgcgctaaccgccctctatctgctgataggcggtgcatggctgctctcgctcggcgggtccgcgtattacgtcgtggtcgggttcgtgctgctcggcgtgacctggctgctgtaccgccgcagtccggcggcgctcacactctacgcactcgtgctggtcggcacggcggtctgggcgctgtgggagtcgggtcccgacttctgggcgcttgcgccgcgctccggcgtgctcgtcgtgttcggcgtgtggctgctgctgctcgtgagctggcgcctcgatgcgccgcgcaagctcggcgtaacgtcgctagtcggcgcgctcgtgatctgggccggcgtgctggtctacgcgagcttcaatgatccgcagacgatcaacggcacgctgagctcagtggccgccacgcccgccgccaatcccaacggcatcgatccgtccgactggcccgcctatggccgaacccaggaaggcacgcgctacgcgccgctgcagcagatcacgcccgaaaacgtcaagaacctgcaggtggcctggaccttccgcacaggcgatatgaaaggtccaaacgatccggtcgagatcaccaatgaagtcacgccgatcaagatcggcaatctgctctatctgtgctcgccccaccagatcctgttcgcgctcgatgcgaagaccggcgaacagaaatggaagttcgacccgaaactgcggcccgatccgtcgttccagcacgtgacctgccgcggcgtgtcgtatgtcgatctctcggcaagcgctgcgaccgcgcaacccaacgcgcccgccgcacccgcgagcgacaccgcgccggcggcatcggccgcatcggcggccagcggcgcctgcctgcgccgcatctatctgcccgtcaacgacggccacctctacgcgctcgacgcgcagacaggcgagcgctgcgcgggcttcggcaacaacggcgatctcgaccttcagcacgcgcagccggtcacgacgccgggcatgtacgagccgacttcgccgccgatcgtcacgaacacgacgatcatcgtggcgggcgcggtggaagacaacttctcgacgcgcgagccctcgggcgtgatccgcggcttcgacgtgcgcaccggccagctgcagtgggcgttcgatcccggcgcgcaagacccgaacaggattccgggcgcgggcgagcactacaccatcggttcgccgaactcgtgggcgccctccgcctacgacgcgaagctcgacatcatctatctgccgatgggcgtgaccacgcccgacatctggggcggcaaccgcacacccgagcaggagcgctatgcgagcggcctgctggcgctgcatgcgtcgacgggcaagctggcctggttctaccagaccgcgcaccatgacctgtgggacatggaccagccgtcgcagcccacactggcggacatcaccggcaaggacggcaagaccgtgccggtcgtgtatgcgcccgccaagaccggcaacctgttcgtgctcgatcgccgcaccggcaccccggtcgtacccgcgcccgaaatgccggtgccgcaaggcgccgcgcccggcgatcacgtttcgcccacgcaaccgttctccgatctcacattccgcccgaagaacctgctcaccgacgccgacatgtggggcgcgacgatgtacgaccagctcgtatgccgcgtcatgtttcacaagctgcggtatgaaggcacgttcacgccgccgtcgctgcagggcacgctggtgtttccgggcaacctcggcatgttcgagtggggcggcattgccgtcgacaccgaccggcagatcgccattgccaatccgattgcactgccgttcgtctcgcgcctgatcccacgcggcccaggcaacccgatgcaacccgagccgggcgcaaaaggcagcggcaccgaagcgggcatccagccgcaatacggcgtgccgtacggcgtgacgctgaacgcgttcctctcgccgttgggcttgccgtgcaaacagccggcctggggctacatctcggcggtcgatctgaagaccaacgagatcgtgtggaagaagcgcatcggcacggtgcgcgacagttcgccgattccgctgccgttcagaatgggcatgccgatgctcggcggtccgatcgtgacggcgggcggcgtcgtgttcatcggtgcgacggcggacaactacatccgcgcgttcgacgtgaacaacggcaaggaactgtggcgcgcgcgtctgccggcgggcggccaggccacgccgatgagctattccatcgacggccgccagtacatcgtgatcgccgcgggcgggcacggttcgttcggcaccaaactcggcgattacgtgatggcttacgcgttgccgcagtaa

SEQ ID NO: 35549 - protein, 809 aa, Burkholderia xenovorans LB400
MSRQSASPGFIAVITLLFTALTALYLLIGGAWLLSLGGSAYYVVVGFVLLGVTWLLYRRSPAALTLYALVLVGTAVWALWESGPDFWALAPRSGVLVVFGVWLLLLVSWRLDAPRKLGVTSLVGALVIWAGVLVYASFNDPQTINGTLSSVAATPAANPNGIDPSDWPAYGRTQEGTRYAPLQQITPENVKNLQVAWTFRTGDMKGPNDPVEITNEVTPIKIGNLLYLCSPHQILFALDAKTGEQKWKFDPKLRPDPSFQHVTCRGVSYVDLSASAATAQPNAPAAPASDTAPAASAASAASGACLRRIYLPVNDGHLYALDAQTGERCAGFGNNGDLDLQHAQPVTTPGMYEPTSPPIVTNTTIIVAGAVEDNFSTREPSGVIRGFDVRTGQLQWAFDPGAQDPNRIPGAGEHYTIGSPNSWAPSAYDAKLDIIYLPMGVTTPDIWGGNRTPEQERYASGLLALHASTGKLAWFYQTAHHDLWDMDQPSQPTLADITGKDGKTVPVVYAPAKTGNLFVLDRRTGTPVVPAPEMPVPQGAAPGDHVSPTQPFSDLTFRPKNLLTDADMWGATMYDQLVCRVMFHKLRYEGTFTPPSLQGTLVFPGNLGMFEWGGIAVDTDRQIAIANPIALPFVSRLIPRGPGNPMQPEPGAKGSGTEAGIQPQYGVPYGVTLNAFLSPLGLPCKQPAWGYISAVDLKTNEIVWKKRIGTVRDSSPIPLPFRMGMPMLGGPIVTAGGVVFIGATADNYIRAFDVNNGKELWRARLPAGGQATPMSYSIDGRQYIVIAAGGHGSFGTKLGDYVMAYALPQ

SEQ ID NO: 35550 - DNA, 2559 bp, Mesorhizobium sp. BNC1
  CDS (1)..(2559): transl_table=11
gtgtttcgtatcatactatcagtaatcattgctgttcttggccttgtcattgccgccggcggcgtttggctcgctgttcttggcggctcctggttctacatcctgcttgggcttcttctcgttctttccggcgctttgcttttgaggcgcagcgcaagcgggcttcttctgtacggcctgaccattcttctcactcttgcctggagtgtttgggaagtgggcttcgactggtgggctttggttccccgcggtgctctcatcctagtcctgggcgttcttttgctactgccgcccatattgcgggccatgcgcgttccagaaggccgacgggcgagctacgggatgaacagcggcgtgcttgcggcctcgatcttcatcgcagccatcgttggcatctattcgatgtttcaacagccgcacgatatcgatggcgcattccccgagcagcggattgccgtgtccccggcgccgcagcaaggcgatgtgccgcctggcgaatgggcagcctatggccgcacctcctttggccagcgctattcaccactggaccagatcacgcctgaaaacgtgtcgcagttggaagtggcatggagctatcagacgggagagatgcgcgatgaaaacgatcccggcgagacgacatatgaggtgacgccgctgatggtgaacaacaccctctatatctgtacgcccttcagcacggtgatcgcgcttgatcctgttactggccaggaaaagtggcgcttcgacccgcaactgagacagccgccgaccgagacaacgcagcatatgacctgccgcggcgtttcgtatcacgaggcagcgccgggggatcttcctgcgaccagccccacggctcaggctgcaccggaaaccgcgccgacgggccaagccggagcaccggatgaaacggcggagatcgcgacgagcgtggatgagataacgacgcaggcagcacctgtgccgcagaacatcgttaccggacaggcagaacccggcgcacttagctttgttgttacgcgcgaagagccgcctgcgcgcgtgacgctcagccagcagtgcatgaagcggctgttcgtgcccacgtcggatgggcggctgatcacgataagtgccgatacgggggagatctgccccggcttcggcggcgacggcacgatcaatctctgggcgaatatgccgaacgttacgcccggctcctactattccacctcgcctcccctgattgccggccggcttgtcatcatcggcggggccgtaaacgataacgaagcgatcacctcgccctccggcgtaatccgggccttcgatctctacaccggcgcacttgtctggaatttcgacagcaagaatcccgaagcgacgcagccgatcgcgccagacggcgtatattcccagaacgcaccaaattcctggagcgtggcgagctacgaccctaatctcggcctcgcctattttccgatgggcaacgaatcgccggaccagttcggcggaaatcggggtgaaaataccgaacgctactcctcctcggttctggcgctgcgggctgacaccggcgaggtggcatgggtgttccagacagtgcatcacgacatctgggactatgacgtgcccgctcagcctgtcctgatcgacctcacggtcgatggacaggcagtgccagcgctggtgcaggccacaaaacaaggcgacatcttcgtgctcaaccgggcaaccggcgagcccattttccctatcgaggagcggccaacgccgcagggcgcggtggagggcgaccggacagcgcccacccagccgcattcagccatttcgttcggcccggcccccctcagagaagccgatatgtggggcgcgacgccgatcgatcagctctattgccgggttcgtttccaccagcttcgctacgaaggccgatacacgccgccttcactccaaggcacaattgtgtatccgggcaatttcggcacgttcaactggggttctgtggctgtggaccccaaccgcgacatcatgtttgcgatgcccgtctatcttgccttcgaggtgaaacaggttcctcggcagaacgagctttcccgggttgtgacacaggagggcgaggcgatcttcaacgagaatttcggtgcaccttacgcggcgcagatggggccgttttattcgccccttcagcttccctgccaaaggccgccttggggctatatcgcagcggtggacctgaccacgggcgaaaccgtttacaagcaagtaaacggcacagtgcgggatctttcgcccattcccctgccgtttgaaatgggcgtgccgggaattggcgggccgatcgttaccgctggcggtgtagcctttctctcgggcacgctcgactattatgtgcgcggctatgacctgcgtaccggcgaggagctgtggcgtgagcggctgcccgccggcggccaagccacgccttccacctatgtgggcgaggatggccggcaatatctggtcgtggtcgccggcggccacggttccaccggcacaaaggcgggcgattcgattatcgcttatgcactgccgcaatag

SEQ ID NO: 35551 - protein, 852 aa, Mesorhizobium sp. BNC1
MFRIILSVIIAVLGLVIAAGGVWLAVLGGSWFYILLGLLLVLSGALLLRRSASGLLLYGLTILLTLAWSVWEVGFDWWALVPRGALILVLGVLLLLPPILRAMRVPEGRRASYGMNSGVLAASIFIAAIVGIYSMFQQPHDIDGAFPEQRIAVSPAPQQGDVPPGEWAAYGRTSFGQRYSPLDQITPENVSQLEVAWSYQTGEMRDENDPGETTYEVTPLMVNNTLYICTPFSTVIALDPVTGQEKWRFDPQLRQPPTETTQHMTCRGVSYHEAAPGDLPATSPTAQAAPETAPTGQAGAPDETAEIATSVDEITTQAAPVPQNIVTGQAEPGALSFVVTREEPPARVTLSQQCMKRLFVPTSDGRLITISADTGEICPGFGGDGTINLWANMPNVTPGSYYSTSPPLIAGRLVIIGGAVNDNEAITSPSGVIRAFDLYTGALVWNFDSKNPEATQPIAPDGVYSQNAPNSWSVASYDPNLGLAYFPMGNESPDQFGGNRGENTERYSSSVLALRADTGEVAWVFQTVHHDIWDYDVPAQPVLIDLTVDGQAVPALVQATKQGDIFVLNRATGEPIFPIEERPTPQGAVEGDRTAPTQPHSAISFGPAPLREADMWGATPIDQLYCRVRFHQLRYEGRYTPPSLQGTIVYPGNFGTFNWGSVAVDPNRDIMFAMPVYLAFEVKQVPRQNELSRVVTQEGEAIFNENFGAPYAAQMGPFYSPLQLPCQRPPWGYIAAVDLTTGETVYKQVNGTVRDLSPIPLPFEMGVPGIGGPIVTAGGVAFLSGTLDYYVRGYDLRTGEELWRERLPAGGQATPSTYVGEDGRQYLVVVAGGHGSTGTKAGDSIIAYALPQ

SEQ ID NO: 35552 - DNA, 2340 bp, Rhizobium leguminosarum bv. viciae 3841
  CDS (1)..(2340): transl_table=11
atggcgatcatcgtcacctccatcttcttcatcatcgtcggtcttactctcggcggcggtgggctctggcttgtcacgctcggcggcagcgtcttctatctgttcgccgggctgatgttcctgattaccgccgggctgctgttgatgcgcaaggcggtggcgctctgggtctatgcggtgctcgtcgtcgcagcactcgcctgggcgatctgggaggtcggcttcgactggtggcaactcggcccgcgcggcggcatgatcatcctgctcgggctctggctgctgacgccgtggatccgccggccgctcggcctgcgcagcccgacgggcattacctatgccgccaacccgtggccgctcgccgtgcctgtcatcctcgccatcctcgtcgccctttattcgatgacgactgacccgcatgatctcgccggcgaactgccgaaggatacggtcgccgccaatcccgccttcggcggcagcgtaccggatggcgaatggcatcaatacggccgcacgcccttcggccagcgctattcgccgctcgaccagatcaccgccgagaacgtctccaccctcaaggaagcgtggcgataccagaccggcgacgtcaagcggccggacgatgtcggcgagacgacctatcaggtgacgccgctcaaggtgaaggacacgctctatctctgcacgccgcataactgggcgatcgcgctcgacgccaagaccggcaaggagaaatggaaatacgacgccaactccggcatgaaccccgaccggcagcatcagacctgccgcggcgtcacctattatgccgatcctgccgttgccgccggccagccctgcgccgagcgcgtctacctgccgacctccgacgcccggctgatcgcgctcgatgctgcggacgggaaggtctgcaccagctttgccgatcaaggcgtgctgcatttggaaaccggcatgcgctacaacccggccggctattattattccacttcgccgccggtcgcggtggcgggcaagatcatcgtcggtggggcggtcaacgacaattattcgactgaggaacaatccggcgtcatccgcgccttcgacatcaataccggcgccttggtctggaactgggattccggcaatcccgatctgacgacgccgatcaccgagggccagacctacacgaccaactcaccgaacagctggtcagtcttcagcgtcgatgaggcgctcggcatggtctacatcccgctcggcaaccaggtgcccgaccagatcggcatcaaccgcagcgacaatgtcgagaaattttcctcctctatcgtcgcgctcgatatcgccaccggccagttgcgctgggtacgccagacagtgcatcacgatctctgggacatggacgtgccggcccaaccggcgctgatcgatctgacgaagcaggacggcaccgttgttccggccttggtcggcccgaccaagcagggcgatatctatgtgctcgaccggcgcagcggcgagccgatcatcccggtcaaggaaataccagcgccaggcggcgctgtctcgggcgatcatacctcgccgacacagccgatctcggacctcaccttctcgcccgagccgcttcaggaaaaggacatgtggggcgtgtcgctgtttgatcagatggcctgccgcatcgacttccaccgctaccactatgagggccgctatacgccgccttcgctcaaaggcacgatcgtctatcccggcaatttcggcaccttcaactggggctcggtggcggtggatccggagcggcagatcatgttcggcatgccgacctatctcgccttcacctcgcgcctggtaccggccgccgatattccgccgcgaggccaggacgagaagggcagcgaacaggggctcaaccgcaatgacggcgcgccctacggcgtcttcatgggtcccttcctcgggctgcttcaaatcccctgccaggcgccgccatggggctatgtcgccggcgtcgacctgcgcaccggcaagatcgcctatatgcacaagaacggcaccgtgcacgacatgacgccactgcccctgcccttcaaggtcggcgtacccggcatcggcgggccgatgctgaccaagggcggcgttgccttcctgggggccgcggtcgacaactacctgcgcgcctatgacgtgacgagtggccgggagctctggcagggacggcttcccgccggcggccaggcgactccgatgacctacatgactgatgacaacaagcaatatgtcgtcatggtcgccggcggccacggctcggtcggcacgacacccggcgactacgtgatcgcctatacgctgccttga

SEQ ID NO: 35553 - protein, 779 aa, Rhizobium leguminosarum bv. viciae 3841
MAIIVTSIFFIIVGLTLGGGGLWLVTLGGSVFYLFAGLMFLITAGLLLMRKAVALWVYAVLVVAALAWAIWEVGFDWWQLGPRGGMIILLGLWLLTPWIRRPLGLRSPTGITYAANPWPLAVPVILAILVALYSMTTDPHDLAGELPKDTVAANPAFGGSVPDGEWHQYGRTPFGQRYSPLDQITAENVSTLKEAWRYQTGDVKRPDDVGETTYQVTPLKVKDTLYLCTPHNWAIALDAKTGKEKWKYDANSGMNPDRQHQTCRGVTYYADPAVAAGQPCAERVYLPTSDARLIALDAADGKVCTSFADQGVLHLETGMRYNPAGYYYSTSPPVAVAGKIIVGGAVNDNYSTEEQSGVIRAFDINTGALVWNWDSGNPDLTTPITEGQTYTTNSPNSWSVFSVDEALGMVYIPLGNQVPDQIGINRSDNVEKFSSSIVALDIATGQLRWVRQTVHHDLWDMDVPAQPALIDLTKQDGTVVPALVGPTKQGDIYVLDRRSGEPIIPVKEIPAPGGAVSGDHTSPTQPISDLTFSPEPLQEKDMWGVSLFDQMACRIDFHRYHYEGRYTPPSLKGTIVYPGNFGTFNWGSVAVDPERQIMFGMPTYLAFTSRLVPAADIPPRGQDEKGSEQGLNRNDGAPYGVFMGPFLGLLQIPCQAPPWGYVAGVDLRTGKIAYMHKNGTVHDMTPLPLPFKVGVPGIGGPMLTKGGVAFLGAAVDNYLRAYDVTSGRELWQGRLPAGGQATPMTYMTDDNKQYVVMVAGGHGSVGTTPGDYVIAYTLP

SEQ ID NO: 35554 - DNA, 2319 bp, Rhizobium leguminosarum bv. viciae 3841
  CDS (1)..(2319): transl_table=11
atgaaatttctggccaccctgttctgtattgttctcgcccttatcggattggggctgatcggaggcggcgcctggctgctgcgcctcggcggctcaccctattacgcagccgtcgggcttgcctatctggttgccgcgcttttgctgtggcgccggaagacgcgaggcgcactcatcgtcctgcttgtcgccgttttcacccttccctgggctctatgggagtcgggcctcaatttctgggcgctgtttgcccgcttgatgtcccccatcgcgctggcgggctttgcccttctctttgcaccatcgctttccccgaccgccaaccggaagctcttttatggcggcgctttggtgaccgctctcatctttgccacgggtttcggtctcagcttcgtgccgcatgggatcatccagccctccgccgacatcaccgcctataaaaccgccaagggcgacaactctccctccgactggacatcctatggccgcaccacggcaggagatcgttattccccgttcgatcagatcaaccgcggcaatgtgtccaagctcgatctcgcctggacatatcgcaccggaaaaggcgatggcgccgatcagaacacgcctctgcagatcggcgacacggtctacacctgcacgccgacagatgtgatcgcagcgctcgatgcagataccggcaaacctcgctggactttcgatcccaaggcgacggcgccttattggcaacgctgccgcggcctcggttactacaagatgccgatggaggcccagtccgccgacggtctttgcaatgagcgcctggtgcagacgacgatcgatgcccgtctcctggcgatcgacagcaagaccggcgcgccctgcaaggacttcggagacaatggcaccgtgcagctttcccagggcatgggcgaagtcaagacgggctattatttccagacatcggcgccgctgattgcccgcaacctgatcgtcgtcggaggctgggtcacggacaatcaggaggtcggggaaccctctggcgtcatccgtgcgttcaacgtcgtcaccggcgagctcgaatgggcatgggatctcggcaacccggagatcaccaaacttccgccggagggccagacttatacgcgggccacgcccaacatgtggacgacggccgcattcgacgacaagcttggcctcatctatgcaccgctcggcaataccacgccggattattacggcgtcaatcgccctgccttcgccgatcaatataatgcgacattggtggcactcgatgtaacgacgggtcgggagaaatggaaattccagaccgtccatcacgacatctgggactatgatctgccggcccaaccggtcctggtcgacctgcctgacggtaatggcgtcactgtgcctgctctgctgcagaccaccaaacgcgggcagctttttctcctcgaccgccgaaccggcacaccgcttgccgaagttcaggagaagccggtgccgcagcaaggcggcgtgccggaagagaaactctccccgacgcagccctactccgtcggcatgccgacaattggtgcggagcgcgtgacggagcagacggcctggggcctgacgatattcgatcagctggcatgccgcatcgccttccgcaagatgcgctatgacggcgatttcaccccgatcggcacgcaatatgcgatccagcagccgggaaatctgggtggcctcaattggggaagcgtatccgtcgatctgcccaacaacagggtcttcatgaacgatatccgcgtccccagtctcttcgcactcatcccacgcgaggagtatgtcgactttgccctcaccacgaccgcgcatggcccctcagctccgcagcgcggtacgccttacgccatggccaccgagatgtggacatcaaggctccgcgttccctgcacccaaccacccttcggcaccgtcactgcagtggatctgaagacgcgcaagatcgcgtggcaggttccggcaggcacagccgaagaactcgggccgttcaagatcaaaaccaagctgcctatgccgatgggcctgccgagctatgccggcacttccgcgaccgccggcggcgtcgtctttttcgctggcttccaggactattatatccgcgcctatgatgccgagaacggtacagaactctggaaatatcccctgccggtcggttcgagcgcgacgcccatgacctatgtctctccgaaaacaggcaagcaatatgtcctgatatcggttggcggcgcaccctattcgaaggatgtcggcgactacgtccttgccttctctttgaagaaccgagattag

SEQ ID NO: 35555 - protein, 772 aa, Rhizobium leguminosarum bv. viciae 3841
MKFLATLFCIVLALIGLGLIGGGAWLLRLGGSPYYAAVGLAYLVAALLLWRRKTRGALIVLLVAVFTLPWALWESGLNFWALFARLMSPIALAGFALLFAPSLSPTANRKLFYGGALVTALIFATGFGLSFVPHGIIQPSADITAYKTAKGDNSPSDWTSYGRTTAGDRYSPFDQINRGNVSKLDLAWTYRTGKGDGADQNTPLQIGDTVYTCTPTDVIAALDADTGKPRWTFDPKATAPYWQRCRGLGYYKMPMEAQSADGLCNERLVQTTIDARLLAIDSKTGAPCKDFGDNGTVQLSQGMGEVKTGYYFQTSAPLIARNLIVVGGWVTDNQEVGEPSGVIRAFNVVTGELEWAWDLGNPEITKLPPEGQTYTRATPNMWTTAAFDDKLGLIYAPLGNTTPDYYGVNRPAFADQYNATLVALDVTTGREKWKFQTVHHDIWDYDLPAQPVLVDLPDGNGVTVPALLQTTKRGQLFLLDRRTGTPLAEVQEKPVPQQGGVPEEKLSPTQPYSVGMPTIGAERVTEQTAWGLTIFDQLACRIAFRKMRYDGDFTPIGTQYAIQQPGNLGGLNWGSVSVDLPNNRVFMNDIRVPSLFALIPREEYVDFALTTTAHGPSAPQRGTPYAMATEMWTSRLRVPCTQPPFGTVTAVDLKTRKIAWQVPAGTAEELGPFKIKTKLPMPMGLPSYAGTSATAGGVVFFAGFQDYYIRAYDAENGTELWKYPLPVGSSATPMTYVSPKTGKQYVLISVGGAPYSKDVGDYVLAFSLKNRD

SEQ ID NO: 35556 - DNA, 2412 bp, Pseudomonas aeruginosa UCBPP-PA14
  CDS (1)..(2412): transl_table=11
atgagcgaaggtaaccacagtcgatcgcgcctgctgccgagcctgctcggcctgttgatcctgctgtccggcctggcgctgctggccggcggcatcaagctggcgagcctgggcggctcgctgtactacctgctggccggcatcggcctggccctgagcgggctgttgctgctgctgggcaagcgtgcggcgctaggcctgtacgccctggtgctgttcgccagcaccgtctgggcgctgtgggaagtcggcctggactggtggcaactggtgccgcgcctggccctgtggttcgtcttcggcctgctgctctggctgccctggttccgtcgtccgctgctggccgaggggccggcgccgctgggcaccgcggcgctgggcgtggcggtggtcctggccggcgccgccgcggtgggcagccagttcaccaatccggggcagatcgtcggtcgcatcgaccgcgacagcggcatgaccagcaccgccccggcgatgccggacggcgactggcaggcctacggccgcaccgagttcggcgaccgctactcgccgttgaagcagatcaccccggccaacgtcggccagctcgaggaagcctggcgcatccgtaccggcgacctgccgaccgccgacgatccgctcgaactgaccaacgagaacaccccgctgaaggtcaacggcatgctctacgcctgcaccgcgcacagcaaggtgctggccctcgacccggacaccggcgcggaaatctggcgcttcgacccgcagatccagagcccggtaggcttcaagggcttcgcccacatgacttgccgtggcgtctcctactacgacgaagagcagtacgccaggagcgacgtcggcgcgccgccggccgcgctctccgaggccggcaaggcggtcgccgccagttgtccgcggcgcctgttcctgcccaccgccgacgcccgcctgatcgcgatcaacgccgacaacggcaaggtctgcgaggacttcggggtcaagggcgcggtcgacctgacggccggcatcggtccgttcaccccgggcggctactactccacctcgccggcggcggtcacccgcaatctggtgatcatcggcggccacgtcaccgacaacgagtcgaccaacgagccgtccggggtgatccgcgccttcgacgtgcacgacggcaagctggtgtggaactgggacagcggcaacccggacgagaccgagcccctggctcccggcaagttctatacccgcaactcgccgaacatgtggtcgctggccagcgtcgacgagaagctcggccaggtctacctgccgctgggcaaccagatgcccgaccagtggggcggcaaccgcacccccggtgccgagaagttcagcgccggcctggtggctctcgacctgaacaccggcaagctgcgctggaactaccagttcacccaccacgacctgtgggacatggacgtcggcagccagccgaccctgctcgacctgaagaccgccgatggcgtcaagccggcgctgatcgcgccgaccaagcagggcagcctgtacgtgctggaccgccgcgacggcacgccgatcgtgccgatccgcgaagtgccggcgccgcagggcgcggtggagggcgaccataccgcgccgacccaggcgcgttccgacctcaacctgctgcgcccgccgctgaccgagcgcgacatgtggggcagcagcccgttcgaccagatgctctgccgcatccagttccgctcgctgcgctacgagggccagtacaccccgccgtcggagcagggcagcctgatctatccgggcaacgtcggggtgttcaactggggcggggtgtcggtcgacccggtgcgccagatcctcttcaccagccccaactacatggccttcgtctcgcagatggtgccgcgcgacaaggtgcccagcggaagcaagcgcgagggcgagaccagcggcgtgcagccgaacaccggcgcgccctacgcggtgatcatgcatccgttcatgtcgcccatcggcctgccgtgccaggcgccgtcctggggtgacgtggcgggtatcgacctgaccaccgccaaggtcgtctggcagcacaagaacggcaccagccgcgacaacaccccggtgccgatcggcctcaccgtcggcgtaccgagcatgggcggctcgatcaccaccgccggcggcgtggccttcctcagcggcacgctcgaccagtacctgcgcgcctacgacgtgaaggacggcaagcagctctggcaggcgcgcctgccggccggcggccaggccacgccgatgagctacaccggcaaggacggtcgccagtacgtgctgatcgtcgctggcggacacggctccttcggcacccgcatgggcgactacatcatcgcctacgccctgcccaggcaatga

SEQ ID NO: 35557 - protein, 803 aa, Pseudomonas aeruginosa UCBPP-PA14
MSEGNHSRSRLLPSLLGLLILLSGLALLAGGIKLASLGGSLYYLLAGIGLALSGLLLLLGKRAALGLYALVLFASTVWALWEVGLDWWQLVPRLALWFVFGLLLWLPWFRRPLLAEGPAPLGTAALGVAVVLAGAAAVGSQFTNPGQIVGRIDRDSGMTSTAPAMPDGDWQAYGRTEFGDRYSPLKQITPANVGQLEEAWRIRTGDLPTADDPLELTNENTPLKVNGMLYACTAHSKVLALDPDTGAEIWRFDPQIQSPVGFKGFAHMTCRGVSYYDEEQYARSDVGAPPAALSEAGKAVAASCPRRLFLPTADARLIAINADNGKVCEDFGVKGAVDLTAGIGPFTPGGYYSTSPAAVTRNLVIIGGHVTDNESTNEPSGVIRAFDVHDGKLVWNWDSGNPDETEPLAPGKFYTRNSPNMWSLASVDEKLGQVYLPLGNQMPDQWGGNRTPGAEKFSAGLVALDLNTGKLRWNYQFTHHDLWDMDVGSQPTLLDLKTADGVKPALIAPTKQGSLYVLDRRDGTPIVPIREVPAPQGAVEGDHTAPTQARSDLNLLRPPLTERDMWGSSPFDQMLCRIQFRSLRYEGQYTPPSEQGSLIYPGNVGVFNWGGVSVDPVRQILFTSPNYMAFVSQMVPRDKVPSGSKREGETSGVQPNTGAPYAVIMHPFMSPIGLPCQAPSWGDVAGIDLTTAKVVWQHKNGTSRDNTPVPIGLTVGVPSMGGSITTAGGVAFLSGTLDQYLRAYDVKDGKQLWQARLPAGGQATPMSYTGKDGRQYVLIVAGGHGSFGTRMGDYIIAYALPRQ

SEQ ID NO: 35558 - DNA, 2418 bp, Pseudomonas putida GB-1
  CDS (1)..(2418): transl_table=11
atgaaagaaacaccgcgcgcctctggcgccccaaacatcattctgatcggcctgggcgtaatcatcgccctgctcggcctcctcctggctgccggcggcgtcaagctcgccggcctgggcgggtcctggtacttcctgatcggcggcctggccatggccatcgccggtgtactcattgctcgccgcaagctggctggcgcctggctgtatgccgcattcctgatcggcaccgtgatctgggcactgagcgatgtcggcctggtgttctggccgttgttctcgcgcctgttcatgttcggcgcaatcggcatggtggtggcactggtctacccgctgctggcgcgtaccaacggcgccagcgccggtcgcggtgcctacggtatcgccggggtaatggcggtggtgttggtgatcgctgccggcaacatgttcgttgcccacccaagcgtcgcccccaccggcaaaggcccaggcatgaccccggtcgaagccggcaaggaacagaaagactgggcccactacggcaacaccgaaggtggcagccgcttcgccgcgctggaccaaatcaaccgggacaacgtcaacaagctgaaagtggcctggacctaccacaccggtgacgtcgccatcagtgacggcaacggtgccgaagaccagctgacaccgctgcagatcggcaacaaggtgttcatctgcaccccgcacaacaacctgatcgccctcgatgccgacaccggcaaagagctgtggaaaaacgcaatcaacgcccagtccaaggtctggcagcgttgccgtggcatggcctacttcgacgccactgccgccatcgctcagccgacccagccgaacagctcgccgattaccggcggtagcgtagcggcgggtgccaactgccagcgtcgcctgctgaccaacaccatcgatggccgcctgattgccgtcgacgccgacaccggcgagttctgccagggctttggcaacaatggccaggtcaacctgatggccggcctgggcaatgtcccggactcctactaccagctctcctcggcaccgctgatggccggtaccaccgtggtggttggcggccgcgttgccgacaacgtccagaccgacatgccaggtggcgtgatccgtggcttcgacgtgatcaccggtgaaatgcgctgggccttcgacccgggcaacccggaagatcgccaggcaccgcaaggcgacagcacctatgtgcgcagcacgccgaacagctgggcaccgatgtcctacgacccggcgatgaacaccgtgttcctgccgatgggctcgtcgtccaccgacatctacggtgttgagcgcaacaagctggaccacacctacggcgcttcggtgctggccctggacgccactaccggcaaccagaagtgggtataccagaccgtgcacaacgacctctgggacttcgacctgccgatgcagccaagcctgatcgacttcaccaaggatgacggccagtcggtacctgcggtagtgatcggcaccaaggccgggcagatctacgtgctcgaccgcgccaccggtaagccgttgacccaggtcgacgaagtacccgtcaagccaagcaacatcccgaacgagccatactccccaacccagcccaaatcggtaggcatgccgcagatcggcgcacagaccctgaccgagtcggacatgtggggtgccaccccgtatgaccagctgctgtgccgcatcgacttcaagaaaatgcgctacgacggcctgtacaccgcgccgggcaccgacctgtcgctgagcttcccaggttcgctgggtggcatgaactggggcagcatttccaccgacccggtgcatggtttcatcttcgtcaacgacatgcgtctgggcctgtggatccagatgatcccgtcgcagaacaaaggtggcgcggcctctggcggtgaggcactgaacaccggcatgggcgcggtaccactcaagggcacgccgtatgccgtgaacaagaaccgcttcctgtcggtagcgggcattccatgccaggcgccgccgttcggcaccctgaccgccatcgacatgaaaacccgccaggtggcctggcaggtacccgtgggcaccgttgaagacactggcccgctcggcatccgcatgcacctgccgatcaagatcggcctgccaaccctgggcggcaccctgtcgacccaaggcggcctggtgttcattgccggcacccaggacttctacctgcgcgcctatgacagcagcaacggtaacgaaatctggaaagctcgcctgccagtgggcagccagggcggcccgatgacctacgtttcgccgaagaccggcaagcagtacgtggtgatcactgctggcggcgcccgccagtcgactgaccgtggcgactacgtgatttcttacgcgctgccgtaa

SEQ ID NO: 35559 - protein, 805 aa, Pseudomonas putida GB-1
MKETPRASGAPNIILIGLGVIIALLGLLLAAGGVKLAGLGGSWYFLIGGLAMAIAGVLIARRKLAGAWLYAAFLIGTVIWALSDVGLVFWPLFSRLFMFGAIGMVVALVYPLLARTNGASAGRGAYGIAGVMAVVLVIAAGNMFVAHPSVAPTGKGPGMTPVEAGKEQKDWAHYGNTEGGSRFAALDQINRDNVNKLKVAWTYHTGDVAISDGNGAEDQLTPLQIGNKVFICTPHNNLIALDADTGKELWKNAINAQSKVWQRCRGMAYFDATAAIAQPTQPNSSPITGGSVAAGANCQRRLLTNTIDGRLIAVDADTGEFCQGFGNNGQVNLMAGLGNVPDSYYQLSSAPLMAGTTVVVGGRVADNVQTDMPGGVIRGFDVITGEMRWAFDPGNPEDRQAPQGDSTYVRSTPNSWAPMSYDPAMNTVFLPMGSSSTDIYGVERNKLDHTYGASVLALDATTGNQKWVYQTVHNDLWDFDLPMQPSLIDFTKDDGQSVPAVVIGTKAGQIYVLDRATGKPLTQVDEVPVKPSNIPNEPYSPTQPKSVGMPQIGAQTLTESDMWGATPYDQLLCRIDFKKMRYDGLYTAPGTDLSLSFPGSLGGMNWGSISTDPVHGFIFVNDMRLGLWIQMIPSQNKGGAASGGEALNTGMGAVPLKGTPYAVNKNRFLSVAGIPCQAPPFGTLTAIDMKTRQVAWQVPVGTVEDTGPLGIRMHLPIKIGLPTLGGTLSTQGGLVFIAGTQDFYLRAYDSSNGNEIWKARLPVGSQGGPMTYVSPKTGKQYVVITAGGARQSTDRGDYVISYALP

SEQ ID NO: 35560 - DNA, 2412 bp, Pseudomonas putida GB-1
  CDS (1)..(2412): transl_table=11
atgagcactgaaggtgccaaccaaggaagccgctggctaccgcgcctgattggcgcgctgctgttgctgatgggcctggccctgctggctggcggtatcaagctgagccagctgggcggatcgctgtactacctgatcgccggtatcggttttgccctctcgggcatcctgctgctggcccagcgccgcatcgccctgggcctgtatggcctggtgctgttgggcagcaccgtgtgggccctgctcgaggtaggcctggactggtggcaactggtaccgcgcctggctatctggttcgccatcggcgtggtgctgctgctgccgtgggcacgtcgcccgctgatcggcccagccagcaaagccaatacagcactgctcagcgtggcagtggtcgcttcgggcgcttgcgcgctgggcagccagttcacccaccccggtgaagtgttcggcgaactgggccgcgaaagcagcgaaatggccagcgccgccccggcgatgcccgacggcgaatggcaggcctatggccgcaccgaacatggcgaccgctactcgccactgcgccagatcaccccgcagaacgcctaccgcctggaagaagcctggcgtattcgcaccggcgacctgccgaccgaaaacgacccggtggagctgaccaaccagaacaccccgctgaaggtcaacggcatgctctacgcctgcaccgcgcacagccgcctgctggccctggacccggacaccggcgcggaaatctggcgctacgacccacaggtcaagagcccgaccggcacgttcaagggctttgcccacatgacctgccgtggtgtttcgtactatgacgaaaaccgctacgtcagtcgcgacggcagcccagcgccgaaaattaccgaggccggccaagccgtggcccaggcctgcccgcgccgcctgtacctgcctaccgcagatgcccgcctgatcgccatcaacgccgacaacggcaaggtctgcgaaggcttcgccaaccagggtgtgatcgatctcaccaccggcatcgggccgttcactgccggcggctattactccacctcgcctgccgcggtcacccgtgacctggtgatcatcggtggccacgtcaccgacaacgagtcgaccaacgagccgtccggggtgatccgcgcctacgacgtgcacgatggccacctggtgtggaactgggacagcaacaacccggacgacaccaagccattggctgccggcaaaatgtacagccgcaactcggccaacatgtggtcaatcgccagcgtcgacgaagaccttggcatgatctacctgccgctgggcaaccagaccccggaccagtggggcgccaaccgcactccaggtgccgagaagtacagcgccggcgtagtcgcccttgacctgaccaccggcaaggcgcgctggaactaccagttcacccatcacgacctgtgggacatggacgtcggcagccagccgaccctggtgcacctgaagaccgacgatggcgtgaaaccggcgatcatcgtaccgaccaagcaaggcagcctgtacgtgctcgaccgccgcgacggtacgccgatcgtgccgatccgcgaaatccctaccccacagggtgcggtgaaaggcgaccacacctcgccgactcaagcccgctccgacctcaacctgctcggcccagagctgaccgaacaggccatgtggggcgctacgccgttcgaccagatgctgtgccgcatccagttccgcgaactgcgctacgaaggccagtacaccccgccatccgaacagggttcgctgatttatccgggcaacgtgggtgtattcaactggggcagcgtgtcggtcgacccggtgcgccagttgctgttcacctcgcccaactacatggcattcgtgtcgaagatggtcccccgcgagcaggtagccgaaggcagcaagcgcgaaagcgagaccagcggcgtgcagcccaataccggcgcgccgtacgcggtgaccatgcacccgttcatgtcgccgctgggcgtaccgtgccaggccccggcctggggctatgtcgccgccatcgacctgttcaccaacaaggtggtgtggaagcacaagaacggcaccacccgcgacagcaccccggtaccgatcggcctgccggttggcgtgccgagcatgggcggttcgatcgtcactgccggtggcgtcggcttcctcagcggcaccctcgaccagtacctgcgtgcctatgacgtgaacaacggcaaggaactgtggagtgcccgcctgccagcgggtggccaggccactccgatgagctacaccggcaaggatggcaagcagtatgtgctggtgaccgccggcggccatggctcgctgggtaccaaaatgggcgattacatcatcgcttacaaactcgctgagtaa

SEQ ID NO: 35561 - protein, 803 aa, Pseudomonas putida GB-1
MSTEGANQGSRWLPRLIGALLLLMGLALLAGGIKLSQLGGSLYYLIAGIGFALSGILLLAQRRIALGLYGLVLLGSTVWALLEVGLDWWQLVPRLAIWFAIGVVLLLPWARRPLIGPASKANTALLSVAVVASGACALGSQFTHPGEVFGELGRESSEMASAAPAMPDGEWQAYGRTEHGDRYSPLRQITPQNAYRLEEAWRIRTGDLPTENDPVELTNQNTPLKVNGMLYACTAHSRLLALDPDTGAEIWRYDPQVKSPTGTFKGFAHMTCRGVSYYDENRYVSRDGSPAPKITEAGQAVAQACPRRLYLPTADARLIAINADNGKVCEGFANQGVIDLTTGIGPFTAGGYYSTSPAAVTRDLVIIGGHVTDNESTNEPSGVIRAYDVHDGHLVWNWDSNNPDDTKPLAAGKMYSRNSANMWSIASVDEDLGMIYLPLGNQTPDQWGANRTPGAEKYSAGVVALDLTTGKARWNYQFTHHDLWDMDVGSQPTLVHLKTDDGVKPAIIVPTKQGSLYVLDRRDGTPIVPIREIPTPQGAVKGDHTSPTQARSDLNLLGPELTEQAMWGATPFDQMLCRIQFRELRYEGQYTPPSEQGSLIYPGNVGVFNWGSVSVDPVRQLLFTSPNYMAFVSKMVPREQVAEGSKRESETSGVQPNTGAPYAVTMHPFMSPLGVPCQAPAWGYVAAIDLFTNKVVWKHKNGTTRDSTPVPIGLPVGVPSMGGSIVTAGGVGFLSGTLDQYLRAYDVNNGKELWSARLPAGGQATPMSYTGKDGKQYVLVTAGGHGSLGTKMGDYIIAYKLAE

SEQ ID NO: 35562 - DNA, 2340 bp, Marinobacter sp. ELB17
  CDS (1)..(2340): transl_table=11
atgatcctgctcgcgatattacttgttgtgttcggccttcccatgttggtagggggcgtctggcttattgccctcgggggaagctggtactacgctctggccgggacgacactgatagtgattgccttgctgataaagccccaacgcaccttcgcacagaccctttacgcattactgctggcagccaccgccgtttgggcctattgggaagcagggttcgactggtggcccttagcgtcgaggctgggggttttgctgctgctggccattccgctgctgtttcccggaccggcgggccgtcgacatggcgctatcacgctcgccattgtctggattggagtgggcctgttcaccgttgccagcattccttacgacgcccaccgcatcgagggagagctgaccacagatgctgtgatcccgaatccccggctcggggacgtaccgcagggcgactggctcagttatgggcgtagcaacctcggccagcgctattccccgctggaccagattacaccagaaaatgtccgtgggctggagctggcctggcaataccagaccggcgaccttaagggcccggacgatgtcggcgaaaccacctacgaagccacacctctgaaagtggacaatacgctatatctgtgtactccccataactggctggtggcactggatgcggataccggaaaagaacgctggatctacaacgcccgggtgccttccgagagccagcgccaacaccaaacctgtcgtggcgtgtcctacctccctccaggcacgggcctaggtgatattccggaggtaaaaacccttcagtcaccttccgaaaatcaggccagcagggaatgcgacgcccagcttttcctgccaacctctgatgcccggctgttggctctggacccggttaccggagcccgctgcagcaattttgctgacgacggatcgctgaatctgatgcacaacatgccccacaagcaagatggtttttattactccacctccccgccagtggttgccaacggcgtggtagtcgtcgccggggcggtcaatgacaactacgccatcaactcaccgtctggcgttatccgtgcctacgacgtcaagaccggtgagctggtctggaactgggaccctgcaaacccggaccagacgcaacctattggcgagaacgacacctactccaccagttcacccaacagctgggccgtggccagcgcggacgaggagctcggcctggtctatttccccatgggtaaccgcacgccggaccaattgggtatgtaccgcaccccggaggaagaaatctactcatcttcggtggtcgctctcaagctggataccggacaggtagcctgggtgcagcagtttgttcatcacgacctctgggacatggatactccggctcagcccagcctggtggatattgagactgagcagggcctgcaacctggactggtggtacccaccaaacaaggagatgtgtacgtactcaatcgggaaaccggcgagccactgattcccattacggaacagtcagccccccagggcactattgagggagactatgccgccgcgacccagccagtatctgccctgagctttcggcctccaaccctaaaagcctccgatatgtggggcgccagcgccgttgaccagatgatctgccgtataaggtttcagtctctgcgttacgaaggcatatataccccgccttcggtccagggcacccttgtctacccgggcaatttcggcgtgttcaactggggcggcattgctgttgatccggagcgccaggtaatgtttggcatgccactgtatatggcgttcattcagaggctggtgcccaaagacaataacacccccatgggccctaccaaccagggtgaacagggattgaacgaaaatgcgggggcggaatacgccgtcgaaatgaagcccctgatgtcgcccctgggtattccctgccaacgtccaccctggggctatgtggcgggcgcggacttgcgtaccggtgaaatcgtgtggaagcacaaaaatggcaccgttgaagatatggcacccattccgatacctctggagctgggtgtaccaggcatcggcggccccatcatcacccgcggtggagtggtattccttgcagccaccgtggataactaccttcgtgcctacaacctgacgaatggtgaagaactgtggcgggcacgtctgccggcaggtggtcaggccacccccatgacctatctgaacagccagggtgagcagatggtggtgcaggttgccggtgggcacggctctgttgggaccactattggggactatgtactggcttacaaactgaaataa

SEQ ID NO: 35563 - protein, 779 aa, Marinobacter sp. ELB17
MILLAILLVVFGLPMLVGGVWLIALGGSWYYALAGTTLIVIALLIKPQRTFAQTLYALLLAATAVWAYWEAGFDWWPLASRLGVLLLLAIPLLFPGPAGRRHGAITLAIVWIGVGLFTVASIPYDAHRIEGELTTDAVIPNPRLGDVPQGDWLSYGRSNLGQRYSPLDQITPENVRGLELAWQYQTGDLKGPDDVGETTYEATPLKVDNTLYLCTPHNWLVALDADTGKERWIYNARVPSESQRQHQTCRGVSYLPPGTGLGDIPEVKTLQSPSENQASRECDAQLFLPTSDARLLALDPVTGARCSNFADDGSLNLMHNMPHKQDGFYYSTSPPVVANGVVVVAGAVNDNYAINSPSGVIRAYDVKTGELVWNWDPANPDQTQPIGENDTYSTSSPNSWAVASADEELGLVYFPMGNRTPDQLGMYRTPEEEIYSSSVVALKLDTGQVAWVQQFVHHDLWDMDTPAQPSLVDIETEQGLQPGLVVPTKQGDVYVLNRETGEPLIPITEQSAPQGTIEGDYAAATQPVSALSFRPPTLKASDMWGASAVDQMICRIRFQSLRYEGIYTPPSVQGTLVYPGNFGVFNWGGIAVDPERQVMFGMPLYMAFIQRLVPKDNNTPMGPTNQGEQGLNENAGAEYAVEMKPLMSPLGIPCQRPPWGYVAGADLRTGEIVWKHKNGTVEDMAPIPIPLELGVPGIGGPIITRGGVVFLAATVDNYLRAYNLTNGEELWRARLPAGGQATPMTYLNSQGEQMVVQVAGGHGSVGTTIGDYVLAYKLK

SEQ ID NO: 35564 - DNA, 2361 bp, Pantoea citrea
  CDS (1)..(2361): transl_table=11
atgtctcgggtctctactatacttcatgggttaacacggatattttcgctattctgtgccgcatggctgctgattggcggcgtgtggctattatctgtcggagggagtgcttactaccttatctgcggtatagccatggcgatattttctatattgttatggaagcgcagaagcagtgcattttacctctattcgcttatcctgattctgtcagccctctgggcatggcgggaggcggggactgacttctggaacctggttccacgtctggatatctggatactgtttggtatctggttgatattgccgttcagttaccggcgttttaacactgccggtaaaaaaccattgctggcaatggtgattggcctcgggattaatgccctgctgctgctgggcgcgtcactgcacgacccacaggaaatcaacggtgtgcttaatgtcagtgataagccgccagccgaatctgcggcgtctgcagcagactggccggcctatggacgtactcaggaaggggtccgttattctccgctgacacaaatcaacgataaaaacgttcaacaattacaggttgcctggcagttccataccggtgaccataaaacagcgaatgacccgggtgagatcactaatgaagtgacaccgctgaaagtcggtaatatgctgtacctctgtacaccgcatcagatactgattgccctggatgctgccagtggcagagagaaatggcgttttgatccgcagctcaaatctgatccgacattccagcatattacctgccggggtgtttcctatcatgaaatcaaatctgttcagggcgactcatcagcgccggccgcctgttcacggcgtattttcctgccggttgatgacggtcgtctgttcgcggttgatgccttaaccggacaacgttgcagtaattttgctaataatggtgaactgaacctgcaacacctgcagccgaacgcttatccgggagggtatgagccaacctcaccgcccatcattactgataaagtggtgatcattgccggttctgtcactgataacttgtctacccgtgaaccatcaggggtcatccgcggtttcgatatcgacagcgggaaactcttatgggtatttgatccgggagcaaaagaccctaatgccgtgcctgctgacgggcagacatttgtggcgaactcaccaaactcctgggcgccggcggcttatgacgcgcagagggatattatttatctgcctatgggggtttcgaccccggatatctggggcggtgccgtaacgcgttgcaggaacgttttgccagcggtttactggctctgcatgcctcaactggcaagctggcatggttttaccagacggtacaccatgcaatcattctgggacatggatttaccctcacagccaaccctggcagatattaccgatgagcagggtaagaccgtgccggtggtctatgtgccggccaaaacgggtaatatttttgttctgaaccgtgacaccggaaaacccgtcgttcctgcccctgaaacaccggtaccgcagggaccggcgaaaggcgaccatctgtctccaacccagcctttttctgagctgactttccgtcctaagaataagctgcagggtagggatatgtggggcgcaaccatgtttgaccagctgatgtgccgggtgatgttccataaactgcgctatgaagggccgtttaccccgccgtctgagcagggtaccctggttttcccaggtgatttcgggatgtttgaatggggcggtatctctgttaacaccgatcagcagtttgcgattgctaatccgatggcgatgccttttatttctaaactgatcccacgcggaccaggcaatcccatagaacccggggctgatggtgccgccggttccggttcagagtccggggtacagcatatgtatggtgtgccttacggagttgaactgaatccgttcctgtcaccgttgggcttaccttgtctgcaaccttcatggggctttgtctcagcgatcaatttacgtaatcaccagatcatctggaaaaaacggattggtactgttcgtgacagtgcgccggtacctctaccctttaaaatgggtgttccaatgttgggcggtccggtgacaacggcaggtaatatcttctttgttgctggcacactggacaactacctgcgggcgtacagtgtccgtgacggcaaactgctgtggcaggctcgtctgccggcaggtggacaagcgacaccaatgacgtatgaggttgatggtaagcaatatgtcgtgattatggccggcggacatggttcttttgggacccggctgggcgattcactgatcgcttataaactaccgtaa

SEQ ID NO: 35565 - protein, 786 aa, Pantoea citrea
MSRVSTILHGLTRIFSLFCAAWLLIGGVWLLSVGGSAYYLICGIAMAIFSILLWKRRSSAFYLYSLILILSALWAWREAGTDFWNLVPRLDIWILFGIWLILPFSYRRFNTAGKKPLLAMVIGLGINALLLLGASLHDPQEINGVLNVSDKPPAESAASAADWPAYGRTQEGVRYSPLTQINDKNVQQLQVAWQFHTGDHKTANDPGEITNEVTPLKVGNMLYLCTPHQILIALDAASGREKWRFDPQLKSDPTFQHITCRGVSYHEIKSVQGDSSAPAACSRRIFLPVDDGRLFAVDALTGQRCSNFANNGELNLQHLQPNAYPGGYEPTSPPIITDKVVIIAGSVTDNLSTREPSGVIRGFDIDSGKLLWVFDPGAKDPNAVPADGQTFVANSPNSWAPAAYDAQRDIIYLPMGVSTPDIWGGAVTRCRNVLPAVYWLCMPQLASWHGFTRRYTMQSFWDMDLPSQPTLADITDEQGKTVPVVYVPAKTGNIFVLNRDTGKPVVPAPETPVPQGPAKGDHLSPTQPFSELTFRPKNKLQGRDMWGATMFDQLMCRVMFHKLRYEGPFTPPSEQGTLVFPGDFGMFEWGGISVNTDQQFAIANPMAMPFISKLIPRGPGNPIEPGADGAAGSGSESGVQHMYGVPYGVELNPFLSPLGLPCLQPSWGFVSAINLRNHQIIWKKRIGTVRDSAPVPLPFKMGVPMLGGPVTTAGNIFFVAGTLDNYLRAYSVRDGKLLWQARLPAGGQATPMTYEVDGKQYVVIMAGGHGSFGTRLGDSLIAYKLP

SEQ ID NO: 35566 - DNA, 2391 bp, Enterobacter asburiae
  CDS (1)..(2391): transl_table=11
atggcaattaacaatacaggctcgcgacgattactcgtcacgctaacagccctttttgcagcgctttgcgggctgtatctactcattggcggaggctggctggtcgcgattggcggctcctggtactaccctatcgctggccttgtgatgctcggcgtcgcctggatgctgtggcgcagtaaacgcgccgcgctttggctatacgcagccctgctgctcggcaccatgatttggggcgtctgggaagttggtttcgacttctgggcgctgactccgcgcagcgacattctggtcttcttcggcatctggctgatcctgccgtttgtctggcgtcgcctggtcattcctgccagcggcgcagttgccgcactggtggtcgcactgctgattagcggtggtatcctgacctgggccggatttaacgatccgcaggagatcaacggcaccttaagcgccgatgccacacctgctgaagctatctcccccgtagccgatcaggactggcctgcctatggtcgtaatcaggaaggtcaacgcttttcgccgctgaaacaaattaacgccgataacgtccataatctgaaagaagcctgggtgttccgtactggcgatgtgaagcagccgaacgatccgggtgaaatcaccaatgaagtgacgccgattaaagtgggcgacaccctttacctgtgtaccgctcaccagcgcctgtttgcgcttgatgccgccagcggcaaagagaaatggcattacgatcctgagctgaaaaccaacgagtctttccagcacgtaacctgccgtggtgtctcttatcatgaagccaaagcagaaaccgcttcgccggaagtgatggcggattgcccgcgtcgtatcattcttccggtcaatgatggtcgactgattgcgattaacgctgaaaacggcaaactgtgcgaaaccttcgccaataaaggcgtgctcaatctgcaaagcaatatgccagacaccaaaccgggtctgtatgaaccgacttcgccaccgattatcaccgataaaaccatcgtgatggccggttcagttaccgataacttctcaacccgcgaaacgtctggcgtgatccgtggttttgatgtcaacaccggggagctgctgtgggccttcgacccgggcgcgaaagatcctaacgcgatcccatcggatgaacacacctttacctttaactcaccgaactcctgggcaccggcagcgtatgacgcgaagctggacctggtctacctgccgatgggcgtgaccacgccggatatctggggcggtaaccgtacgccggagcaggaacgttacgccagctccatcgtggcgctgaacgcaacgaccggtaaactggcatggagctaccagaccgttcaccacgatctgtgggatatggatatgccgtcccagccgacgctggcggacattaccgttaacggtaaaaccgtaccggtgatttacgccccggcgaaaaccggtaacatcttcgtgcttgatcgtagcaacggtaagctggttgttcctgcgccggaaaaaccggttccgcagggtgcggccaaaggcgactacgtcaccaaaacgcagccgttctctgacctgagcttccgtccgaagaaagatctcagcggtgcagacatgtggggtgccaccatgtttgaccagctggtatgccgcgtgatgttccaccagctgcgctacgaagggattttcacccccccgtcagagcagggtacgctggtcttcccgggtgacctggggatgttcgaatggggtgggatctccgttgaccctaaccgtcaggtcgccatcgctaacccaatggcgctgccgttcgtttcccgcctgatccctcgtggtccgggtaacccaatggagcagccgaaagatgcgaaaggcagcggtaccgaagccggtatccagccgcagtatggcgttccttatggtgtgaccctgaatccgttcctttctccgttcggtctgccgtgtaaacagcctgcctggggttacatctccggtctggatctgaagaccaacaagatcgtctggaagaaacgtattggtacgccacaggacagcatgccgttcccgatgcctgttccagtgcctttcaatatgggtatgccaatgctgggtggcccaatctccaccgccggtaacgtgctgttcatcgcggcaaccgcagataactacctgcgcgcgtacaacatgaccaacggtgagaaactgtggcaaggccgtctgccagccggtggacaggcaacgccgatgacctatgaagtgaatggcaagcagtacgttgtcatctctgcgggtggtcacggttcgtttggcacgaagatgggcgactatattgtggcttatgcgctgccggatgatgtgaagtaa

SEQ ID NO: 35567 - protein, 796 aa, Enterobacter asburiae
MAINNTGSRRLLVTLTALFAALCGLYLLIGGGWLVAIGGSWYYPIAGLVMLGVAWMLWRSKRAALWLYAALLLGTMIWGVWEVGFDFWALTPRSDILVFFGIWLILPFVWRRLVIPASGAVAALVVALLISGGILTWAGFNDPQEINGTLSADATPAEAISPVADQDWPAYGRNQEGQRFSPLKQINADNVHNLKEAWVFRTGDVKQPNDPGEITNEVTPIKVGDTLYLCTAHQRLFALDAASGKEKWHYDPELKTNESFQHVTCRGVSYHEAKAETASPEVMADCPRRIILPVNDGRLIAINAENGKLCETFANKGVLNLQSNMPDTKPGLYEPTSPPIITDKTIVMAGSVTDNFSTRETSGVIRGFDVNTGELLWAFDPGAKDPNAIPSDEHTFTFNSPNSWAPAAYDAKLDLVYLPMGVTTPDIWGGNRTPEQERYASSIVALNATTGKLAWSYQTVHHDLWDMDMPSQPTLADITVNGKTVPVIYAPAKTGNIFVLDRSNGKLVVPAPEKPVPQGAAKGDYVTKTQPFSDLSFRPKKDLSGADMWGATMFDQLVCRVMFHQLRYEGIFTPPSEQGTLVFPGDLGMFEWGGISVDPNRQVAIANPMALPFVSRLIPRGPGNPMEQPKDAKGSGTEAGIQPQYGVPYGVTLNPFLSPFGLPCKQPAWGYISGLDLKTNKIVWKKRIGTPQDSMPFPMPVPVPFNMGMPMLGGPISTAGNVLFIAATADNYLRAYNMTNGEKLWQGRLPAGGQATPMTYEVNGKQYVVISAGGHGSFGTKMGDYIVAYALPDDVK

SEQ ID NO: 35568 - DNA, 2767 bp, Pantoea citrea
  CDS (263)..(2635): transl_table=11
ctctaaaaattggttttctacaatatgggtatatccatagttaaagtaatattctgaattttgccgcgaatctatggatttttttcataaaattttgcgaacaaatgaacacatttgttggtaccgtgtcatgatttctatgaacaaatgttattgtcaatggatatggatcacaaaaaacgatattaaatacaactaaaaaggactaaccttatgcggctctttacatatctataaagttgttgattctaaggttaattcaatgtcacaggaatccagaggcctgcgcctcatcacactagcaatatcagtgttctgcaccttgtggctgataatcggcggtggctggttactggcaattggcggcagcgcatactatctcatcagcggcatcgttatggcggtgttcactgtaatgttgttaaagaaaagaagctgtgctttttatctttactcactcattctgctgggcacagctatctgggcctggtgcgaatccggccttgatttctgggctctggctccgcgtctcgatatctgggtactgtttggtatctggatgattttgccgtttgtttatcgccaactggcggctcccaaccgtaaagctactgcgctgatggtgattgctatcgtcatcaacctggccatggtcgttggcgcctttttcggcaaagacccgcaggcagtctacggtgacctgaatgttcaggctcctgcaactcagccagtgtctgccggtaaagactggaccgcttatggtggtactcaggccggtgaccgttactcttcattaagtcagattaacgaaagcaatgtcaaaaatctgcaggtggcatggacctaccagtctggtgacgtaaaacgccctgatgatccgggtgagatcactaacgaatcaactccactgaaagtaggtaatctcctttatacctgtacagcgcaccagattctggtcgcgattgatgctgcaacaggtaaagaaaaatggcgttttgaccctaaaatcaaatatgaccctaccttccagcacatgacctgtcgtggtgtttcctatcatgactttaatacggcaacagatcctcagagtgctccggtttctccggcggcctgttcacgtcgtatctatctgccggttaacgatggtcgtctgattgcggtggatgctgaaaatggtcaactgtgtaaagactttggtaataatggtgagctggatctgcagcatcagcagccgaatgctttcccgggcggctatgaaccaacatcacctccggtaattaccgataaagtaattgtgattgccggggccgttaccgataactactcaacccgtgagccgtcaggtgttatccgtggttttgacgtgaaaaccggtaaactgctgtgggcattcgatccgggtgccaaagatccgaacgcaattcctgcggacggtcagcactgttcagcgaactcaccaaactcctgggcaccagctgcttacgatccgaaactggatttggtatatctgccgatgggtgtgaccacgccggatatctggggtggaaaccgtactcctgagcaggaacattatgcgagtggtatcctggcactgaatgccaccacaggtaaagaagcctggttctaccagactgtccaccacgatctgtgggacatggatattccggcgcagccttcactggcagatattaccgataaagacggcaacaaagttcctgtcatctacgttccgaccaaagtaggtaacatctttgttctgaaccgtgcaaccggtcagctggtggtaccggctcctgagcgtgcggtaccgcaaggtgctgctaaaggcgaccatacctctgcgactcagccgttccctgaactgaccttccgtccggaagcgaaactgaccgacagtaagatgtggggcggtacgatgtttgaccagatgatctgtcgtatcatgttcaaacgtctgcattataacgggactttcactccaccttcagagcagggcaccctggtattcccgggtaacctgggtatgtttgaatggggtggtatttcggtcaacagtggtagcgagtttgccattgctaacccaatgcaactgccgtttgtttcaaaactgatcccacgtggtccaaacaacccaatggaaccgggtaaaaacggtgccggtggttccggtggtgaagccggtctgcaacacatgtatggcgtgccttttggtgtggaactgaatccgttcctgtcaccattcggtctgccatgcatggaaccttcatggggctttgtttcagccgttaacctgaaaactaaccagattgtgtggaaaaaacgtattggtactatccgtgacagcggtggcccgattccgttaccaccgattactgtaggtactccgatgctgggtgctcctatcactacagccggtaatatcttctttatcgccgctactctggatgactacatccgtgcctatagtgtgcgtgacggtaaactgctgtggcaggcacgtctgccggcgggtggtcaggcaacaccaatgacctatgaagtagacggtaagcagtatctggtaattgttgccggcggacacggttcgttcggtacgaaaatgggcgattacattattgcttataaattgccttaacaggggcggttccggaagcggtatccagcttccgggttaaccccctggtaatatcaatccccgccggtagccagctaccggcggggttttttttatgttccgagtggggtattcgcttcgggcggggcggaa

SEQ ID NO: 35569 - protein, 790 aa, Pantoea citrea
MSQESRGLRLITLAISVFCTLWLIIGGGWLLAIGGSAYYLISGIVMAVFTVMLLKKRSCAFYLYSLILLGTAIWAWCESGLDFWALAPRLDIWVLFGIWMILPFVYRQLAAPNRKATALMVIAIVINLAMVVGAFFGKDPQAVYGDLNVQAPATQPVSAGKDWTAYGGTQAGDRYSSLSQINESNVKNLQVAWTYQSGDVKRPDDPGEITNESTPLKVGNLLYTCTAHQILVAIDAATGKEKWRFDPKIKYDPTFQHMTCRGVSYHDFNTATDPQSAPVSPAACSRRIYLPVNDGRLIAVDAENGQLCKDFGNNGELDLQHQQPNAFPGGYEPTSPPVITDKVIVIAGAVTDNYSTREPSGVIRGFDVKTGKLLWAFDPGAKDPNAIPADGQHCSANSPNSWAPAAYDPKLDLVYLPMGVTTPDIWGGNRTPEQEHYASGILALNATTGKEAWFYQTVHHDLWDMDIPAQPSLADITDKDGNKVPVIYVPTKVGNIFVLNRATGQLVVPAPERAVPQGAAKGDHTSATQPFPELTFRPEAKLTDSKMWGGTMFDQMICRIMFKRLHYNGTFTPPSEQGTLVFPGNLGMFEWGGISVNSGSEFAIANPMQLPFVSKLIPRGPNNPMEPGKNGAGGSGGEAGLQHMYGVPFGVELNPFLSPFGLPCMEPSWGFVSAVNLKTNQIVWKKRIGTIRDSGGPIPLPPITVGTPMLGAPITTAGNIFFIAATLDDYIRAYSVRDGKLLWQARLPAGGQATPMTYEVDGKQYLVIVAGGHGSFGTKMGDYIIAYKLP

SEQ ID NO: 35570 - DNA, 2406 bp, Acinetobacter calcoaceticus
  CDS (1)..(2406): transl_table=11
atgaatcaacctacttcaagatcaggtttaacgacttttaccgtaattattattgggttactggcgttattcctgttaattggaggtatttggctcgctacactaggcggttcaatttactacattatagctggagtattactcctcattgttgcatggcaactctacaagcgtgcttctactgctttgtggttttatgctgcattaatgctaggtaccattatctggagtgtctgggaagttggaacagacttttgggcgcttgcaccacgtttagatattttaggtattcttggtttatggttattggttccggctgtaactcgtggaatcaacaaccttggatcaagtaaagttgccttatcttcaactttagcaattgcaatcgtgttgatggtttattctatcttcaatgatccgcaagaaattaatggtgaaatcaaaacacctcaaccagaaacagctcaagccgtgcctggtgttgctgaaagtgattggccagcttatggtcgtactcaagcaggcgtgcgttattctccattgaaacagatcaatgatcaaaacgtaaaagacttgaaagttgcttggactttacgtactggcgatcttaagacagataacgactctggcgaaacgactaatcaggttacaccgattaaaatcggtaataacatgtttatctgtacagctcaccagcagttaattgctattgatcctgctacaggtaaagaaaaatggcgttttgatccgaaacttaaaacggataaatcgttccagcatctaacttgtcgtggtgtgatgtactacgatgcaaacaatacaactgagtttgcaacgagtcttcaaagcaagaaatctagctctacacaatgtccacgtaaggtatttgtaccagtcaacgatggccgtttagtggctgtaaatgctgacactggtaaagcatgtactgactttggtcaaaatggtcaagtgaacttacaagagttcatgccatatgcttatccaggcggttataacccgacatctcctggtatcgtgactggttcaactgttgttattgctggttctgtaacagataactactcaaataaagagccatctggtgtgattcgtggatacgacgttaacactggtaaacttctttgggtatttgacactggcgcagcggatccaaatgcaatgccgggcgaaggtactacttttgttcacaactcaccaaatgcgtgggcacctttagcatacgatgccaaacttgacatcgtttatgtaccaacaggtgtaggtacaccagacatctggggtggtgaccgtaccgagctgaaagagcgttatgcaaactcaatgttagcgattaatgcttctactggtaaattagtgtggaacttccagacaacccatcacgatttatgggatatggatgtaccatcacaaccatctttagctgatatcaaaaacaaagctggccaaactgttcctgcaatctatgtattgacgaaaacaggtaatgcctttgtgcttgatcgccgtaatggtcaaccgattgttcctgtaactgagaaaccagttccacaaacagttaaacgtggaccacaaactaaaggtgagttctattcaaaaactcagccattctctgacttgaacttggcgccacaagataaattgactgataaagacatgtggggtgccactatgcttgatcagctcatgtgtcgtgtatctttcaaacgtctaaattacgatggtatttatacgccaccatctgaaaacggtactttagttttccctggtaacttaggtgtatttgaatggggcggtatgtcagttaaccctgatcgtcaggttgctgtaatgaacccgattggtctgccattcgtcagtcgtttaattcctgctgatccaaaccgtgcacaaactgcaaaaggtgcgggaactgagcagggcgtacaaccgatgtacggcgtaccatatggtgttgaaattagcgcattcttatctccgcttggtttaccttgtaaacaaccggcttggggctatgtagctggcgttgatttgaaaactcatgaagtggtatggaaaaaacgtattggtacaatccgtgacagtttaccgaacttgttccagttgccagctgtgaaaattggtgtgcctggtttaggtggttcaatttctactgccggtaatgtcatgtttgttggtgcaactcaagataactacttacgtgcgtttaacgttactaacggtaagaaactttgggaagcgcgtttaccagcaggtggacaagcaacaccaatgacttatgaaatcaatggtaagcaatatgttgtaatcatggctggtggtcatggttcatttggtacgaaaatgggcgactatttagtggcttatgccttaccagataacaaataa

SEQ ID NO: 35571 - protein, 801 aa, Acinetobacter calcoaceticus
MNQPTSRSGLTTFTVIIIGLLALFLLIGGIWLATLGGSIYYIIAGVLLLIVAWQLYKRASTALWFYAALMLGTIIWSVWEVGTDFWALAPRLDILGILGLWLLVPAVTRGINNLGSSKVALSSTLAIAIVLMVYSIFNDPQEINGEIKTPQPETAQAVPGVAESDWPAYGRTQAGVRYSPLKQINDQNVKDLKVAWTLRTGDLKTDNDSGETTNQVTPIKIGNNMFICTAHQQLIAIDPATGKEKWRFDPKLKTDKSFQHLTCRGVMYYDANNTTEFATSLQSKKSSSTQCPRKVFVPVNDGRLVAVNADTGKACTDFGQNGQVNLQEFMPYAYPGGYNPTSPGIVTGSTVVIAGSVTDNYSNKEPSGVIRGYDVNTGKLLWVFDTGAADPNAMPGEGTTFVHNSPNAWAPLAYDAKLDIVYVPTGVGTPDIWGGDRTELKERYANSMLAINASTGKLVWNFQTTHHDLWDMDVPSQPSLADIKNKAGQTVPAIYVLTKTGNAFVLDRRNGQPIVPVTEKPVPQTVKRGPQTKGEFYSKTQPFSDLNLAPQDKLTDKDMWGATMLDQLMCRVSFKRLNYDGIYTPPSENGTLVFPGNLGVFEWGGMSVNPDRQVAVMNPIGLPFVSRLIPADPNRAQTAKGAGTEQGVQPMYGVPYGVEISAFLSPLGLPCKQPAWGYVAGVDLKTHEVVWKKRIGTIRDSLPNLFQLPAVKIGVPGLGGSISTAGNVMFVGATQDNYLRAFNVTNGKKLWEARLPAGGQATPMTYEINGKQYVVIMAGGHGSFGTKMGDYLVAYALPDNK

SEQ ID NO: 35572 - DNA, 2427 bp, Gluconobacter oxydans
  CDS (1)..(2427): transl_table=11
atgagcacaacatcccggccagggctctgggccctgattacggccgcggtattcgcgctttgcggcgcgatccttaccgttggcggcgcatgggtcgctgccatcggcggccctctctattatgtcatccttggcctggcacttctcgccacggctttcctctcattcaggcgcaacccggctgccctctacctgttcgcagtcgtcgtcttcggaacggtcatctgggaactcaccgttgtcggtctcgacatctgggccctgatcccgcgctcggacatcgtcatcatcctcggcatctggctgctgttgccgttcgtctcccgccagatcggcggcacgcggacgaccgtcctgccgctcgccggtgccgttggcgttgcggttctggcgctgttcgccagcctcttcaccgacccgcatgacatcagtggcgacctgccgacgcagatcgcaaacgcctcccccgccgacccggacaacgtcccggccagcgagtggcacgcctatggtcgtacgcaggccggtgaccgctggtccccgctgaaccagatcaacgcgtccaacgtcagcaacctcaaggtcgcatggcatatccacaccaaggatatgatgaactccaacgacccgggcgaagcgacgaacgaagcgaccccgatcgagttcaacaacacgctttatatgtgctcgctgcaccagaagctgtttgcggttgatggtgccaccggtaacgtcaagtgggtctacgatccgaagctccagatcaaccctggcttccagcatctgacctgccgtggcgtcagcttccacgaaacgccggccaatgccacggattccgatggcaatcctgctccgacggactgcgccaagcgcatcatcctgccggtcaatgatggccgtctggttgaagtcgatgccgacacgggcaagacctgctccggcttcggcaacaatggcgagatcgatctgcgcgttccgaaccagccttacacgacgcccggccagtacgagccgacgtccccgccggtcatcacggacaagctgatcatcgccaacagcgccatcaccgataacggttcggtcaagcaggcttcgggcgccacgcaggcattcgacgtctacaccggcaagcgtgtctgggtgttcgatgcgtccaacccggacccgaaccagcttccggatgacagccaccctgtcttccacccgaactccccgaactcctggatcgtgtcgtcttacgacaggaacctgaacctcgtgtacatcccgatgggcgtgggtactcccgatcagtggggcggtgaccgcacgaaggattccgagcgtttcgctccgggtatcgttgctctgaacgcagacacgggcaagctcgcctggttctaccagaccgttcatcacgatctgtgggacatggacgttccgtcacagccgagcctcgtggacgtaacgcagaaggacggcacgcttgttccggccatctacgctccgaccaagaccggcgacatcttcgtcctcgaccgtcgtaccggcaaggaaatcgtcccggctccggaaaccccggttccccagggcgccgctccgggcgatcacaccagcccgacccagccgatgtcgcagctgaccctgcgtccgaagaacccgctgaacgactccgatatctggggcggcacgatcttcgaccagatgttctgcagcatctatttccacaccctgcgctacgaaggccccttcacgccgccgtcgctcaagggctcgctcatcttcccgggcgatctgggaatgttcgagtggggtggtctggccgtcgatccgcagcgtcaggtggctttcgccaacccgatctccctgccgttcgtctcccagcttgttccccgtggaccgggcaacccgctctggcctgaaaaggacgccaagggtacgggtggtgaaaccggcctgcagcacaactatggcattccgtatgccgtcaacctgcatccgttcctggatccggtgctgctgccgttcggcatcaagatgccctgccgtacgccgccctggggctatgtcgccggtattgacctgaagaccaacaaggtcgtctggcagcaccgcaacggcaccctgcgtgactcgatgtatggcagctccctgccgatcccgctgccgccgatcaagatcggtgtcccgagcctcggtggcccgctctccacggctggcaacctcggcttcctgacggcgtccatggattactacatccgtgcgtacaacctgacgacgggcaaggtgctgtggcaggaccgtctgccggctggcgcccaggcaacgccgatcacctatgccatcaacggcaagcagtacatcgtgacctatgcaggcggacacaactcgttcccgacccgcatgggcgacgacatcatcgcctacgccctgcccgatcagaaatga

SEQ ID NO: 35573 - protein, 808 aa, Gluconobacter oxydans
MSTTSRPGLWALITAAVFALCGAILTVGGAWVAAIGGPLYYVILGLALLATAFLSFRRNPAALYLFAVVVFGTVIWELTVVGLDIWALIPRSDIVIILGIWLLLPFVSRQIGGTRTTVLPLAGAVGVAVLALFASLFTDPHDISGDLPTQIANASPADPDNVPASEWHAYGRTQAGDRWSPLNQINASNVSNLKVAWHIHTKDMMNSNDPGEATNEATPIEFNNTLYMCSLHQKLFAVDGATGNVKWVYDPKLQINPGFQHLTCRGVSFHETPANATDSDGNPAPTDCAKRIILPVNDGRLVEVDADTGKTCSGFGNNGEIDLRVPNQPYTTPGQYEPTSPPVITDKLIIANSAITDNGSVKQASGATQAFDVYTGKRVWVFDASNPDPNQLPDDSHPVFHPNSPNSWIVSSYDRNLNLVYIPMGVGTPDQWGGDRTKDSERFAPGIVALNADTGKLAWFYQTVHHDLWDMDVPSQPSLVDVTQKDGTLVPAIYAPTKTGDIFVLDRRTGKEIVPAPETPVPQGAAPGDHTSPTQPMSQLTLRPKNPLNDSDIWGGTIFDQMFCSIYFHTLRYEGPFTPPSLKGSLIFPGDLGMFEWGGLAVDPQRQVAFANPISLPFVSQLVPRGPGNPLWPEKDAKGTGGETGLQHNYGIPYAVNLHPFLDPVLLPFGIKMPCRTPPWGYVAGIDLKTNKVVWQHRNGTLRDSMYGSSLPIPLPPIKIGVPSLGGPLSTAGNLGFLTASMDYYIRAYNLTTGKVLWQDRLPAGAQATPITYAINGKQYIVTYAGGHNSFPTRMGDDIIAYALPDQK

SEQ ID NO: 35574 - DNA, 24 bp, Artificial sequence
  primer
atggcaattaacaatacaggctcg

SEQ ID NO: 35575 - DNA, 23 bp, Artificial sequence
  primer
ttacttcacatcatccggcagcg

SEQ ID NO: 35576 - protein, 914 aa, Artificial sequence
  consensus sequence
  Variant (3)..(3): Xaa in position 3 is any amino acid
  Variant (5)..(6): Xaa in position 5 to 6 is any amino acid
  Variant (9)..(10): Xaa in position 9 to 10 is any amino acid
  Variant (12)..(14): Xaa in position 12 to 14 is any amino acid
  Variant (18)..(18): Xaa in position 18 is any amino acid
  Variant (21)..(23): Xaa in position 21 to 23 is any amino acid
  Variant (25)..(33): Xaa in position 25 to 33 is any amino acid
  Variant (34)..(43): Xaa in position 34 to 43 is any or no amino acid
  Variant (46)..(54): Xaa in position 46 to 54 is any amino acid
  Variant (56)..(58): Xaa in position 56 to 58 is any amino acid
  Variant (60)..(60): Xaa in position 60 is any amino acid
  Variant (62)..(64): Xaa in position 62 to 64 is any amino acid
  Variant (66)..(66): Xaa in position 66 is any amino acid
  Variant (68)..(69): Xaa in position 68 to 69 is any amino acid
  Variant (71)..(77): Xaa in position 71 to 77 is any amino acid
  Variant (79)..(140): Xaa in position 79 to 140 is any amino acid
  Variant (141)..(174): Xaa in position 141 to 174 is any or no amino acid
  Variant (176)..(177): Xaa in position 176 to 177 is any amino acid
  Variant (180)..(183): Xaa in position 180 to 183 is any amino acid
  Variant (185)..(185): Xaa in position 185 is any amino acid
  Variant (187)..(189): Xaa in position 187 to 189 is any amino acid
  Variant (191)..(191): Xaa in position 191 is any amino acid
  Variant (194)..(196): Xaa in position 194 to 196 is any amino acid
  Variant (199)..(200): Xaa in position 199 to 200 is any amino acid
  Variant (202)..(203): Xaa in position 202 to 203 is any amino acid
  Variant (206)..(208): Xaa in position 206 to 208 is any amino acid
  Variant (212)..(219): Xaa in position 212 to 219 is any amino acid
  Variant (220)..(226): Xaa in position 220 to 226 is any or no amino acid
  Variant (229)..(235): Xaa in position 229 to 235 is any amino acid
  Variant (237)..(237): Xaa in position 237 is any amino acid
  Variant (240)..(240): Xaa in position 240 is any amino acid
  Variant (242)..(245): Xaa in position 242 to 245 is any amino acid
  Variant (249)..(251): Xaa in position 249 to 251 is any amino acid
  Variant (253)..(255): Xaa in position 253 to 255 is any amino acid
  Variant (257)..(258): Xaa in position 257 to 258 is any amino acid
  Variant (261)..(269): Xaa in position 261 to 269 is any amino acid
  Variant (270)..(277): Xaa in position 270 to 277 is any or no amino acid
  Variant (282)..(282): Xaa in position 282 is any amino acid
  Variant (284)..(292): Xaa in position 284 to 292 is any amino acid
  Variant (293)..(365): Xaa in position 293 to 365 is any or no amino acid
  Variant (367)..(368): Xaa in position 367 to 368 is any amino acid
  Variant (370)..(372): Xaa in position 370 to 372 is any amino acid
  Variant (374)..(375): Xaa in position 374 to 375 is any amino acid
  Variant (377)..(377): Xaa in position 377 is any amino acid
  Variant (380)..(380): Xaa in position 380 is any amino acid
  Variant (382)..(383): Xaa in position 382 to 383 is any amino acid
  Variant (385)..(386): Xaa in position 385 to 386 is any amino acid
  Variant (388)..(389): Xaa in position 388 to 389 is any amino acid
  Variant (391)..(392): Xaa in position 391 to 392 is any amino acid
  Variant (394)..(396): Xaa in position 394 to 396 is any amino acid
  Variant (398)..(400): Xaa in position 398 to 400 is any amino acid
  Variant (402)..(410): Xaa in position 402 to 410 is any amino acid
  Variant (411)..(411): Xaa in position 411 is any or no amino acid
  Variant (413)..(413): Xaa in position 413 is any amino acid
  Variant (415)..(416): Xaa in position 415 to 416 is any amino acid
  Variant (419)..(419): Xaa in position 419 is any amino acid
  Variant (421)..(430): Xaa in position 421 to 430 is any amino acid
  Variant (432)..(432): Xaa in position 432 is any amino acid
  Variant (434)..(434): Xaa in position 434 is any amino acid
  Variant (437)..(442): Xaa in position 437 to 442 is any amino acid
  Variant (443)..(443): Xaa in position 443 is any or no amino acid
  Variant (449)..(450): Xaa in position 449 to 450 is any amino acid
  Variant (453)..(454): Xaa in position 453 to 454 is any amino acid
  Variant (456)..(456): Xaa in position 456 is any amino acid
  Variant (458)..(458): Xaa in position 458 is any amino acid
  Variant (460)..(461): Xaa in position 460 to 461 is any amino acid
  Variant (463)..(482): Xaa in position 463 to 482 is any amino acid
  Variant (483)..(485): Xaa in position 483 to 485 is any or no amino acid
  Variant (488)..(488): Xaa in position 488 is any amino acid
  Variant (490)..(494): Xaa in position 490 to 494 is any amino acid
  Variant (496)..(497): Xaa in position 496 to 497 is any amino acid
  Variant (499)..(501): Xaa in position 499 to 501 is any amino acid
  Variant (503)..(503): Xaa in position 503 is any amino acid
  Variant (505)..(505): Xaa in position 505 is any amino acid
  Variant (507)..(509): Xaa in position 507 to 509 is any amino acid
  Variant (512)..(513): Xaa in position 512 to 513 is any amino acid
  Variant (515)..(516): Xaa in position 515 to 516 is any amino acid
  Variant (518)..(529): Xaa in position 518 to 529 is any amino acid
  Variant (530)..(531): Xaa in position 530 to 531 is any or no amino acid
  Variant (534)..(536): Xaa in position 534 to 536 is any amino acid
  Variant (539)..(541): Xaa in position 539 to 541 is any amino acid
  Variant (543)..(544): Xaa in position 543 to 544 is any amino acid
  Variant (546)..(547): Xaa in position 546 to 547 is any amino acid
  Variant (554)..(554): Xaa in position 554 is any amino acid
  Variant (556)..(558): Xaa in position 556 to 558 is any amino acid
  Variant (561)..(561): Xaa in position 561 is any amino acid
  Variant (563)..(563): Xaa in position 563 is any amino acid
  Variant (565)..(568): Xaa in position 565 to 568 is any amino acid
  Variant (569)..(569): Xaa in position 569 is any or no amino acid
  Variant (571)..(572): Xaa in position 571 to 572 is any amino acid
  Variant (573)..(573): Xaa in position 573 is any or no amino acid
  Variant (575)..(580): Xaa in position 575 to 580 is any amino acid
  Variant (582)..(582): Xaa in position 582 is any amino acid
  Variant (584)..(586): Xaa in position 584 to 586 is any amino acid
  Variant (591)..(592): Xaa in position 591 to 592 is any amino acid
  Variant (594)..(600): Xaa in position 594 to 600 is any amino acid
  Variant (602)..(602): Xaa in position 602 is any amino acid
  Variant (604)..(604): Xaa in position 604 is any amino acid
  Variant (606)..(610): Xaa in position 606 to 610 is any amino acid
  Variant (611)..(615): Xaa in position 611 to 615 is any or no amino acid
  Variant (617)..(621): Xaa in position 617 to 621 is any amino acid
  Variant (625)..(625): Xaa in position 625 is any amino acid
  Variant (627)..(634): Xaa in position 627 to 634 is any amino acid
  Variant (635)..(642): Xaa in position 635 to 642 is any or no amino acid
  Variant (644)..(647): Xaa in position 644 to 647 is any amino acid
  Variant (651)..(651): Xaa in position 651 is any amino acid
  Variant (653)..(654): Xaa in position 653 to 654 is any amino acid
  Variant (657)..(658): Xaa in position 657 to 658 is any amino acid
  Variant (661)..(662): Xaa in position 661 to 662 is any amino acid
  Variant (664)..(667): Xaa in position 664 to 667 is any amino acid
  Variant (669)..(669): Xaa in position 669 is any amino acid
  Variant (671)..(672): Xaa in position 671 to 672 is any amino acid
  Variant (673)..(673): Xaa in position 673 is any or no amino acid
  Variant (677)..(684): Xaa in position 677 to 684 is any amino acid
  Variant (685)..(685): Xaa in position 685 is any or no amino acid
  Variant (688)..(689): Xaa in position 688 to 689 is any amino acid
  Variant (691)..(693): Xaa in position 691 to 693 is any amino acid
  Variant (696)..(698): Xaa in position 696 to 698 is any amino acid
  Variant (702)..(720): Xaa in position 702 to 720 is any amino acid
  Variant (722)..(740): Xaa in position 722 to 740 is any amino acid
  Variant (741)..(751): Xaa in position 741 to 751 is any or no amino acid
  Variant (753)..(753): Xaa in position 753 is any amino acid
  Variant (756)..(756): Xaa in position 756 is any amino acid
  Variant (758)..(761): Xaa in position 758 to 761 is any amino acid
  Variant (762)..(763): Xaa in position 762 to 763 is any or no amino acid
  Variant (765)..(765): Xaa in position 765 is any amino acid
  Variant (767)..(768): Xaa in position 767 to 768 is any amino acid
  Variant (769)..(774): Xaa in position 769 to 774 is any or no amino acid
  Variant (776)..(776): Xaa in position 776 is any amino acid
  Variant (779)..(780): Xaa in position 779 to 780 is any amino acid
  Variant (782)..(783): Xaa in position 782 to 783 is any amino acid
  Variant (785)..(789): Xaa in position 785 to 789 is any amino acid
  Variant (792)..(792): Xaa in position 792 is any amino acid
  Variant (794)..(797): Xaa in position 794 to 797 is any amino acid
  Variant (799)..(802): Xaa in position 799 to 802 is any amino acid
  Variant (805)..(806): Xaa in position 805 to 806 is any amino acid
  Variant (808)..(809): Xaa in position 808 to 809 is any amino acid
  Variant (810)..(815): Xaa in position 810 to 815 is any or no amino acid
  Variant (817)..(823): Xaa in position 817 to 823 is any amino acid
  Variant (824)..(827): Xaa in position 824 to 827 is any or no amino acid
  Variant (829)..(829): Xaa in position 829 is any amino acid
  Variant (831)..(832): Xaa in position 831 to 832 is any amino acid
  Variant (835)..(837): Xaa in position 835 to 837 is any amino acid
  Variant (839)..(839): Xaa in position 839 is any amino acid
  Variant (841)..(843): Xaa in position 841 to 843 is any amino acid
  Variant (845)..(849): Xaa in position 845 to 849 is any amino acid
  Variant (851)..(851): Xaa in position 851 is any amino acid
  Variant (853)..(853): Xaa in position 853 is any amino acid
  Variant (856)..(860): Xaa in position 856 to 860 is any amino acid
  Variant (862)..(863): Xaa in position 862 to 863 is any amino acid
  Variant (866)..(867): Xaa in position 866 to 867 is any amino acid
  Variant (873)..(873): Xaa in position 873 is any amino acid
  Variant (875)..(876): Xaa in position 875 to 876 is any amino acid
  Variant (879)..(879): Xaa in position 879 is any amino acid
  Variant (881)..(883): Xaa in position 881 to 883 is any amino acid
  Variant (884)..(885): Xaa in position 884 to 885 is any or no amino acid
  Variant (887)..(887): Xaa in position 887 is any amino acid
  Variant (890)..(893): Xaa in position 890 to 893 is any amino acid
  Variant (898)..(901): Xaa in position 898 to 901 is any amino acid
  Variant (903)..(903): Xaa in position 903 is any amino acid
  Variant (904)..(904): Xaa in position 904 is any or no amino acid
  Variant (908)..(909): Xaa in position 908 to 909 is any amino acid
  Variant (912)..(912): Xaa in position 912 is any amino acid
GLXLXXGGXXLXXXGGSXYYXXXGXXXXXXXXXXXXXXXXXXXLYXXXXXXXXXWXXXEXGXXXWXLXXRXXXXXXXGXXXXXXXXXXXXXXXXXXXXXXXXXXXXXXXXXXXXXXXXXXXXXXXXXXXXXXXXXXXXXXXXXXXXXXXXXXXXXXXXXXXXXXXXXXXXXXXXWXXYGXXXXGXRXXXLXQIXXXNVXXLXXAWXXXTGDXXXXXXXXXXXXXXXTPXXXXXXXYXCTXHXXXXALDXXXGXXXWXXDPXXXXXXXXXXXXXXXXXCRGVXYXXXXXXXXXXXXXXXXXXXXXXXXXXXXXXXXXXXXXXXXXXXXXXXXXXXXXXXXXXXXXXXXXXXXXXXXXXXXXXXXXXCXXRXXXPXXDXRLXAXXAXXGXXCXXFXXXGXXXLXXXXXXXXXXGXYXXTSXPXXXXXXXXXXGXVXDNXXXXXXXSGVIRXXDVXXGXLXWXXDXXXXXXXXXXXXXXXXXXXXXXXPNXWXXXXXDXXLXXXYXPXGXXXPDXXGXXRXXXXXXXXXXXXXXALXXXTGXXXWXXQXXHHDLWDXDXXXQPXLXDXXXXXGXXXPXXXXXXKXGXXXVLDRXXGXXXXXXXEXPXPXXXXXXXXXXGXXXXXTQPXSXXXXXXXXXXXXXXXXLXXXXMWGXTXXDQXXCRXXFXXXXYXGXXXTPPXXXXXXXXXPGXXGXXXWGXXXVDPXXXXXXXXXXXXXXXXXXXPXXXXXXXXXXXXXXXXXXXXXXXXXXXXXXGXPYXVXXXXXXFXSXXXXXXXXGXPCXXPXXGXXXXXDLXTXXXXWXXXXGTXXDXXXXXXXXPXXXXXXXXXXXGXPXXGGXXXTXGXXXFXXXXXDXYXRAXXXXXGXXLWXXRLPAGXQXXPMXYXXXXXGXQYXXXXAGGHXXXXTXXGDYXXAYXLP

SEQ ID NO: 35577 - protein, 29 aa, Artificial sequence
  protein pattern
  Variant (4)..(4): Xaa in position 4 is any amino acid
  Variant (5)..(5): Xaa in position 5 is Ser or Thr
  Variant (6)..(7): Xaa in position 6 to 7 is any amino acid
  Variant (10)..(10): Xaa in position 10 is Leu or Met
  Variant (11)..(11): Xaa in position 11 is any amino acid
  Variant (14)..(14): Xaa in position 14 is Ile or Val
  Variant (15)..(15): Xaa in position 15 is any amino acid
  Variant (17)..(20): Xaa in position 17 to 20 is any amino acid
  Variant (22)..(22): Xaa in position 22 is any amino acid
  Variant (24)..(24): Xaa in position 24 is any amino acid
  Variant (25)..(25): Xaa in position 25 is Phe or Tyr
  Variant (27)..(27): Xaa in position 27 is any or no amino acid
  Variant (29)..(29): Xaa in position 29 is Gly, Pro or Ser
MWGXXXXDQXXCRXXFXXXXYXGXXTXPX

SEQ ID NO: 35578 - protein, 30 aa, Artificial sequence
  protein pattern
  Variant (3)..(5): Xaa in position 3 to 5 is any amino acid
  Variant (7)..(8): Xaa in position 7 to 8 is any amino acid
  Variant (10)..(10): Xaa in position 10 is any or no amino acid
  Variant (12)..(12): Xaa in position 12 is any or no amino acid
  Variant (14)..(14): Xaa in position 14 is any amino acid
  Variant (16)..(16): Xaa in position 16 is Ala, Ile or Leu
  Variant (19)..(19): Xaa in position 19 is any amino acid
  Variant (21)..(21): Xaa in position 21 is any amino acid
  Variant (22)..(22): Xaa in position 22 is Gly or Pro
  Variant (23)..(23): Xaa in position 23 is any amino acid
  Variant (26)..(26): Xaa in position 26 is any amino acid
  Variant (27)..(27): Xaa in position 27 is Phe or Leu
  Variant (28)..(28): Xaa in position 28 is any amino acid
  Variant (29)..(29): Xaa in position 29 is Asp or His
  Variant (30)..(30): Xaa in position 30 is Phe, Ile, Leu, Met or Val
TGXXXWXXQXTXHXDXWDXDXXXQPXXXXX

SEQ ID NO: 35579 - protein, 54 aa, Artificial sequence
  protein pattern
  Variant (2)..(2): Xaa in position 2 is any amino acid
  Variant (4)..(5): Xaa in position 4 to 5 is any amino acid
  Variant (8)..(8): Xaa in position 8 is Pro, Ser or Thr
  Variant (9)..(9): Xaa in position 9 is Phe, Ile, Leu, Met or Val
  Variant (10)..(10): Xaa in position 10 is any amino acid
  Variant (12)..(12): Xaa in position 12 is any amino acid
  Variant (13)..(13): Xaa in position 13 is any or no amino acid
  Variant (15)..(16): Xaa in position 15 to 16 is any amino acid
  Variant (17)..(17): Xaa in position 17 is any or no amino acid
  Variant (19)..(19): Xaa in position 19 is Phe, Ile, Leu, Met or Val
  Variant (20)..(20): Xaa in position 20 is Ala, Gly, Ser or Thr
  Variant (21)..(21): Xaa in position 21 is Ala or Gly
  Variant (22)..(22): Xaa in position 22 is Ala, Ser or Thr
  Variant (23)..(23): Xaa in position 23 is any amino acid
  Variant (25)..(26): Xaa in position 25 to 26 is any amino acid
  Variant (27)..(27): Xaa in position 27 is Phe, Ile, Leu or Val
  Variant (29)..(29): Xaa in position 29 is Ala or Gly
  Variant (30)..(30): Xaa in position 30 is any amino acid
  Variant (31)..(31): Xaa in position 31 is Asp, Asn or Ser
  Variant (32)..(33): Xaa in position 32 to 33 is any amino acid
  Variant (34)..(34): Xaa in position 34 is Asp, Asn, Ser or Thr
  Variant (36)..(37): Xaa in position 36 to 37 is any amino acid
  Variant (38)..(38): Xaa in position 38 is Ile, Leu or Val
  Variant (40)..(40): Xaa in position 40 is any amino acid
  Variant (41)..(41): Xaa in position 41 is Ala, Asp, Glu, Gly or Ser
  Variant (42)..(42): Xaa in position 42 is Lys or Arg
  Variant (45)..(45): Xaa in position 45 is Ala or Val
  Variant (47)..(47): Xaa in position 47 is Ala, Gly or Ser
  Variant (49)..(49): Xaa in position 49 is Ala, Gly, Ser or Thr
  Variant (50)..(50): Xaa in position 50 is Gly, Asn or Thr
  Variant (52)..(52): Xaa in position 52 is any amino acid
  Variant (53)..(53): Xaa in position 53 is Ser, Thr or Val
GXPXXGGXXXTXXGXXXFXXXXXDXXXRXXXXXXGXXXWXXXLPXGXQXXPXXY

SEQ ID NO: 35580 - protein, 39 aa, Artificial sequence
  protein pattern
  Variant (2)..(4): Xaa in position 2 to 4 is any amino acid
  Variant (5)..(6): Xaa in position 5 to 6 is any or no amino acid
  Variant (9)..(9): Xaa in position 9 is Ile or Leu
  Variant (10)..(10): Xaa in position 10 is any amino acid
  Variant (11)..(11): Xaa in position 11 is Ala, Ile or Val
  Variant (12)..(12): Xaa in position 12 is any amino acid
  Variant (13)..(13): Xaa in position 13 is Asp, Gly, Asn or Ser
  Variant (14)..(14): Xaa in position 14 is any amino acid
  Variant (15)..(15): Xaa in position 15 is Leu, Met or Val
  Variant (16)..(16): Xaa in position 16 is Phe or Tyr
  Variant (17)..(17): Xaa in position 17 is any amino acid
  Variant (20)..(20): Xaa in position 20 is Ala, Pro or Thr
  Variant (21)..(21): Xaa in position 21 is Phe, His or Tyr
  Variant (22)..(22): Xaa in position 22 is Asp, Gly, Asn, Gln or Ser
  Variant (23)..(23): Xaa in position 23 is any amino acid
  Variant (24)..(24): Xaa in position 24 is Ala, Ile, Leu or Val
  Variant (25)..(25): Xaa in position 25 is Phe, Ile, Leu, Met or Val
  Variant (27)..(27): Xaa in position 27 is Ile, Leu or Val
  Variant (29)..(29): Xaa in position 29 is Ala or Pro
  Variant (30)..(30): Xaa in position 30 is any amino acid
  Variant (31)..(31): Xaa in position 31 is Ser or Thr
  Variant (33)..(33): Xaa in position 33 is any amino acid
  Variant (34)..(34): Xaa in position 34 is Glu, Gln or Thr
  Variant (35)..(35): Xaa in position 35 is any amino acid
  Variant (37)..(38): Xaa in position 37 to 38 is any amino acid
  Variant (39)..(39): Xaa in position 39 is Ala, Asp, Glu or Asn
EXXXXXTPXXXXXXXXXCTXXXXXXAXDXXXGXXXWXXX

SEQ ID NO: 35581 - protein, 40 aa, Artificial sequence
  protein pattern
  Variant (2)..(3): Xaa in position 2 to 3 is any or no amino acid
  Variant (5)..(6): Xaa in position 5 to 6 is any amino acid
  Variant (7)..(7): Xaa in position 7 is Trp or Tyr
  Variant (9)..(9): Xaa in position 9 is any amino acid
  Variant (10)..(10): Xaa in position 10 is Asn, Ser or Thr
  Variant (11)..(12): Xaa in position 11 to 12 is any amino acid
  Variant (14)..(14): Xaa in position 14 is any amino acid
  Variant (16)..(16): Xaa in position 16 is Phe or Tyr
  Variant (17)..(17): Xaa in position 17 is Ala or Ser
  Variant (18)..(18): Xaa in position 18 is Ala, Pro or Ser
  Variant (19)..(19): Xaa in position 19 is Phe or Leu
  Variant (20)..(20): Xaa in position 20 is any amino acid
  Variant (22)..(22): Xaa in position 22 is Ile or Val
  Variant (23)..(25): Xaa in position 23 to 25 is any amino acid
  Variant (27)..(27): Xaa in position 27 is Ala, Ile or Val
  Variant (28)..(29): Xaa in position 28 to 29 is any amino acid
  Variant (31)..(32): Xaa in position 31 to 32 is any amino acid
  Variant (35)..(37): Xaa in position 35 to 37 is any amino acid
  Variant (38)..(38): Xaa in position 38 is Ser or Thr
  Variant (40)..(40): Xaa in position 40 is Asp or Lys
DXXWXXXGXXXXGXRXXXXXQXXXXNXXXLXXAWXXXXGX

SEQ ID NO: 35582 - protein, 37 aa, Artificial sequence
  protein pattern
  Variant (2)..(2): Xaa in position 2 is any amino acid
  Variant (3)..(3): Xaa in position 3 is any or no amino acid
  Variant (5)..(5): Xaa in position 5 is Ala, Glu, Asn or Thr
  Variant (8)..(8): Xaa in position 8 is any amino acid
  Variant (9)..(9): Xaa in position 9 is Ala, Glu, Gln or Ser
  Variant (10)..(12): Xaa in position 10 to 12 is any amino acid
  Variant (13)..(13): Xaa in position 13 is Pro, Gln or Thr
  Variant (14)..(14): Xaa in position 14 is Gly, Pro or Ser
  Variant (17)..(17): Xaa in position 17 is Ile or Val
  Variant (19)..(19): Xaa in position 19 is Ala, Gly or Thr
  Variant (20)..(20): Xaa in position 20 is Phe or Tyr
  Variant (21)..(21): Xaa in position 21 is Asp or Asn
  Variant (22)..(22): Xaa in position 22 is Ala, Ile, Leu or Val
  Variant (23)..(23): Xaa in position 23 is any amino acid
  Variant (24)..(24): Xaa in position 24 is Asp, Ser or Thr
  Variant (26)..(26): Xaa in position 26 is any amino acid
  Variant (27)..(27): Xaa in position 27 is Leu or Met
  Variant (28)..(28): Xaa in position 28 is any amino acid
  Variant (30)..(30): Xaa in position 30 is any amino acid
  Variant (31)..(31): Xaa in position 31 is Phe or Trp
  Variant (33)..(34): Xaa in position 33 to 34 is any amino acid
  Variant (35)..(35): Xaa in position 35 is Ala or Asn
  Variant (36)..(36): Xaa in position 36 is any amino acid
  Variant (37)..(37): Xaa in position 37 is Ala, Asp, Glu, Asn, Gln or Thr
GXXVXDNXXXXXXXGVXRXXXXXXGXXXWXXDXXXXX

SEQ ID NO: 35583 - protein, 29 aa, Artificial sequence
  protein pattern
  Variant (3)..(3): Xaa in position 3 is any or no amino acid
  Variant (5)..(5): Xaa in position 5 is any or no amino acid
  Variant (7)..(7): Xaa in position 7 is Ala, Gly, Pro or Ser
  Variant (8)..(8): Xaa in position 8 is Phe, Trp or Tyr
  Variant (10)..(10): Xaa in position 10 is any amino acid
  Variant (11)..(11): Xaa in position 11 is Ile, Leu, Met or Val
  Variant (12)..(12): Xaa in position 12 is Ala, Ser or Thr
  Variant (13)..(13): Xaa in position 13 is Ala or Gly
  Variant (14)..(14): Xaa in position 14 is Ala, Ile, Leu or Val
  Variant (16)..(16): Xaa in position 16 is Leu or Met
  Variant (17)..(17): Xaa in position 17 is any amino acid
  Variant (18)..(18): Xaa in position 18 is Asn, Ser or Thr
  Variant (19)..(22): Xaa in position 19 to 22 is any amino acid
  Variant (23)..(23): Xaa in position 23 is Trp or Tyr
  Variant (24)..(27): Xaa in position 24 to 27 is any amino acid
PCXQXPXXGXXXXXDXXXXXXXXXXXXGT

SEQ ID NO: 35584 - protein, 35 aa, Artificial sequence
  protein pattern
  Variant (2)..(2): Xaa in position 2 is any amino acid
  Variant (3)..(3): Xaa in position 3 is any or no amino acid
  Variant (5)..(5): Xaa in position 5 is any amino acid
  Variant (7)..(9): Xaa in position 7 to 9 is any amino acid
  Variant (10)..(10): Xaa in position 10 is Ala, Ser or Val
  Variant (11)..(11): Xaa in position 11 is any amino acid
  Variant (13)..(15): Xaa in position 13 to 15 is any amino acid
  Variant (16)..(16): Xaa in position 16 is Asp, Gly or Asn
  Variant (17)..(17): Xaa in position 17 is any amino acid
  Variant (18)..(18): Xaa in position 18 is Ile, Leu or Val
  Variant (19)..(19): Xaa in position 19 is Phe or Tyr
  Variant (20)..(20): Xaa in position 20 is Phe, Ile, Leu, Met or Val
  Variant (22)..(22): Xaa in position 22 is any amino acid
  Variant (24)..(24): Xaa in position 24 is Asn, Ser or Val
  Variant (25)..(26): Xaa in position 25 to 26 is any amino acid
  Variant (27)..(27): Xaa in position 27 is Gly, Pro, Thr or Val
  Variant (29)..(30): Xaa in position 29 to 30 is any amino acid
  Variant (32)..(33): Xaa in position 32 to 33 is any amino acid
  Variant (35)..(35): Xaa in position 35 is Asn, Ser or Thr
SXXNXWXXXXXDXXXXXXXXPXGXXXXDXXGXXRX

SEQ ID NO: 35585 - protein, 35 aa, Artificial sequence
  protein pattern
  Variant (3)..(4): Xaa in position 3 to 4 is any amino acid
  Variant (6)..(7): Xaa in position 6 to 7 is any amino acid
  Variant (8)..(8): Xaa in position 8 is Asp, Glu or Asn
  Variant (11)..(11): Xaa in position 11 is Gly or Ser
  Variant (12)..(12): Xaa in position 12 is Ile, Leu, Met or Val
  Variant (13)..(13): Xaa in position 13 is Ala or Ser
  Variant (15)..(15): Xaa in position 15 is Asp or Asn
  Variant (16)..(17): Xaa in position 16 to 17 is any amino acid
  Variant (18)..(18): Xaa in position 18 is Asn, Gln, Arg or Ser
  Variant (19)..(19): Xaa in position 19 is Asp, Glu, Gly, Asn, Gln or Ser
  Variant (20)..(21): Xaa in position 20 to 21 is any amino acid
  Variant (22)..(22): Xaa in position 22 is Phe, Ile or Val
  Variant (23)..(27): Xaa in position 23 to 27 is any amino acid
  Variant (28)..(28): Xaa in position 28 is Leu, Met or Val
  Variant (29)..(29): Xaa in position 29 is Ala, Gly or Pro
  Variant (30)..(34): Xaa in position 30 to 34 is any amino acid
  Variant (35)..(35): Xaa in position 35 is Ile, Leu, Met or Val
PGXXGXXXWGXXXVXXXXXXXXXXXXXXXXXXXXX

SEQ ID NO: 35586 - protein, 36 aa, Artificial sequence
  protein pattern
  Variant (2)..(3): Xaa in position 2 to 3 is any amino acid
  Variant (4)..(4): Xaa in position 4 is Lys or Arg
  Variant (5)..(5): Xaa in position 5 is Ile, Leu or Val
  Variant (6)..(7): Xaa in position 6 to 7 is any amino acid
  Variant (8)..(8): Xaa in position 8 is Ala, Asn or Pro
  Variant (9)..(10): Xaa in position 9 to 10 is any amino acid
  Variant (12)..(12): Xaa in position 12 is Ala, Gly or Thr
  Variant (15)..(15): Xaa in position 15 is any amino acid
  Variant (17)..(17): Xaa in position 17 is Ile, Leu or Val
  Variant (18)..(18): Xaa in position 18 is Asp or Asn
  Variant (20)..(20): Xaa in position 20 is any amino acid
  Variant (21)..(21): Xaa in position 21 is Asp, Asn, Ser or Thr
  Variant (23)..(24): Xaa in position 23 to 24 is any amino acid
  Variant (26)..(27): Xaa in position 26 to 27 is any amino acid
  Variant (29)..(29): Xaa in position 29 is Ala or Gly
  Variant (30)..(31): Xaa in position 30 to 31 is any amino acid
  Variant (33)..(33): Xaa in position 33 is any amino acid
  Variant (34)..(35): Xaa in position 34 to 35 is any or no amino acid
CXXXXXXXXXDXRLXAXXAXXGXXCXXFXXXGXXXL

SEQ ID NO: 35587 - protein, 31 aa, Artificial sequence
  protein pattern
  Variant (2)..(2): Xaa in position 2 is any amino acid
  Variant (3)..(7): Xaa in position 3 to 7 is any or no amino acid
  Variant (9)..(9): Xaa in position 9 is Ala, Gln or Thr
  Variant (11)..(11): Xaa in position 11 is Asp, Glu, Asn, Gln or Ser
  Variant (12)..(12): Xaa in position 12 is Ala, Ile, Leu or Val
  Variant (13)..(13): Xaa in position 13 is Phe or Tyr
  Variant (16)..(16): Xaa in position 16 is Asp or Asn
  Variant (18)..(18): Xaa in position 18 is any amino acid
  Variant (19)..(19): Xaa in position 19 is Asp, Asn, Ser or Thr
  Variant (21)..(22): Xaa in position 21 to 22 is any amino acid
  Variant (23)..(23): Xaa in position 23 is Ile, Leu or Val
  Variant (24)..(25): Xaa in position 24 to 25 is any amino acid
  Variant (26)..(26): Xaa in position 26 is Ala, Ile or Val
  Variant (27)..(27): Xaa in position 27 is any amino acid
  Variant (29)..(29): Xaa in position 29 is any amino acid
  Variant (30)..(30): Xaa in position 30 is Ala, Asp, Pro or Ser
  Variant (31)..(31): Xaa in position 31 is Ala, Thr or Val
PXXXXXXKXGXXXVLXRXXGXXXXXXXEXXX

SEQ ID NO: 35588 - protein, 19 aa, Artificial sequence
  protein pattern
  Variant (2)..(2): Xaa in position 2 is any amino acid
  Variant (3)..(3): Xaa in position 3 is any or no amino acid
  Variant (5)..(5): Xaa in position 5 is Ala, Gly or Ser
  Variant (6)..(7): Xaa in position 6 to 7 is any amino acid
  Variant (8)..(8): Xaa in position 8 is Asp or Glu
  Variant (9)..(9): Xaa in position 9 is any amino acid
  Variant (11)..(13): Xaa in position 11 to 13 is any amino acid
  Variant (15)..(15): Xaa in position 15 is any amino acid
  Variant (17)..(17): Xaa in position 17 is any amino acid
  Variant (18)..(18): Xaa in position 18 is Pro or Ser
TXXWXXXXXGXXXWXLXXR

SEQ ID NO: 35589 - protein, 17 aa, Artificial sequence
  protein pattern
  Variant (2)..(3): Xaa in position 2 to 3 is any amino acid
  Variant (4)..(4): Xaa in position 4 is any or no amino acid
  Variant (8)..(8): Xaa in position 8 is any amino acid
  Variant (9)..(10): Xaa in position 9 to 10 is Phe or Tyr
  Variant (11)..(11): Xaa in position 11 is Ile, Leu, Pro or Val
  Variant (12)..(12): Xaa in position 12 is Phe, Ile, Leu or Val
  Variant (13)..(13): Xaa in position 13 is any amino acid
  Variant (15)..(15): Xaa in position 15 is Ala, Ile, Leu or Val
  Variant (16)..(16): Xaa in position 16 is any amino acid
  Variant (17)..(17): Xaa in position 17 is Phe, Ile, Leu, Met or Val
LXXXGGSXXXXXXGXXX

SEQ ID NO: 35590 - DNA, 2481 bp, Escherichia coli
  CDS (1)..(2481): transl_table=11
atggtcagacctcctacaagtaaggggcttttcgttatgatgattttgagtattctcgctacggttgtcctgctcggcgcgttgttctatcaccgcgtgagcttatttatcagcagtctgattttgctcgcctggacagccgccctcggcgttgctggtctgtggtcggcgtgggtactggtgcctctggccattatcctcgtgccatttaactttgcgcctatgcgtaagtcgatgatttccgcgccggtatttcgcggtttccgtaaggtgatgccgccgatgtcgcgcactgagaaagaagcgattgatgcgggcaccacctggtgggagggcgacttgttccagggcaagccggactggaaaaagctgcataactatccgcagccgcgcctgaccgccgaagagcaagcgtttctcgacggcccggtagaagaagcctgccggatggcgaatgatttccagatcacccatgagctggcggatctgccgccggagttgtgggcgtaccttaaagagcatcgtttcttcgcgatgatcatcaaaaaagagtacggcgggctggagttctcggcttatgcccagtctcgcgtgctgcaaaaactctccggcgtgagcgggatcctggcgattaccgtcggcgtgccaaactcattaggcccgggcgaactgttgcaacattacggcactgacgagcagaaagatcactatctgccgcgtctggcgcgtggtcaggagatcccctgctttgcactgaccagcccggaagcgggttccgatgcgggcgcgattccggacaccgggattgtctgcatgggcgaatggcagggccagcaggtgctggggatgcgtctgacctggaacaaacgctacattacgctggcaccgattgcgaccgtgcttgggctggcgtttaaactctccgacccggaaaaattactcggcggtgcagaagatttaggcattacctgtgcgctgatcccaaccaccacgccgggcgtggaaattggtcgtcgccacttcccgctgaacgtaccgttccagaacggaccgacgcgcggtaaagatgtcttcgtgccgatcgattacatcatcggcgggccgaaaatggccgggcaaggctggcggatgctggtggagtgcctctcggtaggccgcggcatcaccctgccttccaactcaaccggcggcgtgaaatcggtagcgctggcaaccggcgcgtatgctcacattcgccgtcagttcaaaatctctattggtaagatggaagggattgaagagccgctggcgcgtattgccggtaatgcctacgtgatggatgctgcggcatcgctgattacctacggcattatgctcggcgaaaaacctgccgtgctgtcggctatcgttaagtatcactgtacccaccgcgggcagcagtcgattattgatgcgatggatattaccggcggtaaaggcattatgctcgggcaaagcaacttcctggcgcgtgcttaccagggcgcaccgattgccatcaccgttgaaggggctaacattctgacccgcagcatgatgatcttcggacaaggagcgattcgttgccatccgtacgtgctggaagagatggaagcggcgaagaacaatgacgtcaacgcgttcgataaactgttgttcaaacatatcggtcacgtcggtagcaacaaagttcgcagcttctggctgggcctgacgcgcggtttaaccagcagcacgccaaccggcgatgccactaaacgctactatcagcacctgaaccgcctgagcgccaacctcgccctgctttctgatgtctcgatggcagtgctgggcggcagcctgaaacgtcgcgagcgcatctcggcccgtctgggggatattttaagccagctctacctcgcctctgccgtgctgaagcgttatgacgacgaaggccgtaatgaagccgacctgccgctggtgcactggggcgtacaagatgcgctgtatcaggctgaacaggcgatggatgatttactgcaaaacttcccgaaccgcgtggttgccgggctgctgaatgtggtgatcttcccgaccggacgtcattatctggcaccttctgacaagctggatcataaagtggcgaagattttacaagtgccgaacgccacccgttcccgcattggtcgcggtcagtacctgacgccgagcgagcataatccggttggcttgctggaagaggcgctggtggatgtgattgccgccgacccaattcatcagcggatctgtaaagagctgggtaaaaacctgccgtttacccgtctggatgaactggcgcacaacgcgctggtgaaggggctgattgataaagatgaagccgctattctggtgaaagctgaagaaagccgtctgcgcagtattaacgttgatgactttgatccggaagagctggcgacgaagccggtaaagttgccggagaaagtgcggaaagttgaagccgcgtaa

SEQ ID NO: 35591 - protein, 826 aa, Escherichia coli
MVRPPTSKGLFVMMILSILATVVLLGALFYHRVSLFISSLILLAWTAALGVAGLWSAWVLVPLAIILVPFNFAPMRKSMISAPVFRGFRKVMPPMSRTEKEAIDAGTTWWEGDLFQGKPDWKKLHNYPQPRLTAEEQAFLDGPVEEACRMANDFQITHELADLPPELWAYLKEHRFFAMIIKKEYGGLEFSAYAQSRVLQKLSGVSGILAITVGVPNSLGPGELLQHYGTDEQKDHYLPRLARGQEIPCFALTSPEAGSDAGAIPDTGIVCMGEWQGQQVLGMRLTWNKRYITLAPIATVLGLAFKLSDPEKLLGGAEDLGITCALIPTTTPGVEIGRRHFPLNVPFQNGPTRGKDVFVPIDYIIGGPKMAGQGWRMLVECLSVGRGITLPSNSTGGVKSVALATGAYAHIRRQFKISIGKMEGIEEPLARIAGNAYVMDAAASLITYGIMLGEKPAVLSAIVKYHCTHRGQQSIIDAMDITGGKGIMLGQSNFLARAYQGAPIAITVEGANILTRSMMIFGQGAIRCHPYVLEEMEAAKNNDVNAFDKLLFKHIGHVGSNKVRSFWLGLTRGLTSSTPTGDATKRYYQHLNRLSANLALLSDVSMAVLGGSLKRRERISARLGDILSQLYLASAVLKRYDDEGRNEADLPLVHWGVQDALYQAEQAMDDLLQNFPNRVVAGLLNVVIFPTGRHYLAPSDKLDHKVAKILQVPNATRSRIGRGQYLTPSEHNPVGLLEEALVDVIAADPIHQRICKELGKNLPFTRLDELAHNALVKGLIDKDEAAILVKAEESRLRSINVDDFDPEELATKPVKLPEKVRKVEAA

SEQ ID NO: 35592 - DNA, 2283 bp, Vibrio cholerae O1 biovar eltor str. N16961
  CDS (1)..(2283): transl_table=11
atgagctctctacgcagaaaatggatcagcgatcccgctttcaaaatgtttaagaaagtgcttcctcctctgtcacaaaccgagaaagaagcgatggaagcgggcagtgtatggtgggatggcgaactgttctctggtaagcctgatttcaccaagctgcaccattatccgaaaccgaccttgtcagcggaggagcaatctttcatcgacaacgagttggaaactctgctcgctatgttggatgactacaagatagtcaaacaagatcgcgatctccccaaagaggtgtgggactacctacgtaaagagcgtttcttctcgctgattatttccaaagagtatggtggccgtgagttctcggctctggcgaactcgaccatagtgtcacgcattgctacgcgcagcatcagcaccgcagtaacagtcatggtaccgaactcattgggccctggtgagctgttgtcacactacggtacccaagagcagaaagattactggctgccacgtttggccgatggcaccgatattccttgctttgcattgacagggccggaagcgggttcggatgcgggcagcattcctgaccaaggcgtggtctgctacggcaagcatgaaggcaaagacgtgctgggcatccgtttaagctggaacaagcgttacatcacgctggcaccagtggcgactgtgctgggtcttgctttcaaactgagtgatccagagcatctgcttggcgataaagaagagattggtattacttgtgcgctaatccctgcctcccatgaaggcgtagagattggcgaacgccacgacccactaggtttggcctttatgaacggcccaacccgtggccaagatgtgtttatcccaatggattggctgattggtggggcggattacgcaggtaaaggctggcgcatgttggtggagtgtctctcggcaggacgtgggatctccctacctgcattgggtaccgcgattggccacctcaccgctcgtaccacaggcgcatatggttatgtgcgtaagcagtttgggatgtcgattggtaaatttgaaggtgtggcggaagccatgggacgtatcggcggtttaacctacttgctggaagcgacccgtactttgaccaccacctctttggatctcaaagagaaaccagggattgtcacggcgattgccaaataccacatgacggaaatcgcgcgcaccattttgaatgatgcgatggatatccattctggtcgtgctatccaagatggaccaatgaactatctggcgacgcactatctcggcgtacccgtggcaatcacggttgaaggggcgaacattttgacgcgtaacctgatgatcttcggtcaaggtgcgactcgttgccatccttatgttctcaaagagatggaagcggcggccaacccagatcaacaagaaggggcaaaagcgtttgatgaactgctgttcaagcacattgcccacgcgaccaaaaacagctttggtgctctgtttgccgcactgacgggttcacgctttattaaagcgaacatgagtggccccacacaagactactataagcagatgactcgcctgagccgcgctttagcggtgagtgcggatgtggcaatgctcaccttgggtggcgagctcaaacgtaaagagatgatttcagcacgcttaggcgatgcactgagctatctatacatgggctcggcggtactgaaaaagtatgaagatgaaggccgccatcaagcggatttagactacgtacactatgcgatgcagtactgtttgcatcacgcagcgaaatcgcttaaccaagcgtatcgtaactaccctgtgactggggtcggagccatcttgaaagggctgctgttcccgctaggcaaccactttgcaccaccgagtgatgagttagcggttaaactcgcagaaagtctgatgacccctggagcgcatcgtgatcgtttaaccgcgctgtgctacataggtaaaggtgaagatgacagcgtaggcttgatggaaaaagcgtttttggccatgtatagcgttaaaggcttagagcgtaaactgcaacaaggggtgaaagagggcaaagtggcgcgtaaaggactactggttgatcgcttggcacaagcagagcaagcgggtgtgttgagcgcagatgaagtggcttcgatactggcggcagaaaaactgcgtagccgtgcgattcaggtcgatcatttcagccatgatttctcgcaaatccatacccatcagaccaccaaacctaagttaaacagtgtggcataa

SEQ ID NO: 35593 - protein, 760 aa, Vibrio cholerae O1 biovar eltor str. N16961
MSSLRRKWISDPAFKMFKKVLPPLSQTEKEAMEAGSVWWDGELFSGKPDFTKLHHYPKPTLSAEEQSFIDNELETLLAMLDDYKIVKQDRDLPKEVWDYLRKERFFSLIISKEYGGREFSALANSTIVSRIATRSISTAVTVMVPNSLGPGELLSHYGTQEQKDYWLPRLADGTDIPCFALTGPEAGSDAGSIPDQGVVCYGKHEGKDVLGIRLSWNKRYITLAPVATVLGLAFKLSDPEHLLGDKEEIGITCALIPASHEGVEIGERHDPLGLAFMNGPTRGQDVFIPMDWLIGGADYAGKGWRMLVECLSAGRGISLPALGTAIGHLTARTTGAYGYVRKQFGMSIGKFEGVAEAMGRIGGLTYLLEATRTLTTTSLDLKEKPGIVTAIAKYHMTEIARTILNDAMDIHSGRAIQDGPMNYLATHYLGVPVAITVEGANILTRNLMIFGQGATRCHPYVLKEMEAAANPDQQEGAKAFDELLFKHIAHATKNSFGALFAALTGSRFIKANMSGPTQDYYKQMTRLSRALAVSADVAMLTLGGELKRKEMISARLGDALSYLYMGSAVLKKYEDEGRHQADLDYVHYAMQYCLHHAAKSLNQAYRNYPVTGVGAILKGLLFPLGNHFAPPSDELAVKLAESLMTPGAHRDRLTALCYIGKGEDDSVGLMEKAFLAMYSVKGLERKLQQGVKEGKVARKGLLVDRLAQAEQAGVLSADEVASILAAEKLRSRAIQVDHFSHDFSQIHTHQTTKPKLNSVA

SEQ ID NO: 35594 - DNA, 2445 bp, Vibrio cholerae O1 biovar eltor str. N16961
  CDS (1)..(2445): transl_table=11
atggaaatcttgctctctaccttaatcatgctcttgatactcggcgcatgcctgtatcaaagaacatccctatttacctcattagcagcactgactttcaccatgctagcgctttcactgtttgggcctgttggctttttcggttgggcgctctatttggcggccgtcgtcgtgctctgtctgccatccgttcgccaatcgttgatcagtggtaaagcattagcagtgtttaaaaaagtactgcccgcgatgtcacagaccgagaaagaagccctcgaggccggaacagtttggtgggaagccgaactgtttaaaggcaagccggactggaaaaagctgcacaatatccaagctccgaagctgtctgctgaagaacaagccttcctggatggcccagtcaatgaagtgtgtgccatggttagcgactaccaagtcacccatgaactggcagatttaccgccagaagtgtggactttcctcaaagagaagaaattcttcgccatgatcatcaaaaaacagtatggcggcttagaattttcagcttatgcacaatctttggtgctgcaaaaactgaccggtgtttctggtgttctctcctcaaccgtaggcgtacctaactctttaggccccggtgagctgctgcaacattacggtaccgaagagcagaaaaactattacttacctcgcttagcggaaggcaaagagatcccctgttttgctttaaccagcccagaagccggttcagacgcaggttctatccctgatttcggtgtagtttgtaaaggacaatgggaaggcaaagaagttctaggtatgcgcctgacgtggaacaagcgctacatcactctcgcaccggtggcgactgtgctggggcttgcctttaaactgcgcgaccctgaaggactgctcggtgataaagaagagctcggcattacctgtgccttgattccaacgcatcttaaaggcgtggagatcggcaatcgccacttcccactcaacgtgcctttccaaaacggtccaacccgtgccaaagatctgtttgtgccgctggatttcatcatcggtggtccaaaaatggcaggccaaggctggcgcatgttggtggaatgtctttcggtgggacgcggtattaccctaccttccaactcaaccggcggcattaaaactgcggcactcgctacaggtgcttatgcgcgtattcgccgccagttcaaacaacctatcggtcagatggaaggaattgaagagccattagcgcgcctagccggtaacgcttatgtgatggatgcagcaagcaacctgactgtcgcgggtatcgatctcggtgaaaagccttcggtaatttctgcgatcgtaaaatatcactgtacccaccgcggacaacgctcaattattgatgcgatggacattgtcggcggtaaaggcatctgtttaggccccgctaacttcctcgctcgcgggtatcaaggtgctccaattgccgttaccgtagaaggcgcgaacattcttacccgctcgatgatcatctttggtcaaggtgcgattcgctgccatccttatgtactcagagaaatggaagcggcttatagcccaaattctgatgcggtagaaaaatttgatagtgccctagcaggacacgttggctttgtgctcagcaacttagtgcgcagcctatggcttggtttgactgatggttatggttcacaagcaccaacccgtgatgcgaccaagcgctactaccaacagcttaatcgttacagtgctaacttggccctgcttgcggatatctccatggcagtattgggcggttcactcaaacgtagagagcgtctctctgcccgtttaggggatattctgagccagctttacttaagctcagcgaccttaaaacgttttgaaaacgatggccgtccagccgaagatttaccactggtccattggggcttacaagatagtttgcgccaaactgaaatcgccattgatgagttcttggctaacttcccaaatcggattattggccgcgcattacgtgtactcatgatgcctttcggccgtgtgcgtaaagcgccaagtgacaagctcgatagcaagctcgcgcagatcttgcaaaccccgagtgaaacacgttcaagaattggtcgtcaccaatacttaacaccgagtgataacaatcctgcgggtaagatagaacaagcgttgaatgtgattttacaagctgagccgctgtttgaaaaagcgtgcaaagcgcttggtcaacgccgcccatttatggggttggatgaagtcgccaagctgggcttagaagccaaagtgctgaccattcaggaagcggcactgctgagcgaagcggaagcgcatcgtctctacaccatcaatgtcgatgactttgccccacaagagctggccgcaaaaaagcgcacacaacgtaaagctgaagtggcttaa

SEQ ID NO: 35595 - protein, 814 aa, Vibrio cholerae O1 biovar eltor str. N16961
MEILLSTLIMLLILGACLYQRTSLFTSLAALTFTMLALSLFGPVGFFGWALYLAAVVVLCLPSVRQSLISGKALAVFKKVLPAMSQTEKEALEAGTVWWEAELFKGKPDWKKLHNIQAPKLSAEEQAFLDGPVNEVCAMVSDYQVTHELADLPPEVWTFLKEKKFFAMIIKKQYGGLEFSAYAQSLVLQKLTGVSGVLSSTVGVPNSLGPGELLQHYGTEEQKNYYLPRLAEGKEIPCFALTSPEAGSDAGSIPDFGVVCKGQWEGKEVLGMRLTWNKRYITLAPVATVLGLAFKLRDPEGLLGDKEELGITCALIPTHLKGVEIGNRHFPLNVPFQNGPTRAKDLFVPLDFIIGGPKMAGQGWRMLVECLSVGRGITLPSNSTGGIKTAALATGAYARIRRQFKQPIGQMEGIEEPLARLAGNAYVMDAASNLTVAGIDLGEKPSVISAIVKYHCTHRGQRSIIDAMDIVGGKGICLGPANFLARGYQGAPIAVTVEGANILTRSMIIFGQGAIRCHPYVLREMEAAYSPNSDAVEKFDSALAGHVGFVLSNLVRSLWLGLTDGYGSQAPTRDATKRYYQQLNRYSANLALLADISMAVLGGSLKRRERLSARLGDILSQLYLSSATLKRFENDGRPAEDLPLVHWGLQDSLRQTEIAIDEFLANFPNRIIGRALRVLMMPFGRVRKAPSDKLDSKLAQILQTPSETRSRIGRHQYLTPSDNNPAGKIEQALNVILQAEPLFEKACKALGQRRPFMGLDEVAKLGLEAKVLTIQEAALLSEAEAHRLYTINVDDFAPQELAAKKRTQRKAEVA

SEQ ID NO: 35596 - DNA, 2481 bp, Escherichia coli O157:H7 EDL933
  CDS (1)..(2481): transl_table=11
gtggtcagacctcctacaagtaaggggcttttcgttatgatgattttgagtattctcgctacagttgtcctgctcggcgcgttgttctatcaccgcgtgagcttatttatcagcagtctgattttgctcgcctggacagctgccctcggcgtcgctggtctgtggtcggcgtgggtactggtgcctctggccattatcctcgtgccgtttaactttgcacctatgcgtaagtcgatgatttccgcgccggtatttcgcggtttccgtaaggtgatgccgccgatgtcgcgcactgagaaagaagcgattgatgcgggtaccacctggtgggaaggcgacttgttccagggcaagccggactggaaaaagctgcataactatccgcagccgcgcctgaccgcagaagagcaagcgtttctcgacggcccggtagaagaagcctgccggatggcgaatgatttccagatcacccatgaactggcggatctgccgccggagttgtgggcgtatctgaaagagcatcgcttcttcgcgatgatcatcaaaaaagagtacggcggcctggagttttcagcttatgcccagtctcgtgtgctgcaaaaactctccggcgtcagcgggatcctggcgattaccgtcggcgtgccgaactcattaggccccggcgagctgctgcaacattacggcactgacgagcagaaagatcactatctgccgcgtctggcgcgtggtcaggagatcccttgctttgcactgaccagcccggaagcgggttccgatgcgggcgcgattccggacaccgggattgtctgcatgggcgaatggcagggccagcaggtgctggggatgcgtctgacctggaacaaacgctacattacgctggcaccgattgcgactgtgcttgggctggcgtttaaactctccgacccggagaaattactcggcggtgcagaagatttaggtattacctgtgcgctgatcccgaccaccacgccgggcgtggaaattggtcgtcgccacttcccgctgaatgtgccgttccagaacggaccgacgctcggtaaagatgtcttcgtaccgatcgactacattatcggcgggccgaaaatggccgggcaaggctggcggatgctggtggagtgcctctcggtaggccgcggcatcaccctgccttccaactcaaccggcggcgtgaaatcggtagcgctggcaacgggcgcgtatgctcacattcgccgtcagttcaaaatctctatcggtaagatggaagggattgaagagccgctggcgcgtattgccgggaacgcttatgtaatggacgctgcggcatcgctgattacctacggcattatgctcggcgaaaaacctgccgtgctgtcggctatcgttaagtatcactgtacccaccgcgggcagcagtcgattattgatgcgatggatattaccggcggtaaaggcattatgctcgggcaaagcaacttcctggcgcgtgcttaccagggcgcaccgattgccatcaccgttgaaggggctaacattctgacccgcagcatgatgatcttcggacaaggagcgattcgttgccatccgtacgtgctggaagagatggaagcggcgaagaacaatgacgtcaacgtgttcgataaactgttgttcaaacatatcggtcacgtcggtagcaacaaagttcgcagcttctggctgggcctgacgcgcggtttaaccagcagcacgccaaccggcgatgccactaaacgctactatcagcacctgaaccgcctgagcgccaacctcgccctgctttctgatgtctcgatggcagtgctgggcggcagcctgaaacgtcgtgagcgtatctcggcacgtctgggtgatattttaagccagctttacctcgcctctgccgttctgaagcgttatgacgacgaaggccgtaatgaagccgatctgccgctggtgcactggggcgtacaggatgcgctgtatcaggcagaacaggcgatggacgatttactgcaaaacttcccgaaccgcgtggttgccgggctgctgaatgtggtgatcttcccgaccggacgtcattatctggcaccgtctgacaagctggatcataaagtggcgaagattttacaagtgccgaacgccactcgctcacgtattggtcgcggtcagtacctgacgccaagcgagcataacccggttggtttactggaagaggcgttggtggatgtgattgccgccgacccgattcatcagcggatctgtaaagagctcggtaaaaatctgccatttacccgtctggatgaactggcgcacaacgcgctggcgaaggggctgattgataaagatgaagccgctattctggtgaaagcggaagaaagccgtctgcgcagtattaacgttgatgactttgatccggaagagctggcgacgaagccggtaaagttgccggagaaagtgcggaaagttgaagccgcgtaa

SEQ ID NO: 35597 - protein, 826 aa, Escherichia coli O157:H7 EDL933
MVRPPTSKGLFVMMILSILATVVLLGALFYHRVSLFISSLILLAWTAALGVAGLWSAWVLVPLAIILVPFNFAPMRKSMISAPVFRGFRKVMPPMSRTEKEAIDAGTTWWEGDLFQGKPDWKKLHNYPQPRLTAEEQAFLDGPVEEACRMANDFQITHELADLPPELWAYLKEHRFFAMIIKKEYGGLEFSAYAQSRVLQKLSGVSGILAITVGVPNSLGPGELLQHYGTDEQKDHYLPRLARGQEIPCFALTSPEAGSDAGAIPDTGIVCMGEWQGQQVLGMRLTWNKRYITLAPIATVLGLAFKLSDPEKLLGGAEDLGITCALIPTTTPGVEIGRRHFPLNVPFQNGPTLGKDVFVPIDYIIGGPKMAGQGWRMLVECLSVGRGITLPSNSTGGVKSVALATGAYAHIRRQFKISIGKMEGIEEPLARIAGNAYVMDAAASLITYGIMLGEKPAVLSAIVKYHCTHRGQQSIIDAMDITGGKGIMLGQSNFLARAYQGAPIAITVEGANILTRSMMIFGQGAIRCHPYVLEEMEAAKNNDVNVFDKLLFKHIGHVGSNKVRSFWLGLTRGLTSSTPTGDATKRYYQHLNRLSANLALLSDVSMAVLGGSLKRRERISARLGDILSQLYLASAVLKRYDDEGRNEADLPLVHWGVQDALYQAEQAMDDLLQNFPNRVVAGLLNVVIFPTGRHYLAPSDKLDHKVAKILQVPNATRSRIGRGQYLTPSEHNPVGLLEEALVDVIAADPIHQRICKELGKNLPFTRLDELAHNALAKGLIDKDEAAILVKAEESRLRSINVDDFDPEELATKPVKLPEKVRKVEAA

SEQ ID NO: 35598 - DNA, 2508 bp, Ralstonia solanacearum GMI1000
  CDS (1)..(2508): transl_table=11
atgacgatctggatcggcctgctctgcatcggcgcgctcgggctcgccagcatggaagccccggcgctggcgtggctggcgggcacggccgcctggctcgcggccggcgcgtggctcggcctggcgggcccggtggcgactgccgtgctggccgttgtgctggtgctgcccgccctgctgctcacgctcaagccgctgcgccgcgcgctggtcacgcggccggtactggcgacgttccgcgcgatcctgccggagatgtcgcaaaccgagcgcgacgccatcgaagccggcacggtgtggtgggatgccgaactgttctccggccgccccgactggaaacggctgcgcgcggccccggcgccacggctgacgccggaggagcaagccttcctcgacatcgagaccgggaagctgtgcgacctcgccaacgactgggagagcacgcaggtctggcaggacctgtcgcccgaagcgtgggcctatgtcaagcaggccggcttcctcggcatgatcatccccagggaatacggcggcaaagggttctcggcctatgcgcactcgcaggtggtgatgaagctggcgacgcgctgttcggcggcggcggtgtcggtgatggtgccgaactcgctgggcccggccgagctgctgctgcactacggcaccgacgcgcagaaggcctactacctgccgcgcctggcgcgcggcgaggagatcccctgcttcgcgctgaccaacgcctacgccggctcggacgccgccgccatccccgatgtgggcgtggtctgccgcggcctgcacgagggccgcgagacgctcggcctgcgcgtgacctggagcaagcgctatatcacgctcgggccgatcgcgacggtgctggggctggccttccgcgtggtcgatccggacggcctgctgggcgacgacaaggcgcccggcatcacctgcgcgctgatcccgacgcggcatccgggcgtcaacatcggccgccgccactggccgctcaacgcggtgttccagaacggcccgaactggggcaaggatgtgttcatcccgatcgactgggtgatcggcgggcaggcgcaggtggggcgcggctggcgcatgctgatggaatgcctggcggcgggccgcgcgatctcgctgccgtcgtccaacgtcgggatggccaagctggcggtgcgcgcgaccggcgcctatgccgccgtgcgccggcagttccgcacgcccatcgggcagttcgagggcatccgggaggcgctgggccgcatgggcggcaacctctacacgatggatgcggcgcgccggctgtcggcgctggcggtggacctgggcgagaagccgtcggtcatctccgccatggccaagtaccacgtcaccgagcgcgcccgcgacgtgatcaacgatgccatggacatcgtcggcggcaagggcatctgcatggggccgaacaacttcctggcgcgcgcgtaccagcagattccgatcgccatcacggtggagggcgccaacatcatgacgcgctgcctgatcatcttcggccagggcgtgatccgctgccacccgtacgtgctgcgcgagatgacggccgcgcaaggcgccgattcgcccgcgagcctgcgcgccttcgacgcggcgctgttcggccacggcgccttcgtcgccggcaacctggtgcgtgcgctgctgcatgcgctgtcgggcgggcgcgcgacggcggcgccatcggatgccgcgccggcgctgcgccgctactaccgggccgtcaaccgcttctcgaccgcgctggcgctgctggccgatgtgtcgatgttcacgctgggcggcacgctcaagcgccgcgagagcctcaccggacggctgggcgacatcctctcgcagctgtacctggtgagcgccgtgctcaagcgctttgaagacgacggccggccagccgacgatgcggcgctggcgcactggtcggcgcaggacgcgctggcccgcgcctacgacgcgctcgacggcgtcctggcgaacttcccgaaccgcgccgtggccggcgtgctgcgcatgctgaccttcccgttcggctcgccgtatcgccggccggcggatgcgctgtcggcgcggatcgccgagctggtgcagacgccgggcgcgacgcgcgatcgcctggtcgccgattcatactgcccggcgcccgagactgacccgatcgcctacggagaagccgccttccgcttgcagccggcggtcgatgcgatcgagcggcgcttgaaacccgccatccgcgcgggcaagcttgcgcccgtgccgcagagcctgcccgagttcgaagcgtggaccgcgcaggccctggcgcaacacctgatcgacgaggaagagcgcgcccgcctctgcgactatgcccgctatggcgagcacgccgtcgccgtggacgacttcccgcccgacttcaacctgctggccgacctgcagcgccgcaaggccgcgctggaggccctgcaagcggccgggcagcatgccgcctga

SEQ ID NO: 35599 - protein, 835 aa, Ralstonia solanacearum GMI1000
MTIWIGLLCIGALGLASMEAPALAWLAGTAAWLAAGAWLGLAGPVATAVLAVVLVLPALLLTLKPLRRALVTRPVLATFRAILPEMSQTERDAIEAGTVWWDAELFSGRPDWKRLRAAPAPRLTPEEQAFLDIETGKLCDLANDWESTQVWQDLSPEAWAYVKQAGFLGMIIPREYGGKGFSAYAHSQVVMKLATRCSAAAVSVMVPNSLGPAELLLHYGTDAQKAYYLPRLARGEEIPCFALTNAYAGSDAAAIPDVGVVCRGLHEGRETLGLRVTWSKRYITLGPIATVLGLAFRVVDPDGLLGDDKAPGITCALIPTRHPGVNIGRRHWPLNAVFQNGPNWGKDVFIPIDWVIGGQAQVGRGWRMLMECLAAGRAISLPSSNVGMAKLAVRATGAYAAVRRQFRTPIGQFEGIREALGRMGGNLYTMDAARRLSALAVDLGEKPSVISAMAKYHVTERARDVINDAMDIVGGKGICMGPNNFLARAYQQIPIAITVEGANIMTRCLIIFGQGVIRCHPYVLREMTAAQGADSPASLRAFDAALFGHGAFVAGNLVRALLHALSGGRATAAPSDAAPALRRYYRAVNRFSTALALLADVSMFTLGGTLKRRESLTGRLGDILSQLYLVSAVLKRFEDDGRPADDAALAHWSAQDALARAYDALDGVLANFPNRAVAGVLRMLTFPFGSPYRRPADALSARIAELVQTPGATRDRLVADSYCPAPETDPIAYGEAAFRLQPAVDAIERRLKPAIRAGKLAPVPQSLPEFEAWTAQALAQHLIDEEERARLCDYARYGEHAVAVDDFPPDFNLLADLQRRKAALEALQAAGQHAA

SEQ ID NO: 35600 - DNA, 2475 bp, Xanthomonas campestris pv. campestris str. ATCC 33913
  CDS (1)..(2475): transl_table=11
atgagcatcgttgcaccgttcctcctcgtcatcctggcggcgggcatcgctgcctatcaccgcatgcgccttgccacgtgggtcgcgctgagcgcctgcgtgctggtggcgtgctggctgttgggggccaacctcaccgccaccatcgttgcagccgcgctggtcgtgctgattgcagcgccggtgttgttgccgttcctgcgcaagccactgctgaccacgccgttgatggcgttcttccgcaaggtgctgccgccgctctcgcagaccgagcgcattgcgctggaaaccggctcggtcggtttcgagggcgagctgttcaccggtgatccggactggcagaagttgctcaactatcccaagccgcagttgaccgccgaagagcaggcgttcctggatggcccggtggaagagctgtgcaagatggtcaacgactgggaaatcacccatgtccacgctgacctgccgccggagctgtgggattacatcaagaagcacaagttcttcggcatgatcattccgaagcaatacggcggcttgggtttcagtgcgctggcgcaccacaaggtgatccagaagctgtcgtcgatctccagcgtggtcagttccaccgtcggtgtgccgaactcgctcgggccgggtgagctgctgctgcattacggcacgccggaacagaaggattattacctgccgcgtctggcggtgggtgccgaggtgccgtgcttcggcctgacgggcccgttcgcaggctccgatgccacgtcgattccggattacggcatcgtctgcaagggcgagtggaacggcgccaacgtgctcggcgtcaagctcaccttcgacaagcgttacatcaccctggcgccggtggcgtcgctgatcggtctggcgttccgcgcctatgatccggacggcctgatcggtgacaagaaggacatcggcatcaccctggcgctgctgccgcgcgacacccccggggtggagatcggccgtcgccacttcccgttgaattcgccattccagaatggcccgatccatggcgaagaagtgttcattccgctgagccagttgatcggcggcgtggagatggtcggcaagggctggaacatgctcaacgagtgcctcgccgtgggccgctcgatcactctgccctccaccgccagtggcggcggcaagtacgcggcggtggtgaccggtgcgtacgcacgcatccgcaagcagttcggcctgtcggttggccgtttcgagggcgtggaagaagcgctggcgcgtatcggcggcaaggcgtatgcgatcagcgcactggcgcaggccactgccgcagcggttgatcgtggcgatgtaccgtcggtgccgtcggcgattgccaagtaccactgcaccaccatgggccgcgaagtggtcagcgacatgatggatgtgatcggcggcaagggcatcatcctggggccgcgcaacttcgccggccgcgcctggcaggccgcaccgatcggtgtgaccgtggaaggcgccaacatcatgacccgcagcctgctgatcttcggccagggcgcgatcctgtgccatccgtgggtgatgaaggaaatgaaggcggcgcaggatccggatacgcgtcgcggcctggaagagttcgaccagagcctgttcggccatatccgcttcggtatctccaacgccgtgcgctcgttctggttcggcctgaccggtgcgcgcatcggtgcggcgccgggcgatgcgtacacgcgtcggttcttccgcaagctggatcgttattcggccaacctggccctgatggccgacgtgtcgatgctgatgctgggcggcaagttgaagttcaaggagtcgctgtccggtcgcctgggcgatgtgctgagccatatctacatgaccagcgcgatgctcaagcggtatcacgacgaaggcgcaccggcgaccgatcagccgctgctggcctgggccttccacgacagcgtgcacaagatcgaaaccgcgctgtcggcggcactgcgtaacttcccgatccgcccggtgggctggctgatgtgggtgctgatcttcccgctgggccgccgtgccgaagcaccgggcgaccgcctgggccatcgtgtggcatcgatcctgatggcacctaacgaagcacgcgatcgcttggcacagggcgtcttcctcacaccatgcgccaacaatccgggcggccgtatcgccagctacctgaccaaggccgtgatggccgagccggtggaacgcaagttcctgaaggcgctcaagaccaagggtatcgaggcgttggatttcccggcgcagctggacgaagccgtggccgagggcgtgctcaccctggacgagcgcaagctgctggaagagctgcgcgagatcatgatggacacgatcaccgtggacgatttcgatccgcacgaactgcgcgcggccagcttctacgacaagccgcaggcacagcagccgcgcgaagccgcgtaa

SEQ ID NO: 35601 - protein, 824 aa, Xanthomonas campestris pv. campestris str. ATCC 33913
MSIVAPFLLVILAAGIAAYHRMRLATWVALSACVLVACWLLGANLTATIVAAALVVLIAAPVLLPFLRKPLLTTPLMAFFRKVLPPLSQTERIALETGSVGFEGELFTGDPDWQKLLNYPKPQLTAEEQAFLDGPVEELCKMVNDWEITHVHADLPPELWDYIKKHKFFGMIIPKQYGGLGFSALAHHKVIQKLSSISSVVSSTVGVPNSLGPGELLLHYGTPEQKDYYLPRLAVGAEVPCFGLTGPFAGSDATSIPDYGIVCKGEWNGANVLGVKLTFDKRYITLAPVASLIGLAFRAYDPDGLIGDKKDIGITLALLPRDTPGVEIGRRHFPLNSPFQNGPIHGEEVFIPLSQLIGGVEMVGKGWNMLNECLAVGRSITLPSTASGGGKYAAVVTGAYARIRKQFGLSVGRFEGVEEALARIGGKAYAISALAQATAAAVDRGDVPSVPSAIAKYHCTTMGREVVSDMMDVIGGKGIILGPRNFAGRAWQAAPIGVTVEGANIMTRSLLIFGQGAILCHPWVMKEMKAAQDPDTRRGLEEFDQSLFGHIRFGISNAVRSFWFGLTGARIGAAPGDAYTRRFFRKLDRYSANLALMADVSMLMLGGKLKFKESLSGRLGDVLSHIYMTSAMLKRYHDEGAPATDQPLLAWAFHDSVHKIETALSAALRNFPIRPVGWLMWVLIFPLGRRAEAPGDRLGHRVASILMAPNEARDRLAQGVFLTPCANNPGGRIASYLTKAVMAEPVERKFLKALKTKGIEALDFPAQLDEAVAEGVLTLDERKLLEELREIMMDTITVDDFDPHELRAASFYDKPQAQQPREAA

SEQ ID NO: 35602 - DNA, 2475 bp, Xanthomonas axonopodis pv. citri str. 306
  CDS (1)..(2475): transl_table=11
atgagcatcattgcaccgttcctcctcgtcatcctggcggcgggtatcgctgcctatcaccggatgcgccttgccacgtgggttgcgatcagcgcctgtgtgctggtggcgtgctggctgctgggtgccaatctcaccgccaccatcgtggccgccgcgctggtggtgctgatctccgcaccagtgctgctgccgttcctgcgcaagccgctgctgaccacgccactgatgggcttcttccgcaaggtgctgccgccgctgtcgcagaccgagcgcatcgcactggaaaccggctcggtcggtttcgaaggagagctgttcaccggcgatccggattggcagaagctgttgaactatcccaagccgcaactcaccgccgaggagcaggccttcctggatggcccggtggaagagctatgcaagatgatcaacgactgggaaatcacccacgtccacgccgacctgccgccggagctgtgggacttcatcaagaagaacaagttcttcggcatgatcattcccaagcagtatggcggcctgggtttcagcgcgctggcgcaccacaaggtgatccagaagctgtcttcgatctccagcgtggtcagctccaccgtcggcgtgcccaactcgctcggccccggtgagctgctgctgcattacggtacccccgaacagaaggactactacctgccgcggctggcggtcggtgcggaagtgccgtgcttcggcctgaccggtccgttcgccggctccgatgccacctcgattccggattacggcatcgtttgcaagggcgagtggaatggcgccaacgtgctgggcgtcaagctcaccttcgacaagcgctacatcaccctggcaccggtcgcctcgctgatcggcctggcgttccgcgcctacgatccggatggtctgattggcgacaagaaggacatcggcatcaccctggcgctgctgccgcgcgaaaccccgggcgtggaaatcggccgccgccatttcccgttgaattcgccgttccagaacggcccgatccatggcgaagaggtgttcatcccgctgagccagctgatcggtggcgtggagatggtcggcaagggctggaacatgctcaacgagtgtctggctgttggccgttcgatcaccctgccctccaccgccagcggcggcagcaaggccgcagcggtggtcaccggtgcgtatgcgcgtatccgcaagcaattcggcctgtcggtcggccgtttcgagggcgtggaagaagcgctggcccgtatcggcggcaaggcctatgcgatcagtgcgctgtcgcaggccacggccgcggcggtggatcgcggcgatgtgccgtcggtgccctcggcgattgccaagtaccactgcaccaccatgggccgcgaagtggtcagcgacatgatggacgtgatcggcggcaagggcatcatcctggggccccgcaacttcgccggccgcgcctggcaggccgcgccgatcggcgtgaccgtggaaggcgccaacatcatgacccgcagcctgctgatcttcggccagggcgccatcctgtgccatccgtgggtgttgaaggaaatgcaggccgcgcaggatcccgatacccgtcgtggtctggagcagttcgaccagagcctgttcggtcatatccgcttcggcatttccaacgcggtgcgctcgttctggttcggcctgaccggtgcgcgtctcggtgcggcgccgggcgatgcgtatacccgtcggttcttccgcaagctggatcgctattcggccaacctggccttgatggccgacgtgtcgatgctgatgctgggcggcaagttgaagttcaaggaatcgctgtccggtcgcttgggcgatgtgctgagccatatctacatgaccagcgcgatcctcaagcgttatcacgacgagggcgcaccggcgagcgaccagccgctgctggcctgggccttccacgacagcgtgcacaagatcgaaaccgcgctgtcggcggcgctgcgcaacttcccgatccgcccggtgggctggttgatgtgggtgctgatcttcccgttgggccgtcgcgccgaagcgcctggcgatcgcctcggccatcgcgtggcttcgctgttgatgacgcccaacgaggcgcgcgaccgtctggccaagggcgtgttcctgacgccgtgcgccaacaatccgggcggccgtatcgccagctacctgaccaaggcggtgatggccgaaccggtggagcgcaagttcctgaaggcgctcaagaccaagggcatcgaagcgctggatttcccggcgcagctggacgaagccgtggccgaaggcgtgatcagcatggaagagcgcaaactgctggaggagctgcgcgagatcatgatggacaccatcaccgtggacgacttcgatccgcatgaattgcgtgcggccagcttctacgacaagccgcaggtgcaacagccacgcgaagccgcgtaa

SEQ ID NO: 35603 - protein, 824 aa, Xanthomonas axonopodis pv. citri str. 306
MSIIAPFLLVILAAGIAAYHRMRLATWVAISACVLVACWLLGANLTATIVAAALVVLISAPVLLPFLRKPLLTTPLMGFFRKVLPPLSQTERIALETGSVGFEGELFTGDPDWQKLLNYPKPQLTAEEQAFLDGPVEELCKMINDWEITHVHADLPPELWDFIKKNKFFGMIIPKQYGGLGFSALAHHKVIQKLSSISSVVSSTVGVPNSLGPGELLLHYGTPEQKDYYLPRLAVGAEVPCFGLTGPFAGSDATSIPDYGIVCKGEWNGANVLGVKLTFDKRYITLAPVASLIGLAFRAYDPDGLIGDKKDIGITLALLPRETPGVEIGRRHFPLNSPFQNGPIHGEEVFIPLSQLIGGVEMVGKGWNMLNECLAVGRSITLPSTASGGSKAAAVVTGAYARIRKQFGLSVGRFEGVEEALARIGGKAYAISALSQATAAAVDRGDVPSVPSAIAKYHCTTMGREVVSDMMDVIGGKGIILGPRNFAGRAWQAAPIGVTVEGANIMTRSLLIFGQGAILCHPWVLKEMQAAQDPDTRRGLEQFDQSLFGHIRFGISNAVRSFWFGLTGARLGAAPGDAYTRRFFRKLDRYSANLALMADVSMLMLGGKLKFKESLSGRLGDVLSHIYMTSAILKRYHDEGAPASDQPLLAWAFHDSVHKIETALSAALRNFPIRPVGWLMWVLIFPLGRRAEAPGDRLGHRVASLLMTPNEARDRLAKGVFLTPCANNPGGRIASYLTKAVMAEPVERKFLKALKTKGIEALDFPAQLDEAVAEGVISMEERKLLEELREIMMDTITVDDFDPHELRAASFYDKPQVQQPREAA

SEQ ID NO: 35604 - DNA, 2481 bp, Shigella flexneri 2a str. 301
  CDS (1)..(2481): transl_table=11
gtggtcagacctcctacaagtaaggggcttttcgttatgatgattttgagtattctcgctacggttgtcctgctcggcgcgttgttctatcaccgcgtgagcttatttatcagcagtctgattttgctcgcctggacagccgccctcggcgttgctggtctgtggtcggcgtgggtactggtgcctctgaccattatcctcgtgccatttaactttgcgcctatgcgtaagtcgatgatttccgcgccggtatttcgcggtttccgtaaggtgatgccgccgatgtcgcgcactgagaaagaagcgattgatgcgggcaccacctggtgggagggcgacttgttccagggcaagccggactggaaaaagctgcataactatccgcagccgcgcctgaccgctgaagagcaagcgtttctcgacggcccggtagaagaagcctgccggatggcgaatgatttccagattactcatgagctggcggatctgccaccggagttgtgggcgtaccttaaagagcatcgcttcttcgcgatgattatcaaaaaagagtacggcggactggagttctcagcttatgcccagtctcgtgtgctgcaaaaactctctggcgtgagcgggatcctggcgattaccgtcggcgtgccaaactcattaggcccgggcgaactgttgcaacattacggcactgacgagcagaaagatcactatctgccgcgtctggcgcgtggtcaggagatcccctgctttgcactgaccagcccggaagcgggttccgatgcgggcgcgattccggacaccgggattgtctgcatgggcgaatggcagggccagcaggtgctggggatgcgtctgacctggaacaaacgctacattacgctggcaccgattgcgaccgtgcttgggctggcgtttaaactctccgacccggaaaaattactcggcggtgcagaagatttaggcattacctgtgcgctgatcccaaccaccacgccgggcgtggaaattggtcgtcgccacttcccgctgaacgtaccgttccagaacggaccgacgcgcggtaaagatgtcttcgtgccgatcgattacatcatcggcgggccgaaaatggccgggcaaggctggcggatgctggtggagtgcctctcggtaggccgcggcatcaccctgccttccaactcaaccggcggcgtgaaatcggtagcgctggcaacgggcgcgtattctcacattcgccgtcagttcaaaatctctatcggtaagatggaagggattgaagagccgctggcgcgtattgccgggaacgcttatgtaatggatgctgcggcatcgctgattacctacggcattatgctcggcgaaaaacctgccgtgctgtcggctatcgttaagtatcactgtacccaccgcgggcagcagtcgattattgatgcgatggatattaccggcggtaaaggcattatgctcgggcaaagcaacttcctggcgcgtgcttaccagggcgcaccgattgccatcaccgttgaaggggctaacattctgacccgcagcatgatgatcttcggacaaggagcgattcgttgccatccgtacgtgctggaagagatggaagcggcgaagaacaatgacgtcaacgcgttcgataaactgttgttcaaacatatcggtcacgtcggtagcaacaaagttcgcagcttctggctgggcctgacgcgcggtttaaccagcagcacgccaaccggcgatgccactaaacgctactatcagcacctgaaccgcctgagcgccaacctcgccctgctttctgatgtctcgatggcactgctgggcggcagcctgaaacgtcgtgagcgtatctcggcacgtctgggggatattttaagccagctttacctcgcctctgccgttctgaagcgttatgacgacgaaggccgtaatgaagccgatctgccgctggtgcactggggcgtacaggatgcgctgtatcaggcagaacaggcaatggacaatttactgcaaaacttcccgaaccgcgtggttgccgggctgctgaatgtggtgatcttcccgaccggacgtcattatctggcaccgtctgacaagctggatcataaaatggcgaagattttacaagtgccgaacgccactcgttcacgtattggtcgcggtcagtacctgacgccaagcgagcataacccggttggtttactggaagaggcgttggtggatgtgattgccgccgacccgattcatcagcggatctgtaaagagctgggtaaaaatctgccatttacccgtctggatgaactggcgcacaacgcgctgacgaaggggctgattgataaagatgaagccgctattctggtgaaagcggaagaaagccgtctgcgcagtattaacgttgatgactttgatccggaagagctggcgacgaagccggtaaagttgccggagaaagtgcggaaagttgaagccgcgtaa

SEQ ID NO: 35605 - protein, 826 aa, Shigella flexneri 2a str. 301
MVRPPTSKGLFVMMILSILATVVLLGALFYHRVSLFISSLILLAWTAALGVAGLWSAWVLVPLTIILVPFNFAPMRKSMISAPVFRGFRKVMPPMSRTEKEAIDAGTTWWEGDLFQGKPDWKKLHNYPQPRLTAEEQAFLDGPVEEACRMANDFQITHELADLPPELWAYLKEHRFFAMIIKKEYGGLEFSAYAQSRVLQKLSGVSGILAITVGVPNSLGPGELLQHYGTDEQKDHYLPRLARGQEIPCFALTSPEAGSDAGAIPDTGIVCMGEWQGQQVLGMRLTWNKRYITLAPIATVLGLAFKLSDPEKLLGGAEDLGITCALIPTTTPGVEIGRRHFPLNVPFQNGPTRGKDVFVPIDYIIGGPKMAGQGWRMLVECLSVGRGITLPSNSTGGVKSVALATGAYSHIRRQFKISIGKMEGIEEPLARIAGNAYVMDAAASLITYGIMLGEKPAVLSAIVKYHCTHRGQQSIIDAMDITGGKGIMLGQSNFLARAYQGAPIAITVEGANILTRSMMIFGQGAIRCHPYVLEEMEAAKNNDVNAFDKLLFKHIGHVGSNKVRSFWLGLTRGLTSSTPTGDATKRYYQHLNRLSANLALLSDVSMALLGGSLKRRERISARLGDILSQLYLASAVLKRYDDEGRNEADLPLVHWGVQDALYQAEQAMDNLLQNFPNRVVAGLLNVVIFPTGRHYLAPSDKLDHKMAKILQVPNATRSRIGRGQYLTPSEHNPVGLLEEALVDVIAADPIHQRICKELGKNLPFTRLDELAHNALTKGLIDKDEAAILVKAEESRLRSINVDDFDPEELATKPVKLPEKVRKVEAA

SEQ ID NO: 35606 - DNA, 2280 bp, Shewanella oneidensis MR-1
  CDS (1)..(2280): transl_table=11
atgttgacgattataattattgccctgattgcgattattgcgctgtttgcagtaaaaagcctcagaatgcaatttattacccaacctgtttttcatttttttaaaaaagtgttaccgccattgtctgataccgagcgcgaagcgatggaagcgggcgatgtatggtgggaaggggagttattccgcggtaatccgaattggaatacgctgcacagctacggcaagccaacgctgacggcagaagagaaggactttattgataatcaggtcatgactgccctgacaatgatcgacgattttgacattgtccataatcgaaaagatttgccgccagagctgtgggattacttcaaaaaagaaggcttttttgcgctgatcattccgaaaaaatttggtggtaaagcgttctcggcttatgccaactcgacgattgtgagcaagttagccagtcgtagcgtgagtgcggcggtaactgtgatggtgcctaactcattaggccctggtgagctattgactcactatggtactgaagagcaaaaagaacgttggctacccgccttagctaagggcgatgaaatcccttgttttgcgttaacgggcccagaagccggcagtgacgcgggcgcaatccctgatgtgggcattgtgtgccgtggcgagtttaacggcgaagaggttttaggccttaaattaacctggaataagcgttatatcaccttagctcccgtggcaacggtattgggtttagcgttccagatgcgcgatcctgacggtctattaggtgagaaaaagaatctcggtattacctgcgcgttgatcccaactgatcatcctggtgtggtaattggtcgtcgtcataatccacttaatatggcctttatgaacggtacaacccaaggcgatgaagtctttattccgctcgattggatcattggcggtccagaatttgcgggcagaggctggcgcatgctggttgaatgtttatcggcggggcggggtatttcgctgcctgcgctggcaacagcttctggccatatggcaaccaaaaccaccacagcatacagttatgtacgccatcaatttggcatggcaattggtcaatttgaaggggtgcaagaagcactggctcggattattgccaatacttaccagctagaagctgcacgtcgtttaaccacaacgggcattgatcttaaagtcaaaccttctgtggtgacggctatcgcgaagttccatatgactgaacttggtcgcgcagtcatgaacgatgcgatggatattcagtcgggtaaggggatccaattaggacctaaaaactacctcggccatccttatatgtcgaatccgatttcgatcaccgtagaaggcgcgaatatccttacccgctcgttgatgatctttggtcaaggcgcgacccgttgtcatccttatgtgctggccgaaatggaagcagcggcaatggaaaatcagcacgatgcgctcacgcgttttgactcgctgttaatgggccatatgggttatgcgacgcgtaacgcgtttagtgcgttattcaacgccctaacagctagtcgttttggtaacgccccagtgagcggagaaaccaaacagtactacaaagatatgtcgcgtttatcttcggcgctcgcctttatgacggacatttcaatgttgattatgggcggcgatttaaaacgcaaggaaatgttgtctgcacggatgggcgatgtattgagtcagttgtacttaggctctgcaacgctaaaactatttgaagacaatggtcgccaacaggatgatttacctgcggtacgttatgtaatggcgaatcgcttacacttagcggcgaaagcactagaggatgtgatccgtaacttcccgaaccgccctgttgcttggttattgcgtgcactcattttccccatcggtaatcattttaatgcgccgagcgataaaatggcgacggagcttgtctctggtatgttaaaaccgagtcctgcccgcgagcgcattaccttcctttgtcctgagtttgaaggcgatgtgggcggaattgctgaagtggaacaggcgtttgtggcacagtatgcctgtaaagagatttacaaaaagcttaaaaaagcgcagcgcagcggtgaattacctgcaaaagtaccaaacttggtactgtttgctaaagcgctagagcagggcacaattagtaacgatgaacatcaaacactattgcatgcagataagttacgtttagctgccatcaatgtgaatgatttcgaagctttataa

SEQ ID NO: 35607 - protein, 759 aa, Shewanella oneidensis MR-1
MLTIIIIALIAIIALFAVKSLRMQFITQPVFHFFKKVLPPLSDTEREAMEAGDVWWEGELFRGNPNWNTLHSYGKPTLTAEEKDFIDNQVMTALTMIDDFDIVHNRKDLPPELWDYFKKEGFFALIIPKKFGGKAFSAYANSTIVSKLASRSVSAAVTVMVPNSLGPGELLTHYGTEEQKERWLPALAKGDEIPCFALTGPEAGSDAGAIPDVGIVCRGEFNGEEVLGLKLTWNKRYITLAPVATVLGLAFQMRDPDGLLGEKKNLGITCALIPTDHPGVVIGRRHNPLNMAFMNGTTQGDEVFIPLDWIIGGPEFAGRGWRMLVECLSAGRGISLPALATASGHMATKTTTAYSYVRHQFGMAIGQFEGVQEALARIIANTYQLEAARRLTTTGIDLKVKPSVVTAIAKFHMTELGRAVMNDAMDIQSGKGIQLGPKNYLGHPYMSNPISITVEGANILTRSLMIFGQGATRCHPYVLAEMEAAAMENQHDALTRFDSLLMGHMGYATRNAFSALFNALTASRFGNAPVSGETKQYYKDMSRLSSALAFMTDISMLIMGGDLKRKEMLSARMGDVLSQLYLGSATLKLFEDNGRQQDDLPAVRYVMANRLHLAAKALEDVIRNFPNRPVAWLLRALIFPIGNHFNAPSDKMATELVSGMLKPSPARERITFLCPEFEGDVGGIAEVEQAFVAQYACKEIYKKLKKAQRSGELPAKVPNLVLFAKALEQGTISNDEHQTLLHADKLRLAAINVNDFEAL

SEQ ID NO: 35608 - DNA, 2448 bp, Shewanella oneidensis MR-1
  CDS (1)..(2448): transl_table=11
gtgactaccctactttggctcatcgccatgatattagtgctaggagccctagcttaccttcgggtatctttgctcactgccactattgcacccgctgttgtgatgacagccggatggacactcgatgttgtcggccctatctcttggattatcttccttgtgatcgcgctgccgctcaatattagtgcttttagacaaaatgtaatcagtcgccctctgatgaaggtataccgtggcatcatgcccgaaatgtcttctaccgaaaaagaagcgattgaagcaggtactacttggtgggaagcggatctgtttgcggggaacccaaactggaaaaaactgcacaactacccagtcgctcgcttaagtgccgatgaacaagccttcttagatggtcccgttgaagaagtgtgccgcatggtgaatcaacaccaagtgtcacaccaactggctgatttgcctgctgaagtttggcaatatttgaaagatcatggcttcttcgcgatgatcattaagaaaaagtacggcggtttagagtattctgcctacgcccagtcccgcgtgctgcaaaagctggcgggtttaagcagtgaattagcctcgactgttggcgttcctaactctttaggccctggtgagctgctgcaacactatggtacaccagagcaacaaaattattatttaccccgtttagccaaaggtttagaagttccctgtttcgccctcaccagtcctgaggccggtagcgatgcgggttctatccctgactttggtatcgtgtgtaaaggccaatgggaaggtgaagaagttctggggatgaaattaacgtggaacaagcgttacatcaccctcgcccctgttgcgactgtattgggtctggcgtttaaattgcgcgaccctgatcatttattaggtgataaagaagagctggggattacctgtgcgctgatcccaacggatgtagaaggtgttgaaaccggtcgtcgccacttcccgctgaactgtatgttccaaaacggtccaacccgcggtaaagacgtattcgtacctttaagctttatcatcggcggcccgaaaatggcaggccaaggctggcgcatgctggttgaatgtttgtctgtaggtcgtggtattactctgccatcaaactctgccggtggcgtgaaaaccgcagctttggcaacgggtgcttatgcgcgtattcgtcgtcaattcaaactaccaattggtaagttagaagggattgaagagccaatggcacgcatcggtggtaacgcctacctaatggatgcagtgacctcattaaccaccacgggtatcgacttaggagaaaaaccttctgtcatctccgctatcgtgaaatatcacctgaccgatcgtatgcagaaatgcgttatcgacgccatggatattcatggtggtaaaggtgtgtgcttaggccctaacaactacttaggtcgtggctaccaagcggcgccaattgcgattaccgttgaaggcgcaaacattctgactcgctcgatgattatctatggtcaaggcgctatccgttgtcatccttatgtgttgcccgaaatggagtcagcatttgatacgcagtctggccaaggcttagcaaacttcgatgcggccatcttcggccacattggttttgcgaccagtaactttgtgcgtagcttctggttaggtctgacatcaagccgtttctctaacgcgccttactcagataaaaccaagcgttattatcaacatatgaaccgtttcagtgctaaccttgccttgctgtcagacttagcgatggcaactttaggcggtaacttaaaacgtaaagagcgtatttcagcccgtttaggcgatctattaagccagttatacctcgcctctgcgaccttaaaacgctatcaagatgaaggccgtcaaaccgacgatctaccactggtacaatgggctgttgaagatgctctgtataagttacaagcttcgttagacgatttactggataacttcccaatgggtctgggcggcgtattacgcaccatcatgttccctttcggccgtccactaaaacgtccaagcgatgtgttagatcacaaagtcgccaagattatgcaaacgccctgtgaaagtcgtgatcgtttaggtaaaggtcagttctggactaactctgagcacaatgctgtgggtatccaagagcaaacgctgaaggatattctggccgccgaacctttattcgacaaggtctgtaaggctagtggcaaacgtttacctttcatgtggttagataaagtcgctgctgaaggtaaagccttaggcgtattgagcgacagcgaagtacaactgttggaaagagccgaaatcggccgcatgaagtctatcaatgtggacgacttcgaccctgcagaactgcgccctgaagtcgtttctaccacttcacaggaacgcgccgcttaa

SEQ ID NO: 35609 - protein, 815 aa, Shewanella oneidensis MR-1
MTTLLWLIAMILVLGALAYLRVSLLTATIAPAVVMTAGWTLDVVGPISWIIFLVIALPLNISAFRQNVISRPLMKVYRGIMPEMSSTEKEAIEAGTTWWEADLFAGNPNWKKLHNYPVARLSADEQAFLDGPVEEVCRMVNQHQVSHQLADLPAEVWQYLKDHGFFAMIIKKKYGGLEYSAYAQSRVLQKLAGLSSELASTVGVPNSLGPGELLQHYGTPEQQNYYLPRLAKGLEVPCFALTSPEAGSDAGSIPDFGIVCKGQWEGEEVLGMKLTWNKRYITLAPVATVLGLAFKLRDPDHLLGDKEELGITCALIPTDVEGVETGRRHFPLNCMFQNGPTRGKDVFVPLSFIIGGPKMAGQGWRMLVECLSVGRGITLPSNSAGGVKTAALATGAYARIRRQFKLPIGKLEGIEEPMARIGGNAYLMDAVTSLTTTGIDLGEKPSVISAIVKYHLTDRMQKCVIDAMDIHGGKGVCLGPNNYLGRGYQAAPIAITVEGANILTRSMIIYGQGAIRCHPYVLPEMESAFDTQSGQGLANFDAAIFGHIGFATSNFVRSFWLGLTSSRFSNAPYSDKTKRYYQHMNRFSANLALLSDLAMATLGGNLKRKERISARLGDLLSQLYLASATLKRYQDEGRQTDDLPLVQWAVEDALYKLQASLDDLLDNFPMGLGGVLRTIMFPFGRPLKRPSDVLDHKVAKIMQTPCESRDRLGKGQFWTNSEHNAVGIQEQTLKDILAAEPLFDKVCKASGKRLPFMWLDKVAAEGKALGVLSDSEVQLLERAEIGRMKSINVDDFDPAELRPEVVSTTSQERAA

SEQ ID NO: 35610 - DNA, 2448 bp, Pseudomonas putida KT2440
  CDS (1)..(2448): transl_table=11
atgttgctgttgtggttggtggtgctggtgatcggcgcggcgtacctcacgcaccggcgcctggcgcccttgcagattctcggcatcgtggcggcctatgtgctgttgatgggcattttcagcagtgcccccggctggctgctggcgctgatctgggtggtgctggccctgaagatcgccctggttgcgctcccgcagtggcgacgcaaactctttaccgccccggtattccgctggttccagcgcaccctgccacccatgtcgcagaccgagcgcgaagccatcgacgccggtaccgtgtggtgggacggcgaactgttcagtggccgccccgactggcgcaccttgctggcctacccggcaccgaaactgaccgaagaagaacaggccttcatcgatggcccgaccgaagcactgtgcgccatggtcagcgactggcagattggccaggatctggacctgccgcccgaagcctgggcacatatcaagcaacatggctttttcgccctgatcatccccaaggaatacggcggcaagggcttctccgcctacgcccactcccaggtggcgatgaagctggccacccggagcggcgacctggcctccacggtgatggtgcccaactccctgggccctgccgaactgctgctgcactacggcaccgacgaacaacgcaaccgctacctgccgcgcctggcccgtggcgaggaaatcccctgtttcgccctcaccgggccgctggccggttcggacgctggcgccatgcccgacaccggcatcatctgcaaaggccagtggcaaggcgaagaagtgatcggcctgcgcctgaactgggaaaagcgctacatcaccctcggcccggtcgccaccctgctgggcctggccttcaaagcctacgaccccgaccatctgttgggcgaacaggaggagctcggcatcagcctggccctgatccccaccgacacgcccggcgtcgagatcggcaaacgccacctgccgctgggcgccgccttcatgaacggccccaacagcggcaaagacgtgttcgtaccgctggacttcctgatcggtggccaggccatgctcggcaagggctggatgatgttgatgaactgcctgtcggtgggccgctccatctcactgccggcggtcggcaccggtgccgccaagtacaccagcctggtgaccggccagtacgccaatatccgcgagcagttcaacgtgccattggcggccttcgaaggcatccaggaatcgctggcacgcattggcggcaacgcctggctgatggacagtgcccgcctgctgaccgccaaggccgtggacctgggcgaaaagccctcggtgctgtcggcgatcctcaagtaccacctgaccgagcgtggccgcgaatgcatccagcacgccatggacgtgcacggtggcaagggcatcatcatgggcccgaacaactacctgggccgcaactggcaaggtgcgccgatcttcatcacggtcgaaggtgccaacatcctttcacgcaacctgatgatcttcggccagggcgccattcgctgccatccgttcgtgctcaaggaaatggcattggccgggcgtgaagaccacgatcaggcactcaaggaattcgatgacctgctgatgaaacacatcctgttcgccgccggcaatgcggccagtaccttggtctacggcctggggctgggtcgctttgagcgggtgccgggcgatgccctgagccaaggctacttccgcgccctgaaccgccaggcggcggcgtttgccatgatggccgacctttcgatgatgctgctgggtggggcgctcaagcgccgcgagcgcctcagcgcccggcttggcgatgtgctgagctatctgtacctcgccagcgctgccctgaagcgctatcacgaccagggctcgcccgaatacctgcagccgctgctgcgctgggccatggaagaaagcctgggccagacggagcgtgcgctggaccgcctgctcgacaatttccccaaccgcttcgtcggctgcgcgctgcgggtactggtgttccccttcggccgccgccataagggccccggtgatgaactggatgccgaggtggccgagctgatcggccggcgcaagggcgatccggcactggaggaactgctggccggctgctaccgcccacaggcagaacacgacccggtcgcggatctgcaacgggccagtgacctgctcgaagacacggcacagttgagcaaggccctgtaccaagccgtcaaggaaggcaaagtccagccagcccccggccagtccggtatcgacgccgccgtcaaggcaggcgtgctgcaacccgacgatggccagcggctgcacgaggccgaacaggctcggcgcaaggtgatcgatgtcgatgccttcgacaaggcgcagttgctcgccgtaccgggcaaggtgcgctga

SEQ ID NO: 35611 - protein, 815 aa, Pseudomonas putida KT2440
MLLLWLVVLVIGAAYLTHRRLAPLQILGIVAAYVLLMGIFSSAPGWLLALIWVVLALKIALVALPQWRRKLFTAPVFRWFQRTLPPMSQTEREAIDAGTVWWDGELFSGRPDWRTLLAYPAPKLTEEEQAFIDGPTEALCAMVSDWQIGQDLDLPPEAWAHIKQHGFFALIIPKEYGGKGFSAYAHSQVAMKLATRSGDLASTVMVPNSLGPAELLLHYGTDEQRNRYLPRLARGEEIPCFALTGPLAGSDAGAMPDTGIICKGQWQGEEVIGLRLNWEKRYITLGPVATLLGLAFKAYDPDHLLGEQEELGISLALIPTDTPGVEIGKRHLPLGAAFMNGPNSGKDVFVPLDFLIGGQAMLGKGWMMLMNCLSVGRSISLPAVGTGAAKYTSLVTGQYANIREQFNVPLAAFEGIQESLARIGGNAWLMDSARLLTAKAVDLGEKPSVLSAILKYHLTERGRECIQHAMDVHGGKGIIMGPNNYLGRNWQGAPIFITVEGANILSRNLMIFGQGAIRCHPFVLKEMALAGREDHDQALKEFDDLLMKHILFAAGNAASTLVYGLGLGRFERVPGDALSQGYFRALNRQAAAFAMMADLSMMLLGGALKRRERLSARLGDVLSYLYLASAALKRYHDQGSPEYLQPLLRWAMEESLGQTERALDRLLDNFPNRFVGCALRVLVFPFGRRHKGPGDELDAEVAELIGRRKGDPALEELLAGCYRPQAEHDPVADLQRASDLLEDTAQLSKALYQAVKEGKVQPAPGQSGIDAAVKAGVLQPDDGQRLHEAEQARRKVIDVDAFDKAQLLAVPGKVR

SEQ ID NO: 35612 - DNA, 2448 bp, Vibrio vulnificus CMCP6
  CDS (1)..(2448): transl_table=11
atggacatcttgctctccctactcgcgatgaccttgatattgggcgtgacgctctatcatcgaatgtcattagtcaaatccgtcaccttgttgaccgccacgatgctgctgttaactttctccggttacgtcggctcaatcggctggctgagctacttattagcgctggcggtattcgctatgccctctgtacgccaatcgctcatcagtgcaaaagcactcggcttgtttaagcaagtgcttccagccatgtctcagacggaaaaagaagcgttggatgcaggtaccgtttggtgggaagcggagcttttcaaaggcaagccagaatggaaaaagctacacgccattccagcaccaaaactctctgctgaagagcaagccttcctcgatggtccggtaaatgaagtgtgtgccatggtaagcgattaccaagtgacgcatgaactggccgatctgcctcctgaagtttggcaatatctcaaagatcacaaattcttcgccatgatcattaagaagaaatacggtggccttgagttttctgcttacgcgcaatctttggtactgcaaaaactgactggtgtctctggtgttctttcttcgaccgttggcgtaccaaactctttgggtcctggtgaacttttgcaacattacggtacagaagagcagaaaaattactaccttcctcgccttgcagaaggtaaagagatcccctgttttgccctcaccagccctgaagcgggttcggatgcgggttctattccagatgacggtgtggtgtgtaaaggcgaatgggaaggcaaagaagtcttgggcatgcgcctaacatggaacaagcgctacattacccttgcccctgtagcaacggttttgggccttgctttcaaacttcgcgatcctgaaggcttactcggcgagcaagaagatcttggtattacttgtgcgcttatcccaacagacattaaaggggttgaaatcggcaaccgtcatttccctctcaatgtccccttccagaacggcccaacgcgtggccaagatattttcgtaccgatcgatttcattatcggtggccaaaaaatggcaggccaaggctggcgcatgctggttgaatgtctctctgttggtcgcggtattaccctgccttcaaactcaaccggtggtatcaaatccgctgcattggcaaccggtgcttactcgcgcattcgtcgccaatttaaacagcctatcggccatctcgaaggcgtagaagaagcactagcacgcttaggtggtaacgcgtatgtgatggacgcggcaagcaaccttaccgttgccggtatcgaccttggtgagaaaccatcggtcatctcagcgattgtaaaataccattgtactcaccgtggccaacgcagcatcatcgatgcaatggatatcgtcggtggtaaaggcatttgccttggcccctccaacttccttgctcgtggctaccaaggttcacccatcgccgtcacggtggaaggggcaaacatcctcactcgttcaatgatcatctatggtcaaggcgccattcgttgccatccctatgtactaaaagagatggaagccgcctactcggacaaatctgatgcggtagaacagttcgatgcagccttggctggccacgtcagctttaccatgagcaaccttgtgcgcagcatttggtttggtttgaccgatggttttggctcgaacgccccaactcacgatgccaccaaacgttactaccagaagctcaatcgctatagcgccaacatggcattattgtcagacatttcaatggccgtgctgggtggctcattgaagcgtcgtgagcgtctatcagctcgcttaggcgatatcctcagtcagctttacttgagctcagcgaccttaaaacgctttgaacaagatggccgccctgtagaagacctgcctttggttcactggggtttgcaagacagcttgaagcaaacggaagtggccattgatgagtttcttgccaacttcccgaaccccattatcggtaaagccttgcgcgtcttgatcatgccatttggccgtgtgcgcaaagcaccaagcgacaaaatcgatagtcaagttgcacgcatactacaaaccccaagcgcgacacgtagccgcattggtcgcaatcagtatttgcaaccaacagaacacaacgccgcaggcaagattgagctagcactgtctgtgattttgcaagcagaacctgtgtttgacaaagtgtgtaaagcacaaggtaaacgccgcccattcttacgtttggatgccattgcagaagaggggctagcacaaggcattatttctcaagatgaagccgatttgcttaaagaagcggagcaacatcgtttgtacaccatcaatgttgatgactttgagccagagcatctggcggcaaaaaagtctcataccgatgtgatggataacgttgcttag

SEQ ID NO: 35613 - protein, 815 aa, Vibrio vulnificus CMCP6
MDILLSLLAMTLILGVTLYHRMSLVKSVTLLTATMLLLTFSGYVGSIGWLSYLLALAVFAMPSVRQSLISAKALGLFKQVLPAMSQTEKEALDAGTVWWEAELFKGKPEWKKLHAIPAPKLSAEEQAFLDGPVNEVCAMVSDYQVTHELADLPPEVWQYLKDHKFFAMIIKKKYGGLEFSAYAQSLVLQKLTGVSGVLSSTVGVPNSLGPGELLQHYGTEEQKNYYLPRLAEGKEIPCFALTSPEAGSDAGSIPDDGVVCKGEWEGKEVLGMRLTWNKRYITLAPVATVLGLAFKLRDPEGLLGEQEDLGITCALIPTDIKGVEIGNRHFPLNVPFQNGPTRGQDIFVPIDFIIGGQKMAGQGWRMLVECLSVGRGITLPSNSTGGIKSAALATGAYSRIRRQFKQPIGHLEGVEEALARLGGNAYVMDAASNLTVAGIDLGEKPSVISAIVKYHCTHRGQRSIIDAMDIVGGKGICLGPSNFLARGYQGSPIAVTVEGANILTRSMIIYGQGAIRCHPYVLKEMEAAYSDKSDAVEQFDAALAGHVSFTMSNLVRSIWFGLTDGFGSNAPTHDATKRYYQKLNRYSANMALLSDISMAVLGGSLKRRERLSARLGDILSQLYLSSATLKRFEQDGRPVEDLPLVHWGLQDSLKQTEVAIDEFLANFPNPIIGKALRVLIMPFGRVRKAPSDKIDSQVARILQTPSATRSRIGRNQYLQPTEHNAAGKIELALSVILQAEPVFDKVCKAQGKRRPFLRLDAIAEEGLAQGIISQDEADLLKEAEQHRLYTINVDDFEPEHLAAKKSHTDVMDNVA

SEQ ID NO: 35614 - DNA, 2280 bp, Bradyrhizobium japonicum USDA 110
  CDS (1)..(2280): transl_table=11
atgaggtccgccatgagcttccgccgcgacaccatcacaaaaccgatcttctcctgggcgcgcggcgtgctgccggcgatgtccgaaaccgagcgcgaggcgctggaggccggcgacgtctggtgggacgccgatctgttcaccggcaaccccgattgggcgaagctgctgaaggtcccgcaggcgaccctgaccgacgaggagcaggccttcctcaacggcccggtcgatgagctctgcgccatgctcgacgagtggaagatcttttgggaatggcgcgatttgccgccggatgtctggcatttcgtcaagcgcgaaaagttcttcggcatgatcattccgaaggagttcggcggcctcggcttctcgccctatgcccattcggaagtcgtgcgcaagatctcgacccgctcgatcgctgccgccgtcacggtgatggtgccgaactcgctcggccccggcgagctcctgatgcgcttcggcaccaaggagcagcaggcgcgctggctgccgcggctggccaacggccgcgacattccctgcttcggcctcaccagcccggaagccggctccgacgccgcctcgatggtggacagcggcgtcatctgcaagggcaccttcgaaggccgcgaggtcgtgggcctcaggctcaactggcacaagcgctacatcacgctcggccccgtcgcgacgctgctcggactcgccttcaaggcctatgaccccgaccacctcgtgggccagcaggaagagctcggcattaccgtggcgctgatcccgagcaatctgcccggcgtcgagatcggccaccgccacctgccgtcgatgcaggtcttccagaacggcccgaaccggggccgcgacgtcttcattccgctcgattacgtcatcggcggcaaggagcgcctcgggcagggctggaagatgctgatgacggcgcttgccgccggccgcggcatctcgctgccgtcgctgtcggccgcgggcgctgcgtatgccgcgcgcaccaccggcgcctacgcccgcatccgcgagcagttcggcatctccatctccaagttcgaaggtgtcgaggagccgctcgcgcgtatcgtcgccaccgcctatcagctcgacgcggcacggcggctgacctgcgcggcgctcaatgccggcgtccatcccgccgtcatctccggcatcatgaagctgcacgcgaccgagcggatgcgtaccgccgtcgacgacgccatggatatccacggcggcaaggccgtgatcgaaggtccgcaaaactatctcggcaatctccaccgcgccgttccggtcggcatcacggtcgagggcgccaatatcctcacccgcaatctcatcgtgttcgggcagggcgcgatccgcgcccatccctatctgctcgacgagatgaacgcgctcgccgacaccgaccgagaacgcggtttgacggcattcgacaccgcgttctggaagcatgtcggccacagctttcagacactctttcgtgccttcggccggagctggaccttcggcgcgttcgcgtcggcgccggatgcgggcgacgccacgccattctatcgccagctctcgcgctattcggcggcgtttgcgctctgtgccgacatggcgctgctcacgctcggcggcgcgctcaagcgcaaggagatgctgtcggcgcgcttcggcgacattctgtccgagctgtatctgctctcggccgcgctgaaacgctggcaggacgagggccggcagacggaggactttgccgcgctggaatggtgcatggcgaccggcttcaagaccattgaaaatcggctcgccgaaatcctcgccaatctgccgaaccgcttcgtcgcgggattcctcaagctcgtggttcagccttttggcgcccgtgtgctcggcccgtccgaccgggtcgtgcatcaatgcgcgagcctcgtgctggagccgtcggcggtacgtgaccgcctgacggccgacctcgcttatgtcgacgatgacggcggctttgcccggctggagcgcgccttcaagctggtcgcgggcaccgatgcgatcgccaagcgcatgcgcgccgcgcacatcagcgactggaaggaggcggtcgccaagggtgtgatcacgcaggccgagggcgagcagctcgccgcaacccgcgaagccgtcgcgaaggtgatcgaggtcgacgattttgcgccggaggcgctgtcgccgatttacaagaaaaccggagatgtgcatcagttcttccaggaactcggtgaacagagggcggcgagctga

SEQ ID NO: 35615 - protein, 759 aa, Bradyrhizobium japonicum USDA 110
MRSAMSFRRDTITKPIFSWARGVLPAMSETEREALEAGDVWWDADLFTGNPDWAKLLKVPQATLTDEEQAFLNGPVDELCAMLDEWKIFWEWRDLPPDVWHFVKREKFFGMIIPKEFGGLGFSPYAHSEVVRKISTRSIAAAVTVMVPNSLGPGELLMRFGTKEQQARWLPRLANGRDIPCFGLTSPEAGSDAASMVDSGVICKGTFEGREVVGLRLNWHKRYITLGPVATLLGLAFKAYDPDHLVGQQEELGITVALIPSNLPGVEIGHRHLPSMQVFQNGPNRGRDVFIPLDYVIGGKERLGQGWKMLMTALAAGRGISLPSLSAAGAAYAARTTGAYARIREQFGISISKFEGVEEPLARIVATAYQLDAARRLTCAALNAGVHPAVISGIMKLHATERMRTAVDDAMDIHGGKAVIEGPQNYLGNLHRAVPVGITVEGANILTRNLIVFGQGAIRAHPYLLDEMNALADTDRERGLTAFDTAFWKHVGHSFQTLFRAFGRSWTFGAFASAPDAGDATPFYRQLSRYSAAFALCADMALLTLGGALKRKEMLSARFGDILSELYLLSAALKRWQDEGRQTEDFAALEWCMATGFKTIENRLAEILANLPNRFVAGFLKLVVQPFGARVLGPSDRVVHQCASLVLEPSAVRDRLTADLAYVDDDGGFARLERAFKLVAGTDAIAKRMRAAHISDWKEAVAKGVITQAEGEQLAATREAVAKVIEVDDFAPEALSPIYKKTGDVHQFFQELGEQRAAS

SEQ ID NO: 35616 - DNA, 2283 bp, Vibrio parahaemolyticus RIMD 2210633
  CDS (1)..(2283): transl_table=11
atgagctctctacgaagaaaatggattagtgacccagcatttaaagtgtttaagaaagttcttcctccgctgtcgagtacagaaaaagaagcgatggaagccggtagtgtatggtgggatgccgagttgttttctggcaagccaaactttacgacgctacatcattaccccgcgccgacgttaactgctgaagagcaagcgtttatggataatgaacttgaaacgctcttagacatgctagacgatcaaaaaatcgtgaaagaagatcgtgatttgccaccggaggtgtgggaatacctgcgcaaagaacgtttcttctcactgattatatcgaaagagtacggtggccgtgagttttctgcattggcaaactcaacgattgtgtctcgtattgcaacgcgtagtattagtgttgcggtatcggtaatggttcctaactcgttgggtccaggtgagcttctttctcactacggcactcaggagcaaaaagattactggttaccacgtcttgctgatggtacggacattccttgttttgctttgactggaccggaagcaggttcagatgcgggcggcattcctgaccagggtgtggtgtgttacggcatgtacgatggcgaagaggtgcttggtgttcgagttagctggaacaagcgttacatcacacttgcacctgttgcgactgttcttggtctagctttcaagctgcaggacccagacggtttactcggcgataagaaagacgtaggcattacttgtgcgctcattcctgctgaccatgacggcgttgaaattggtgagcgtcacgatccacttggttctgctttcatgaatggtccgactcgtggtgaagatgttttcattccaatggattggctcatcggtggctcagattacgcgggtaaaggctggcgtatgttggttgagtgtttgtctgctggccgcggtatttcactgccagcacttggtactgcaatcggccacctgacaaccagaaccactggcgcttatgcatacgtacgtaagcagtttggtatgtctatcggtaagttcgaaggggtagcagaagcgatgggccgtattggcggtctgacttatcttttggaagcaacgcgtacgttgacgactacctctctcgatatgaaagagaaacctggcattgttacggctattgccaaataccacatgactgaaattgcacgtacgattttgaacgactcgttcgatattcacgcaggtcgtgcgattcaagatggtccaatgaactatcttgcgaaacactacttgggtattcctgttgcgattactgttgaaggtgcaaatatcctaacgcgtaacttgatgatctttggtcaaggtgcgacccgttgtcatccatatgtgcttaaagagatggaagcggcggcgaatccagactcagagcagggtgcgaaagagttcgattctctattgttcaaacatattggtcatgcgatggggaatacgtttggtgcgctaggtgcagcgctaacaggctcgcgctttgtgaaagcgaatatgagtggtccaactcagcgctattataaagacatcacccgcctgagccgagcgttagcagtaagcgccgattttgccatgttgacgttaggtggtgacttgaagcgtaaagagatgatttctgcacgtttgggtgatggtttgagctacctgtacatggcatccgcgacgctgaaaaaatacgaagatgaagggcgtcagcaaggcgacttaaacttcgtgcattacgctgtccaatactgtttgtacaacgcagctaaatcgctgaacgaagcgtacgcaaacttcccagtgaaatatgttggtggcgtgttgaaaggcttgttattcccactagggaatcacttcgacaaaccaagtgatgagttaagtgtcagcattgctgaagctatgatgaccccaggcgtgcagcgtgaccgtttaacccacttgtgttacatcggcaaatccgaaaatgatagcgtaggtttgatggaaaatgccttcctagccatgtacgacgtcaaaccattggagcgtaagctaatgaaagcagcgaaagatggcaaagtggctcgtaaaggtcttctgccagatcgcttacagcaagcacttgacgctggtgtgttgacagagcaagaggttgaaaagatcactgctgctgaccaacttcgttacaaagctattcaagtagaccacttcagtcatgatttctctgaagttcgtactgatagcccgaaaaaatcacacttgaatccagcagcctaa

SEQ ID NO: 35617 - protein, 760 aa, Vibrio parahaemolyticus RIMD 2210633
MSSLRRKWISDPAFKVFKKVLPPLSSTEKEAMEAGSVWWDAELFSGKPNFTTLHHYPAPTLTAEEQAFMDNELETLLDMLDDQKIVKEDRDLPPEVWEYLRKERFFSLIISKEYGGREFSALANSTIVSRIATRSISVAVSVMVPNSLGPGELLSHYGTQEQKDYWLPRLADGTDIPCFALTGPEAGSDAGGIPDQGVVCYGMYDGEEVLGVRVSWNKRYITLAPVATVLGLAFKLQDPDGLLGDKKDVGITCALIPADHDGVEIGERHDPLGSAFMNGPTRGEDVFIPMDWLIGGSDYAGKGWRMLVECLSAGRGISLPALGTAIGHLTTRTTGAYAYVRKQFGMSIGKFEGVAEAMGRIGGLTYLLEATRTLTTTSLDMKEKPGIVTAIAKYHMTEIARTILNDSFDIHAGRAIQDGPMNYLAKHYLGIPVAITVEGANILTRNLMIFGQGATRCHPYVLKEMEAAANPDSEQGAKEFDSLLFKHIGHAMGNTFGALGAALTGSRFVKANMSGPTQRYYKDITRLSRALAVSADFAMLTLGGDLKRKEMISARLGDGLSYLYMASATLKKYEDEGRQQGDLNFVHYAVQYCLYNAAKSLNEAYANFPVKYVGGVLKGLLFPLGNHFDKPSDELSVSIAEAMMTPGVQRDRLTHLCYIGKSENDSVGLMENAFLAMYDVKPLERKLMKAAKDGKVARKGLLPDRLQQALDAGVLTEQEVEKITAADQLRYKAIQVDHFSHDFSEVRTDSPKKSHLNPAA

SEQ ID NO: 35618 - DNA, 2445 bp, Vibrio parahaemolyticus RIMD 2210633
  CDS (1)..(2445): transl_table=11
atggacatcttgctctctatcgttgcgatggctgttgtgttaggcattacgctttaccacagaatgtcactcgttaaatccgttagcctactaactgctgccatgctagtgctgactatcacaggctcagttggcgttattggctggacactgtatgtgcttgcaatcgcggtctttgccgtttctggtatccgccaatcgcttattagccgtaaggcactgacgttgtttaagactgtgctacctgcgatgtctcaaaccgaaaaagaagctctcgatgctggtacagtatggtgggaagctgagctattcaaaggtaaacctgaatgggaaaaattacacgcaattcaagcgccaaaacttagcgctgaagagcgagcgttcttagacggcccagtaaacgaagtgtgtgctatggtcagcgacttccaagtaacgcatgaactcgcggatttaccacctgaagtttggcagtatctgaaagacaacaaattcttcgccatgatcatcaagaaaaagtacggtggtctagagttctctgcatacgctcaatctttggtactgcaaaaactgacgggtgtttctggcgtactttcttctaccgttggtgtgcctaactcattaggcccaggcgaactcttgcaacactacggtacagaagatcagaaaaactattacttacctcgcctagccgaaggtaaagaaatcccatgtttcgcgctaactagcccagaggctggctcagacgcaggctcaatcccagattacggcgtcgtttgtaaaggagaatgggaaggcaaagaagtgttgggtatgcgtctaacgtggaacaaacgctacatcacgcttgcgcctgttgcgacggtacttggccttgcattcaaactgcgtgacccagaaggcctgcttggtgataaagaagatcttggtatcacatgtgcgctgatcccaacggatgtgaaaggtgtagaaatcggtaaccgtcacttcccactgaacgtaccattccagaacggtccaacccgtggtaaagacattttcgttcctatcgatttcatcatcggtggtgagaaaatggcagggcaaggctggcgcatgctggtggaatgtctgtcggtcggccgtggcatcacgctaccttctaactcgacgggtggtatcaaatcggctgcgatggcaacgggtgcatactctcgcattcgtcgtcagttcaaacaaccaatcggtcacatggaaggcgttgaagagccattggcgcgtcttggcggtaatgcatacgtcatggatgcggccagcaatctaactgttgcaggtatcgacctaggtgaaaagccatcggttatttctgcaattgtgaagtaccactgtacccaccgcggtcaacaaagcatcatcgacgcgatggacattgtcggcggtaaaggcatttgtttaggcccttcaaacttcctcgctcgtggctaccaaggctctccaatcgccgtaacggtagaaggtgcaaacattctgactcgttcgatgatcatcttcggtcaaggtgcgattcgttgtcacccatatgtacttgaagaaatgaacgccgcttactcagaagcgagcgacgcggttgagaaattcgacaaagcgttagctggccacgtgagctttaccatgagtaacctcgttcgcagtatttggtttggtttaagcgatggcctaggttcatcggcaccgactaaagatgcaacgaaacgctactaccaacagctaaaccgttacagtgccaacctagcgcttctgtctgatatctcaatggcggtacttggtggttcgttgaaacgtaaagagcgcttatctgcgcgtttgggtgacattctcagtcagctatacctaagctccgcgacgctaaaacgttttgaacaagatggtcgtccagctgaagatttggctttggttcactggggtctacaagatagcttaaaacaagcagaaatcgccattgatgagttcctagcaaactttccgaacaaagtcattggccgcacacttcgcgttctgattatgccattcggtcgcgtacgcaaagcaccaagtgacaagctagacagcaaagtggcacgtattctacaaaccccaagtgcaacacgttcgcgcattggccgtggccagtacttagagccaacagagcacaacccagccggtaagattgagttggcactgtctgtgattcttcaagctgagcctgtgttcgacaaagtttgtaaagcgcaaggtaaacgtcgtccattcctccgcttggacatgattgctcaagaaggtctagagcaaggcgtgatcactcaagaagaagcagaactgctgagagaagccgagcaacatcgtctcgataccattaacgttgacgattttgagccggaacttttggcagcaaagccactttaccctcaaatggatagcgttgcttaa

SEQ ID NO: 35619 - protein, 814 aa, Vibrio parahaemolyticus RIMD 2210633
MDILLSIVAMAVVLGITLYHRMSLVKSVSLLTAAMLVLTITGSVGVIGWTLYVLAIAVFAVSGIRQSLISRKALTLFKTVLPAMSQTEKEALDAGTVWWEAELFKGKPEWEKLHAIQAPKLSAEERAFLDGPVNEVCAMVSDFQVTHELADLPPEVWQYLKDNKFFAMIIKKKYGGLEFSAYAQSLVLQKLTGVSGVLSSTVGVPNSLGPGELLQHYGTEDQKNYYLPRLAEGKEIPCFALTSPEAGSDAGSIPDYGVVCKGEWEGKEVLGMRLTWNKRYITLAPVATVLGLAFKLRDPEGLLGDKEDLGITCALIPTDVKGVEIGNRHFPLNVPFQNGPTRGKDIFVPIDFIIGGEKMAGQGWRMLVECLSVGRGITLPSNSTGGIKSAAMATGAYSRIRRQFKQPIGHMEGVEEPLARLGGNAYVMDAASNLTVAGIDLGEKPSVISAIVKYHCTHRGQQSIIDAMDIVGGKGICLGPSNFLARGYQGSPIAVTVEGANILTRSMIIFGQGAIRCHPYVLEEMNAAYSEASDAVEKFDKALAGHVSFTMSNLVRSIWFGLSDGLGSSAPTKDATKRYYQQLNRYSANLALLSDISMAVLGGSLKRKERLSARLGDILSQLYLSSATLKRFEQDGRPAEDLALVHWGLQDSLKQAEIAIDEFLANFPNKVIGRTLRVLIMPFGRVRKAPSDKLDSKVARILQTPSATRSRIGRGQYLEPTEHNPAGKIELALSVILQAEPVFDKVCKAQGKRRPFLRLDMIAQEGLEQGVITQEEAELLREAEQHRLDTINVDDFEPELLAAKPLYPQMDSVA

SEQ ID NO: 35620 - DNA, 2148 bp, Coxiella burnetii RSA 493
  CDS (1)..(2148): transl_table=11
atgggattgctaacacgctttcgccagcagttaccgccgatttctcaaattgagcgtgaagttttacaagccggtgatacctggtgggagaagcaattttttagtggcaatcccgattgggagcaattatttgctctaaaaaaaccaacgctcactcaagaagaacaagcctttatcgataatcagacagaaacgttatgtcagctaataaatgattggcaattacagcaagacggcgatttacccgcaactgtgtggaattatattaagcaagaaggtttttggggattaatcatcgctaaaaaatacgggggacgtgaattttctgcactcgctcattcttctattgttactaaaatcgcctctcgaagcattgctgcagcgatcaccgttatggtgccgaactcgcttggtccggcagaatttttgtcccattacgggactgaagaacaaaaacgctattatttaccgcgattagcaaaaggcgaagaaattggttgctttgcgctgacagcagtggaggctggcagcgatgccactaatattcctgatacaggagtcgtttgtcgcgggaattataacgaccaaaacgttataggtattcgattaaattgggataaacgctacattaccctcgcaccgattgccactcttattgccgtcgcttttcaattatctgatcctgatcatttattgggtgacgaagaaaacatcggcatcaccgttgcattaattcccgcggataggcccgggattaaaagaggcgctcgtcataaaccacttaatttagcttttttaaacggccccattcgtggtaaagatgtgtttatcccatttgattttattcctggcgggaaacccgcgttagggaaagggtgggggatgatgatggaatgtttatctttagggcgagggatttctttgcctggcgttgcaacggcaggagctcaattaagttttttaaccagtggtgcttatgcacaaatccgtcatcaatttaaacgccccatcggggattttgaaggaattgcgttttcgctcgcgcaaatcggcggaattacgttcttatgtgaagcaacacgaatattttcagcgcaggcggtggacgagggtttacacccttcgattgcctcggccatcgccaaatattatttaactgaattaggccgaaaagcccttaaccatgccatggatattcacgcggggcgtggtattcagttagggccacgtaattatttaggcttggtctatcaagcggtgcccatcagcataactgtagagggcgccaatattttaactcgtaatttaattatttttgggcaaggggtgttgcgctgtcatccttatttaggaaaagaattaatcgcggcgcaaaaagctgacccgtcggaatttaatggattgttactaaaacacattggattgtttgcaactaacttatgccgacttattttttatggaattagcggcggacgtggaattgttattcgcagaaaaacgcggctgaaaaattatttacgacaattgacgcgaatgagttgcgcgttaaatgtggttggagatgtaacactgttagctcttggtgccgaattaaagctaaaagaatcgttgacagcgcgattaagcgatatagtgggttatctttatttggcatccgcggtgatcaaatatgatcacgacaacgcagagcctattgacgattggccgtttgtaaaatggtcactcgattattgtttatctgaaatccagcgggcttttgatgaattatttaggaattttccgaagcgatgggaaggttttttaatgcgtcgtttggtttttccctgggggcgcgcttattcgccgccgaatgatcaaactaccctcgccgttgcggacaaaatgcaacatcctagtgaagtgcgtgaccgattaacgagatattgttatattggcaatgaaaaagaagccgtcggacgccttgaaaaggcgtttcaagaatggcaaaacgtgaagccattgtggaaaaaaattcacgggatgagagggaatttatcgactcgcattgaagcgacttatcaagccggtcgattgtcatctgaggaacgggataaattgcaagcttttgctgtactttattgggatgtattgcaagtggatgaattttaa

SEQ ID NO: 35621 - protein, 715 aa, Coxiella burnetii RSA 493
MGLLTRFRQQLPPISQIEREVLQAGDTWWEKQFFSGNPDWEQLFALKKPTLTQEEQAFIDNQTETLCQLINDWQLQQDGDLPATVWNYIKQEGFWGLIIAKKYGGREFSALAHSSIVTKIASRSIAAAITVMVPNSLGPAEFLSHYGTEEQKRYYLPRLAKGEEIGCFALTAVEAGSDATNIPDTGVVCRGNYNDQNVIGIRLNWDKRYITLAPIATLIAVAFQLSDPDHLLGDEENIGITVALIPADRPGIKRGARHKPLNLAFLNGPIRGKDVFIPFDFIPGGKPALGKGWGMMMECLSLGRGISLPGVATAGAQLSFLTSGAYAQIRHQFKRPIGDFEGIAFSLAQIGGITFLCEATRIFSAQAVDEGLHPSIASAIAKYYLTELGRKALNHAMDIHAGRGIQLGPRNYLGLVYQAVPISITVEGANILTRNLIIFGQGVLRCHPYLGKELIAAQKADPSEFNGLLLKHIGLFATNLCRLIFYGISGGRGIVIRRKTRLKNYLRQLTRMSCALNVVGDVTLLALGAELKLKESLTARLSDIVGYLYLASAVIKYDHDNAEPIDDWPFVKWSLDYCLSEIQRAFDELFRNFPKRWEGFLMRRLVFPWGRAYSPPNDQTTLAVADKMQHPSEVRDRLTRYCYIGNEKEAVGRLEKAFQEWQNVKPLWKKIHGMRGNLSTRIEATYQAGRLSSEERDKLQAFAVLYWDVLQVDEF

SEQ ID NO: 35622 - DNA, 2334 bp, Nitrosomonas europaea ATCC 19718
  CDS (1)..(2334): transl_table=11
atgcttgaatttcttgttgtacttatcctgttgatcgtggcgggtgtggcactgttcgcagtgccgttcctgcgtatcaatattgtttccagccttgttttaagaatctttcgcaagctgttgcctcaaatctcgcaaaccgagcaggaagcactcgatgccggcacggtatggtgggaaggggcgctgttcagcggcaaacccgactggaatcagctgcttgcctaccccaaaccggagctgaccccggaagaaaaagcctttctcaacgggccggttgaacagttatgcgccatgctcgatgaatggcacatcacccatgaacgccatgacctgcctccccatgtctggcagttcatccgggaaaaccgctttttctcgctgatcatccccaaggaatacggcggacttggtttttctgcactggcgcattcggaagtagtcatgaaaatcagttcgcgcagcaatacggcggcagtgactgtaatggtgcccaattcactcggcccagccgaactgctattgcattacggaacggaagaacaaaaagatcactatctgccacggctggcgaatggcagcgagattccctgttttgcgctgaccgggccggacgccggttcagatgcagggtcgattcctgacaccggtatcgtgtgccggggggtattcgatggccagcccgatgtactgggtattcgcatcaactgggagaaacgctacatcacgctgggaccggttgccacactactggggcttgctttcagactgtacgacccggatggattactcggaaacgaaaaagaaatcggcatcacgctcgcgctgatcccaaccagcacattgggtatccagatcggccgcaggcattatcccctgaacggagttttccagaacgggcccaattccggcaaggatgtcttcattcccatggactgggtcatcggcgggcaggacaaagtaggacaaggctggcgcatgctgatgaacagcctctccgtcggccggtcgatttcgctgccggccaccagtgtcggtgcagccaagctgtcggcctggagcagcggggcctatggccgggtacgtgtacagttcaaattaccgatcggctatttcgaaggtgtagaagaagcgcttgcgcgtatcgccggcaacacctacatgatggatgcagcacgtatcatgactgccggcgcggtcgatctgggcgagaaaccttccgtcatttccgcaatcgtcaaatatcatctgaccgaacgcagccggcagatcatcaatgacgccatggatattcacggtggcaagggcatctgcctgggcccctccaattatctggcgagaacctatcagcagacacccgtaggcatcacggtggaaggcgcgaacatcctgacacgcaatatgatcatcttcgggcaaggcgccatccgtgcccatcctttcacactgcgagaaatcgatgctgcctgggatcaggacaaaaaacgtggattacgggcatttgacgaggcgctgaccgggcatatcgtcttcaccttcaggaatgcgttccacagtctgatctatggattcagcacgcggctggtcaaagacataccgcaaaacgtaacgcacgaaacagtgaattactatcggcaactgacacgcttctccgcagcattcgcactgttgaccgatatcgccatgctgaagctgggcggtgcactcaaacggcgtgaacgtctttctgcacgcctgggtgacattctcagcatgatgtatctgtgctcggccaccctcaagcgttttgaggatgatggccgccctgcggcagatctgcctctgttgcactggtcggtacaggatgcgctttatcgtacccagcagtcgttccatgagtttctgctcaatttccctgtgagcagaatcacgcgaggattgctgcggttcatcatttttccgcggggtatgcgttgcctgccccctgccgactcactctctcatgaagtcgcacggctcattctggcccccggagaagtacgtgatcgcctgacagcaggcatctacctgcccgaacaggataatgaaccactggccctgctcaaaaaagccctggcctgtaccatcgactgcgaacccatcgaggccagattgcggcaagccgtcaaagataaagcgatcaccccccacgaacatgagcagatcaaccaggcgctggcacaagggatcattaccagtaaagaagctgcctcgcttgaacagatgaaaaccctgcgacgccgggtcatcatggtggatgattttcctgctgatctccgccagacaggcaattcacacggagaaaccccgctatga

SEQ ID NO: 35623 - protein, 777 aa, Nitrosomonas europaea ATCC 19718
MLEFLVVLILLIVAGVALFAVPFLRINIVSSLVLRIFRKLLPQISQTEQEALDAGTVWWEGALFSGKPDWNQLLAYPKPELTPEEKAFLNGPVEQLCAMLDEWHITHERHDLPPHVWQFIRENRFFSLIIPKEYGGLGFSALAHSEVVMKISSRSNTAAVTVMVPNSLGPAELLLHYGTEEQKDHYLPRLANGSEIPCFALTGPDAGSDAGSIPDTGIVCRGVFDGQPDVLGIRINWEKRYITLGPVATLLGLAFRLYDPDGLLGNEKEIGITLALIPTSTLGIQIGRRHYPLNGVFQNGPNSGKDVFIPMDWVIGGQDKVGQGWRMLMNSLSVGRSISLPATSVGAAKLSAWSSGAYGRVRVQFKLPIGYFEGVEEALARIAGNTYMMDAARIMTAGAVDLGEKPSVISAIVKYHLTERSRQIINDAMDIHGGKGICLGPSNYLARTYQQTPVGITVEGANILTRNMIIFGQGAIRAHPFTLREIDAAWDQDKKRGLRAFDEALTGHIVFTFRNAFHSLIYGFSTRLVKDIPQNVTHETVNYYRQLTRFSAAFALLTDIAMLKLGGALKRRERLSARLGDILSMMYLCSATLKRFEDDGRPAADLPLLHWSVQDALYRTQQSFHEFLLNFPVSRITRGLLRFIIFPRGMRCLPPADSLSHEVARLILAPGEVRDRLTAGIYLPEQDNEPLALLKKALACTIDCEPIEARLRQAVKDKAITPHEHEQINQALAQGIITSKEAASLEQMKTLRRRVIMVDDFPADLRQTGNSHGETPL

SEQ ID NO: 35624 - DNA, 2334 bp, Bordetella parapertussis 12822
  CDS (1)..(2334): transl_table=11
atgaacgctgtactggtcgtgttgtcgggcgcggcgctgctgggcatcgggccgctgcggcgcgccctgctgagccgccccatcctggcggcctaccgcaaggtgctgcctgccatgtccgacacggaacgcgaggccctggaggccggcaccgtgtggtgggaaggcgagttgttcggcggccgcccggattggcgcaagctgctggactatccgcgtccggtcctgagcgcggccgaacagcgctttctcgaccacgagaccgaacaggcgtgccgcctggtcgatgactggcacattacccacgagcgtttcgatctgccgccgcaggtatgggcctacatcagggaacagggtttcctgggcatgatcattccgaaggaatacgacggcctgggcttctgcgcccatgcgcattcggcgatcgtcaccaagctgtcgacgcgctcgtcggcgctggcggtgtcggtcatggtgcccaactcgctggggccggccgaactgttgctgcactacggcaccgaggcgcagaagcgccactacctgccgcgcctggcccgcggcgaggaaataccggccttcgcactcaccagcccgtgggccggctcggacgcggccgccattcccgaccacggcacggtctgcaagggccagtggcaaggccaggaagtcctgggcatgcgcgtcacctgggacaagcgctacatcacgctggcgcccgtctgcacgctgctggggctggcgtttcgcctgtacgacccggacggcctgctgggcgggcgcaaggatctcggcatcacctgcgcactggtgccgcacgatcatcccggcgtcgacaccggccggcgccattttccgctcaacgcgatgttcatgaacggccccacccgcggcacggacgtattcatgccgctggagttcatcatcgacgggcccgccatggccggccagggctggcgcatgctgatggaatgcctggcggcgggccgctcgatctcgctgccgtcgtccaacgcagacatggcccagctgaccgcgcgcgccgtgggcgcctatgcgcgggtgcgcagccagttccgcatgccggtgggcaaattcgaaggcgtggaggaggcgctggcgcgcatcggcggccacacctacctgatggacgcggcgcgcgtcatgacggccggcgccgtggacctgggcgaaaagcccgccgtggcatcggccatcgtcaaataccacgtcaccgaacgcgcccgccaggtggtcaacgacggcatggacatcagcggcggcaagggcatctgcctgggtccgtcgaacttcctgggccgcgcctaccagcaactgccgatcggcatcacggtggaaggcgccaacattctcacgcgcagcctgatcatcttcggccagggcgcgatccgctgccatccctacgtgctggccgaaatgcgcgcggcgcaggaccccgacgccgcgcgcggcctgcgcgagttcgaccgcgcgctgtggggccatgcccgccacgtggccggcaacgcgctgcgggcgctgggcggcgcgctgagcggcgcgcggctgggccgcgccccgcgcgcggcggcgccttcgatgcacgcctactatcgcgcgctgtcgcgctacagcagcgccttcgcgctgctggccgacgcctgcatgctggcgctgggcggcagcctgaagcggcgcgagcgactgtcggcgcggctgggcgacatcctggcgcagatgtacctggccagcgcggtgctcaagcgtttcgaggacgacggccgccaggccgaggacgagcccctggcgcattgggccgtgcgcgacgcgctgtaccggctgcagcaggccttcgaaggcgtgctggacaatctgcccaaccggttggtggcctggacgatgcgatgtatcatcttcccatggggacatccccaggccgagccggacgacaggctgggccaggcggtggcgcagttgctgatcgcccccggcgcggcgcgcgaccgcctgaccgccagctgcttcatccccgccaatgaggacgagccggtgggcgcgctggaacaggccctggcggcggcgatcgcggccgaacccctcgaggcgcgcatccgcgccgccgagaaatccggcgacctcgaaggcgatccgcgcgccaatgtgcgcgacatcgcccaggccgcccacgccgccggcgtgctcgacgaggacgattaccgcctcgtcgaacgacgcaaccgcttgcgcgaccgcgtcatcggcgtggacgattttcccttcgattacggcattaccggcgcactcaggccggcggcgcgacgccaggcggcataa

SEQ ID NO: 35625 - protein, 777 aa, Bordetella parapertussis 12822
MNAVLVVLSGAALLGIGPLRRALLSRPILAAYRKVLPAMSDTEREALEAGTVWWEGELFGGRPDWRKLLDYPRPVLSAAEQRFLDHETEQACRLVDDWHITHERFDLPPQVWAYIREQGFLGMIIPKEYDGLGFCAHAHSAIVTKLSTRSSALAVSVMVPNSLGPAELLLHYGTEAQKRHYLPRLARGEEIPAFALTSPWAGSDAAAIPDHGTVCKGQWQGQEVLGMRVTWDKRYITLAPVCTLLGLAFRLYDPDGLLGGRKDLGITCALVPHDHPGVDTGRRHFPLNAMFMNGPTRGTDVFMPLEFIIDGPAMAGQGWRMLMECLAAGRSISLPSSNADMAQLTARAVGAYARVRSQFRMPVGKFEGVEEALARIGGHTYLMDAARVMTAGAVDLGEKPAVASAIVKYHVTERARQVVNDGMDISGGKGICLGPSNFLGRAYQQLPIGITVEGANILTRSLIIFGQGAIRCHPYVLAEMRAAQDPDAARGLREFDRALWGHARHVAGNALRALGGALSGARLGRAPRAAAPSMHAYYRALSRYSSAFALLADACMLALGGSLKRRERLSARLGDILAQMYLASAVLKRFEDDGRQAEDEPLAHWAVRDALYRLQQAFEGVLDNLPNRLVAWTMRCIIFPWGHPQAEPDDRLGQAVAQLLIAPGAARDRLTASCFIPANEDEPVGALEQALAAAIAAEPLEARIRAAEKSGDLEGDPRANVRDIAQAAHAAGVLDEDDYRLVERRNRLRDRVIGVDDFPFDYGITGALRPAARRQAA

SEQ ID NO: 35626 - DNA, 2148 bp, Bordetella parapertussis 12822
  CDS (1)..(2148): transl_table=11
atgcccggcatgtcggacaccgaacgcgaggccatcgaggccggcgatgtctggtgggacgccgacctgttcaccggcaatcccgattggcgcaagctgctggatgtgccgccggccgagctgacggccgccgagcagcgcttcatcgatggcccggtggcgcagctgtgcgccatgctggacgaatgggacatcacctggtcgcgccgcgatctgcccgagccggtctggcagttcatgaaatcgcagcgctttttcggcatgatcattcccgagcaatacggcggcctgggcttttctccgtatgcgcattcggaggtggtgcggcgcatttcggcttattcgatcacggcgggggtgaccgtgatggtgccgaattcgctcggaccgggcgagctgctgctgcagttcggcacgcccgagcagcgcgaattctggctgccgcgcctggccgacggcaccgaggtgccgtgcttcggcctgaccagccccgaggccggctcggacgcggcctccatgaccgacaccggcgtggtgtgccgccaggtggtggatggacgcgagatgctgggcatacgcctgaactggcacaagcgctacatcacgctggggccggtggccacggtgctgggcctggcgttcaagctgtccgaccccgagggcctgctgggcggtccggccgatatcggcatttcggtggcgctggtgcccaccgaggcgcccggcgtggaaatcggccggcgccatctgccggccatgcaggtattccagaacggccccaaccgcggccgcgatgtcttcgtgccgatcgaggccctgatcggcggaccggcgcgcgccggccagggctggcagatgctgatgagcgcgctggccgccggccgcggcatctcgctgccgtcgctgtcggccgcggcggccgtggtcagcgcgcgcgccaccggcatgtacgcgcgtatccgccgccagttcggcatcccggtcggccagttcgagggcgtgcaggagaagctggcgcggctggcgggcaacgcctatctggtcgaggccgcgcgccgcctgacctgcgcggcgctgaaccaggggcacaagccggcggtgatctccgccatcatgaaataccacgccaccgagcgcatgcgcgagtcggtcgacgacgcgatggacgtgcacgccggcaaggcggtgatcgacggtccgtcgaactatctcggcaatctgtatcgcgcggtgcccatcgccatcacggtcgagggcgccaatattctgacgcgctgcctgatcgtattcggccagggagcgatccgcgcccacccgtacctgatgggcgaggtgctggctctgggcgaccaggacacccagcgcggcctggaggccttccatggcctgttctggaagcatctgggccacgccggcgccaacaccttgcgggcctggggccgggcctggaccggcgggctgctggcgcgcgcgccggtcagcggacccacggcgatccattaccgccagctcagccgctacgcggcggcgttcgcgctgctggccgatgtggcgctgggcgcgctgggcggagcgctcaagcgccgcgaaatgatttcggcgcgcctgggcgacatcctgtccgaactgtatctgctgtcggcggtgctcaagcgctgggaggacgaggggcgctgccacggcgaccttgccctggtgcgctggtgcatggaggatggccgccatcgcatcgagacccgcatcgaccaggtgctgtccaacctgcccaaccggcccttggcatggctggtgcgcgcgctgatcctgcccgtgcggctggcgcgcggcccctcggatgcgctgacgcgcgaatgcgcggccttgctgctgtcgccgtcgcgcacgcacgaccggctggcggccgacctgcagcgcgatggcgacgatccgctaggccgcctggagcgcgcctttgccctggtgacggcggtgcagcccctgctggaccgcctgcggcgcgaaggcgtgccggattggcgcgacgcgctgcgcggcggcgcgctgacgcccgagcaggcggccgagatcgaggccgccgaggcagcggtggcgggcgtgctggcggtcgatgatttcgcgccgcaggagctgaccggccgcgggcggtag

SEQ ID NO: 35627 - protein, 715 aa, Bordetella parapertussis 12822
MPGMSDTEREAIEAGDVWWDADLFTGNPDWRKLLDVPPAELTAAEQRFIDGPVAQLCAMLDEWDITWSRRDLPEPVWQFMKSQRFFGMIIPEQYGGLGFSPYAHSEVVRRISAYSITAGVTVMVPNSLGPGELLLQFGTPEQREFWLPRLADGTEVPCFGLTSPEAGSDAASMTDTGVVCRQVVDGREMLGIRLNWHKRYITLGPVATVLGLAFKLSDPEGLLGGPADIGISVALVPTEAPGVEIGRRHLPAMQVFQNGPNRGRDVFVPIEALIGGPARAGQGWQMLMSALAAGRGISLPSLSAAAAVVSARATGMYARIRRQFGIPVGQFEGVQEKLARLAGNAYLVEAARRLTCAALNQGHKPAVISAIMKYHATERMRESVDDAMDVHAGKAVIDGPSNYLGNLYRAVPIAITVEGANILTRCLIVFGQGAIRAHPYLMGEVLALGDQDTQRGLEAFHGLFWKHLGHAGANTLRAWGRAWTGGLLARAPVSGPTAIHYRQLSRYAAAFALLADVALGALGGALKRREMISARLGDILSELYLLSAVLKRWEDEGRCHGDLALVRWCMEDGRHRIETRIDQVLSNLPNRPLAWLVRALILPVRLARGPSDALTRECAALLLSPSRTHDRLAADLQRDGDDPLGRLERAFALVTAVQPLLDRLRREGVPDWRDALRGGALTPEQAAEIEAAEAAVAGVLAVDDFAPQELTGRGR

SEQ ID NO: 35628 - DNA, 2349 bp, Bordetella bronchiseptica RB50
  CDS (1)..(2349): transl_table=11
atgaacgctgtactggtcgtgttgtcgggcgcggcgctgctggccgcggcgctgctgggcatcgggccgctgcggcgcgccctgctgagccgccccatcctggcggcctaccgcaaggtgctgcctgccatgtccgacacggaacgcgaggccctggaggccggcaccgtgtggtgggaaggcgagttgttcggcggccgcccggattggcgcaagctgctggactatccgcgtccggtcctgagcgcggccgaacagcgctttctcgaccacgagaccgaacaggcgtgccgcctggtcgatgactggcacattacccacgagcgtttcgatctgccgccgcaggtatgggcctacatcagggaacagggtttcctgggcatgatcattccgaaggaatacggcggcctgggcttctgcgcccatgcgcattcggcgatcgtcaccaagctgtcgacgcgctcgtcggcgctggcggtgtcggtcatggtgcccaactcgctggggccggccgaactgttgctgcactacggcaccgaggcgcagaagcgccactacctgccgcgcctggcccgcggcgaggaaataccggccttcgcgctcaccagcccgtgggccggctcggacgcggccgccattcccgaccacggcacggtctgcaagggccagtggcaaggccaggaagtcctgggcatgcgcgtcacctgggacaagcgctacatcacgctggcgcccgtctgcacgctgctggggctggcgtttcgcctgtacgacccggacggcctgctgggcggacgcaaggatctcggcatcacctgcgccctggtgccgcacgatcatcccggcgtcgacaccggccggcgccattttccgctcaacgcgatgttcatgaacggccccacccgcggcacggacgtattcatgccgctggagttcatcatcggcgggcccgccatggccggccagggctggcgcatgctgatggaatgcctggcggcgggccgctcgatctcgctgccgtcgtccaacgcaggcatggcccagctgaccgcgcgcgccgtgggcgcctatgcgcgggtgcgcagccagttccgcatgccggtgggcaaattcgaaggcgtggaggaggcgctggcgcgcatcggcggccacacctacctgatggacgcggcgcgcgtcatgacggccggcgccgtggacctgggcgaaaagcccgccgtggcatcggccatcgtcaaataccacgtcaccgaacgcgcccgccaggtggtcaacgacggcatggacatcagcggcggcaagggcatctgcctgggtccgtcgaacttcctgggccgcgcctaccagcaactgccgatcggcatcacggtggaaggcgccaacattctcacgcgcagcctgatcatcttcggccagggcgcgatccgctgccatccctacgtgctggccgaaatgcgcgcggcgcaggaccccgacgccgcgcgcggcctgcgcgagttcgaccgcgcgctgtggggccatgcccgccacgtggccggcaacgcgctgcgggcgctgggcggcgcgctgagcggcgcgcggctgagccgcgccccgcgcgcggcggcgccttcgatgcacgcctactatcgcgcgctgtcgcgctacagcagcgccttcgcgctgctggccgacgcctgcatgctggcgctgggcggcagcctgaagcggcgcgagcggctgtcggcgcggctgggcgacatcctggcgcagatgtacctggccagcgcggtgctcaagcgtttcgaggacgacggccgccaggccgaggacgagcccctggcgcattgggccgtgcgcgacgcgctgtaccggctgcagcaggccttcgaaggcgtgctggacaatctgcccaaccggttggtggcctggacgatgcgacgtatcatcttcccatggggacatccccaggccgagccggacgacaggctgggccaggcggtggcgcagttgctgatcgcccccggcgcggcgcgcgaccgcctgaccgccagctgcttcatccccgccaatgaggacgagccggtgggcgcgctggaacaggccctggcggcggcgatcgcggccgaacccctcgaggcgcgcatccgcgccgccgagaaatccggcgacctcgaaggcgatccgcgcgccaatgtgcgcgacatcgcccaggccgcccacgccgccggcgtgctcgacgaggacgattaccgcctcgtcgaacgacgcaaccgcttgcgcgaccgcgtcatcggcgtggacgattttcccttcgattacggcattaccggcgcactcaggccggcggcgcgacgccaggcggcataa

SEQ ID NO: 35629 - protein, 782 aa, Bordetella bronchiseptica RB50
MNAVLVVLSGAALLAAALLGIGPLRRALLSRPILAAYRKVLPAMSDTEREALEAGTVWWEGELFGGRPDWRKLLDYPRPVLSAAEQRFLDHETEQACRLVDDWHITHERFDLPPQVWAYIREQGFLGMIIPKEYGGLGFCAHAHSAIVTKLSTRSSALAVSVMVPNSLGPAELLLHYGTEAQKRHYLPRLARGEEIPAFALTSPWAGSDAAAIPDHGTVCKGQWQGQEVLGMRVTWDKRYITLAPVCTLLGLAFRLYDPDGLLGGRKDLGITCALVPHDHPGVDTGRRHFPLNAMFMNGPTRGTDVFMPLEFIIGGPAMAGQGWRMLMECLAAGRSISLPSSNAGMAQLTARAVGAYARVRSQFRMPVGKFEGVEEALARIGGHTYLMDAARVMTAGAVDLGEKPAVASAIVKYHVTERARQVVNDGMDISGGKGICLGPSNFLGRAYQQLPIGITVEGANILTRSLIIFGQGAIRCHPYVLAEMRAAQDPDAARGLREFDRALWGHARHVAGNALRALGGALSGARLSRAPRAAAPSMHAYYRALSRYSSAFALLADACMLALGGSLKRRERLSARLGDILAQMYLASAVLKRFEDDGRQAEDEPLAHWAVRDALYRLQQAFEGVLDNLPNRLVAWTMRRIIFPWGHPQAEPDDRLGQAVAQLLIAPGAARDRLTASCFIPANEDEPVGALEQALAAAIAAEPLEARIRAAEKSGDLEGDPRANVRDIAQAAHAAGVLDEDDYRLVERRNRLRDRVIGVDDFPFDYGITGALRPAARRQAA

SEQ ID NO: 35630 - DNA, 2148 bp, Bordetella bronchiseptica RB50
  CDS (1)..(2148): transl_table=11
atgcccggcatgtcggacaccgaacgcgaggccatcgaggccggcgatgtctggtgggacgccgacctgttcaccggcaatcccgattggcgcaagctgctggatgtgccgccggccgagctgacggccgccgagcagcgcttcatcgatggcccggtggcgcagctgtgcgccatgctggacgaatgggacatcacctggtcgcgccgcgatctgcccgagccggtctggcagttcatgaaatcgcagcgctttttcggcatgatcattcccgagcaatacggcggcctgggcttttctccgtatgcgcattcggaggtggtgcggcgcatttcggcttattcgatcacggcgggggtgaccgtgatggtgccgaattcgctcggaccgggcgagctgctgctgcagttcggcacgcccgagcagcgcgaattctggctgccgcgcctggccgacggcaccgaggtgccgtgcttcggcctgaccagccccgaggccggctcggacgcggcctccatgaccgacaccggcgtggtgtgccgccaggtggtggatggacgcgagatgctgggcatacgcctgaactggcacaagcgctacatcacgctggggccggtggccacggtgctgggcctggcgttcaagctgtccgaccccgagggcctgctgggcggtccggccgatatcggcatttcggtggcgctggtgcccaccgaggcgcccggcgtggaaatcggccggcgccatctgccggccatgcaggtattccagaacggccccaaccgcggccgcgatgtcttcgtgccgatcgaggccctgatcggcggaccggcgcgtgccggccagggctggcagatgctgatgagcgcgctggccgccggccgcggcatctcgctgccgtcgctgtcggccgcggcggccgtggtcagcgcgcgcgccaccggcatgtacgcgcgtatccgccgccagttcggcatcccggtcggccagttcgagggcgtgcaggagaagctggcgcggctggcgggcaacgcctatctggtcgaggccgcgcgccgcctgacctgcgcggcgctgaaccaggggcacaagccggcggtgatctccgccatcatgaaataccacgccaccgagcgcatgcgcgagtcggtcgacgacgcgatggacgtgcacgccggcaaggcggtgatcgacggtccgtcgaactatctcggcaatctgtatcgcgcggtgcccatcgccatcacggtcgagggcgccaatatcctgacgcgctgcctgatcgtattcggccagggagcgatccgcgcccacccgtacctgatgggcgaggtgctggctctgggcgaccaggacacccagcgcggcctggaggccttccatggcctgttctggaagcatctgggccacgccggcgccaacaccttgcgggcctggggccgggcctggaccggcgggctgctggcgcgcgcgccggtcagcggacccacggcgatccattaccgccagctcagccgctacgcggcggcgttcgcgctgctggccgatgtggcgctgggcgcgctgggcggagcgctcaagcgccgcgaaatgatttcggcgcgcctgggcgacatcctgtccgaactgtatctgctgtcggcggtgctcaagcgctgggaggacgaggggcgctgccatggcgaccttgccctggtgcgctggtgcatggaggatggccggcatcgcatcgagacccgtatcgaccaggtgctgtccaacctgcccaaccggcccttggcatggctggtgcgcgcgctgatcctgcccgtgcggctggcgcgcggcccctcggatgcgctgacgcgcgaatgcgcggccttgctgctgtcgccgtcgcgtacgcacgaccggctggcggccgacctgcagcgcgatggcgacgatccgctaggccgcctggagcgcgcctttgccctggcgacggcggtgcagcccctgctggaccgcctgcggcgcgaaggcgtgccggattggcgcgacgcgctgcgcggcggcgcgctgacgcccgagcaggcggccgagatcgaggccgccgaggcggcggtggcgggcgtgctggcggtcgatgatttcgcgccgcaggagctgaccggccgcgggcggtag

SEQ ID NO: 35631 - protein, 715 aa, Bordetella bronchiseptica RB50
MPGMSDTEREAIEAGDVWWDADLFTGNPDWRKLLDVPPAELTAAEQRFIDGPVAQLCAMLDEWDITWSRRDLPEPVWQFMKSQRFFGMIIPEQYGGLGFSPYAHSEVVRRISAYSITAGVTVMVPNSLGPGELLLQFGTPEQREFWLPRLADGTEVPCFGLTSPEAGSDAASMTDTGVVCRQVVDGREMLGIRLNWHKRYITLGPVATVLGLAFKLSDPEGLLGGPADIGISVALVPTEAPGVEIGRRHLPAMQVFQNGPNRGRDVFVPIEALIGGPARAGQGWQMLMSALAAGRGISLPSLSAAAAVVSARATGMYARIRRQFGIPVGQFEGVQEKLARLAGNAYLVEAARRLTCAALNQGHKPAVISAIMKYHATERMRESVDDAMDVHAGKAVIDGPSNYLGNLYRAVPIAITVEGANILTRCLIVFGQGAIRAHPYLMGEVLALGDQDTQRGLEAFHGLFWKHLGHAGANTLRAWGRAWTGGLLARAPVSGPTAIHYRQLSRYAAAFALLADVALGALGGALKRREMISARLGDILSELYLLSAVLKRWEDEGRCHGDLALVRWCMEDGRHRIETRIDQVLSNLPNRPLAWLVRALILPVRLARGPSDALTRECAALLLSPSRTHDRLAADLQRDGDDPLGRLERAFALATAVQPLLDRLRREGVPDWRDALRGGALTPEQAAEIEAAEAAVAGVLAVDDFAPQELTGRGR

SEQ ID NO: 35632 - DNA, 2454 bp, Chromobacterium violaceum ATCC 12472
  CDS (1)..(2454): transl_table=11
atgattgctgccgttcttctggtcgtgctgctcggcgcgctggcttacttcgccgcgccggtgctggtctggaccgtgggtgtcgccgcctggctcgccgcgctccagttcgtattccactgtccgctgcctgtcgccgcctgggcggttttcgccgcggtcgccgcggtgctcaacatcgtgccgctgcgccgcgccgtatttaccggcccggtattcggcgtgttcaagaaaatcacgcctgcgatgtcgcagaccgagcaggaggccatcaacgccggcacggtgtggtgggaccgcgacctgttctccggcaagccggattaccagcgcctgctgtcttttccggatcccaagctgtctccggaagagcaggccttcatcgacggtccgaccgagcagctgtgcggcatgatcgacgactggaagatcacccacgagctgaaggatctgccgccggaagtttggcagttcatcaaggatcatggcttcctgggcatgatcgtcaagaagaagtacggcggcctggagttctccaactacgcgcacgccaaggtggtgaccaagatcgccacccgcggcggcacggctgccgtgtcggtgatggtgcccaactcgctcggaccgggcgagctgctgcagcattacggcaccgaggagcagaaggactactacctgccgcgcctggccaagggcgtggaagtgccgtgcttcgcgctgaccagcccgtatgccggctccgacgccggcgccatcccggactacggcgtggtctgccgcggctcctacacccatccacgcaccggcgaacgtttcgagaacgtgctgggcgtgcgcatcagctgggagaagcgctggatcacgctggctccggtggccaccattctgggtctggcgttcaagatgtacgaccctgagcatctgctgggcgacaaggaagacatcggcatcacctgcgcgctggtgccgacggagcacgagggcgtcgaaatcggccgccgccacttcccgggcggctccgccttcatgaacggccccacctggggcaaggatgtgttcattccgctggactggatcatcggcggccgcgactacgccggccaaggctggcgcatgctggtggaatgcctgtcggtcggccgctgcatctcgctgccggcgatgtccgtggcctgcggcaagctgaccacctggaccacgggcgcctacgcccgcatccgcgaccagttcggcctgcctatcggcaagttcgagggcgtggacgaggcgatggcccgcatcggcggctatacctaccagatggaggcgtcgcaggacctggccttgaccggcctggacaacggcgagaagccgtcggtgctgtccgccatcctgaagtaccacaacaccgagcgcatgcgcaaaacgctgaacgacgcgatggacgtgcatggcggcaaggccgtggtgctgggtccgcgcaactacctggcgcgcggctaccaggcgatcccgatcggcatcaccgtggaaggcgccaacatcctgacccgttcgatgatcatctacggccagggcgcgatccgctgccacccgttcgtgctgcgcgagatgaagtcggcgatggccaacgacggcgccgagttcgacaaggcgattaccggccacatcaacttcgtgatcagcaatttcgtgcgctcgctgtggctgggcctgaccggcgcctgcctcgcgtccagccccaggggcggcgccaccgcggcctactacaagcgcgtcacccgcttgtccagcgccttcgcgctgctgtccgacatggccatgttcagcctgggcggctcgctgaagttccgggagaagctgtccgcccgcctgggcgacatgctgtccggcctgtacatcgccaccgcgtcgctgaagcgcttcgagcgcgacggcgcgcccaaggaagacatcgccgtgatgagctgggcggtggagaacgcgctgtacgacgtgcaggtggcgatggacggcttcctggccaacctgcccagccgcggcctggcctggattctgcgccgcgtgatcttcccgtggggcctgacgctgaagccggcgtccgaccgcaccggcaccaaggtggcccgcgccatgatggagccgggcgccacccgcgagcgcctgacccgcggcatgtacgtgcctaagtccgaggcggatccggtcggcgtgctggaccacgccttgcaagccatcctggccaccgagccggtggagcagaagctgcgcaagctggcgcgcgacggcaagttcaagtccatcaccgcgcgcgagcgcctggcggaggccttgcagaccggcctgatcaaccaggaagaattcgacgccgtcacccgagcccgcaagctgaagcgcgacgtgatcatggtggacgacttcgacaagaagctggagcagcatgacgacaaattgctgcagcgcctgattttctaa

SEQ ID NO: 35633 - protein, 817 aa, Chromobacterium violaceum ATCC 12472
MIAAVLLVVLLGALAYFAAPVLVWTVGVAAWLAALQFVFHCPLPVAAWAVFAAVAAVLNIVPLRRAVFTGPVFGVFKKITPAMSQTEQEAINAGTVWWDRDLFSGKPDYQRLLSFPDPKLSPEEQAFIDGPTEQLCGMIDDWKITHELKDLPPEVWQFIKDHGFLGMIVKKKYGGLEFSNYAHAKVVTKIATRGGTAAVSVMVPNSLGPGELLQHYGTEEQKDYYLPRLAKGVEVPCFALTSPYAGSDAGAIPDYGVVCRGSYTHPRTGERFENVLGVRISWEKRWITLAPVATILGLAFKMYDPEHLLGDKEDIGITCALVPTEHEGVEIGRRHFPGGSAFMNGPTWGKDVFIPLDWIIGGRDYAGQGWRMLVECLSVGRCISLPAMSVACGKLTTWTTGAYARIRDQFGLPIGKFEGVDEAMARIGGYTYQMEASQDLALTGLDNGEKPSVLSAILKYHNTERMRKTLNDAMDVHGGKAVVLGPRNYLARGYQAIPIGITVEGANILTRSMIIYGQGAIRCHPFVLREMKSAMANDGAEFDKAITGHINFVISNFVRSLWLGLTGACLASSPRGGATAAYYKRVTRLSSAFALLSDMAMFSLGGSLKFREKLSARLGDMLSGLYIATASLKRFERDGAPKEDIAVMSWAVENALYDVQVAMDGFLANLPSRGLAWILRRVIFPWGLTLKPASDRTGTKVARAMMEPGATRERLTRGMYVPKSEADPVGVLDHALQAILATEPVEQKLRKLARDGKFKSITARERLAEALQTGLINQEEFDAVTRARKLKRDVIMVDDFDKKLEQHDDKLLQRLIF

SEQ ID NO: 35634 - DNA, 2436 bp, Photorhabdus luminescens subsp. laumondii TTO1
  CDS (1)..(2436): transl_table=11
atgaccacattgagtattattctattcttagtcttgattgggatactttgctatcacaaagtcaatctcagtctcagcagcctactgctccttgtctataccgtcctgatgggcgctattgatgcatggagctactggatgttgttaccaatggccattattctgttcccgctgaattttgcgccaatgcgccactccttactgactgttccggccttaaaagccttccgtaaagtaatgccaagtctatctcgcacggaaaaagaagctcttgatgcaggaactacctggtgggaaggcgagctgttccgcggtaaacccgactggaaaaaattgcatgactatccaaggcctcagctaaccgctgaagaacaagcatttctggatggcccggtagaagaagcttgccgcatgaccaatgatttccagataagccatgaacttgctgatttaccacctgagttatggcgttacctgaaagaacaccgcttctttgccatgatcattaaaaaagagtatggcggtctggaattctcagcctatgcacaggcacgagtcctgcaaaaattggcgggggcatccggcattttggcaatcaccgtaggtgtacctaactctctcggcccaggtgaattgttacagcattatggcaccgaagagcagaaaaaccgctatctacccgggcttgcccgtggtgaagagatcccatgtttcgcactgaccagcccggaagctggctctgatgccggatcaatcccagatacaggcgtagtctgtatgggagaatggcaaggtgaacaaattctcggtatgcgcctgacctggaacaaacgttatatcacacttgcacctatcgccaccgtactcggtctggctttcaaactgtccgaccctgaccatttattgggtgatacagaagaattgggcattacctgtgcattgatcccgaccaatgtaccaggagtagaaattggtcatcgccatttcccactgaatattccattccagaatggcccgactcgcggtaaagatatctttgttccgatcgactatattattggcgggccaaaaatggccggacaaggctggcgtatgctggttgagtgtctgtctgttggccgcggtatcactctgccatcaaatgcaaccggcggtttgaaaagcgttgcgatggcaattggtgcatactcttatatccgccgccaatttaaaatgccaattggtaaaatggaagggattgaagaaccactagcacgcattgccggtaacacctatttgatggatgccgcttcaacacttgcaacaaccggtatcatgctaggtgaaaaaccctctgtgttatccgctatcgtgaaatatcactgtactcaccgaggccaacgctcaattattgacgcaatggatattgccggtggtaaaggtatctgccttggtccatccaacttccttgctcgcgcttatcaaggtgcacctatcgccattaccgttgaaggtgccaatattctgacccgtaacatgattatctacggtcagggagctatccgctgccatccttatgtacttgacgaaatggccgcggttgaaaataaccgtattaaagattttgataaggcactgtttagccaccttggtcacgttgctagtaacacgttacgcagcttctggcttggcttaaccaatggccgcaccagcagcacaccggtcaatgatgcaacacgccgttactatcagcaattaaaccgcctgagcaccaaccttgcgctattatcagatgtggcaatgggggtattaggtggtagcctgaaacgccgtgaacgtgtctccgcccgtcttggagatgttttgagtcaaacctatctggcttccgcgacattaaaacgctatgaagatgaaggtcgtcaaaaagaagatttgccgctagttcagtgggccgttcaagatagtttgtatcaggcagaacaggcgatagataacttactgagtaacttcccgaatcgtctggttgccggtctgatgcgtgttattgtcttccctctagggcgtgtacactcagcaccatctgaccatctggatcacaaactggcccagatcttacagcaaccttcggctacccgtgatcgcattggccgaggtcaatatctgacaccaaacgagcacaatcctcacggattattggaagaagcgctgcacgatattattgccgcagaaccgatccacgcccgtttgagtcgcgaagcaggtaagcgtcttggctttactcgcctggataaactggcagaacaggcactcgcagaacgtaagatcacgccagacgaggccgcaattctaaaacgtgcggaagcaagccgtctgcgttctattaatgtcgatgagtttgaaccagaagcgctggctgttcctgcccgcgttgaaaaactgagaacagaagccgcctga

SEQ ID NO: 35635 - protein, 811 aa, Photorhabdus luminescens subsp. laumondii TTO1
MTTLSIILFLVLIGILCYHKVNLSLSSLLLLVYTVLMGAIDAWSYWMLLPMAIILFPLNFAPMRHSLLTVPALKAFRKVMPSLSRTEKEALDAGTTWWEGELFRGKPDWKKLHDYPRPQLTAEEQAFLDGPVEEACRMTNDFQISHELADLPPELWRYLKEHRFFAMIIKKEYGGLEFSAYAQARVLQKLAGASGILAITVGVPNSLGPGELLQHYGTEEQKNRYLPGLARGEEIPCFALTSPEAGSDAGSIPDTGVVCMGEWQGEQILGMRLTWNKRYITLAPIATVLGLAFKLSDPDHLLGDTEELGITCALIPTNVPGVEIGHRHFPLNIPFQNGPTRGKDIFVPIDYIIGGPKMAGQGWRMLVECLSVGRGITLPSNATGGLKSVAMAIGAYSYIRRQFKMPIGKMEGIEEPLARIAGNTYLMDAASTLATTGIMLGEKPSVLSAIVKYHCTHRGQRSIIDAMDIAGGKGICLGPSNFLARAYQGAPIAITVEGANILTRNMIIYGQGAIRCHPYVLDEMAAVENNRIKDFDKALFSHLGHVASNTLRSFWLGLTNGRTSSTPVNDATRRYYQQLNRLSTNLALLSDVAMGVLGGSLKRRERVSARLGDVLSQTYLASATLKRYEDEGRQKEDLPLVQWAVQDSLYQAEQAIDNLLSNFPNRLVAGLMRVIVFPLGRVHSAPSDHLDHKLAQILQQPSATRDRIGRGQYLTPNEHNPHGLLEEALHDIIAAEPIHARLSREAGKRLGFTRLDKLAEQALAERKITPDEAAILKRAEASRLRSINVDEFEPEALAVPARVEKLRTEAA

SEQ ID NO: 35636 - DNA, 2286 bp, Vibrio vulnificus YJ016
  CDS (1)..(2286): transl_table=11
atgtgctctctaagaaaaaaatgggtcagcgacccagcatttaaaatgttcaaaaaagtacttcctcctttgtctgaaacagagaaggaagcaatggaagcgggaagtgtttggtgggacgcggagctgttttctgggaagccagatttctccaaactgcatcactatccaaaaccgaccttgtcggttgaagagcaagctttcattgataacgagctagaaacactgcttgcaatgctcgatgatcataagattgtgaaagaagatcgtgatttaccgaaagaggtgtgggaatacctgcgtaaagagcgttttttctcactgatcatttcgaagaaatatggtggccgtcagttttctgcactggcgaactcaaccatagtaaccaaaattgcgacacgtagtatcagtaccgccgtgacggttatggtaccgaactcattaggccctggtgagctcctttctcactacggtacacaggcacaaaaagattactggctacctcgtcttgccgatggtacagacattccttgttttgcattgacgggtccagaagctggctcggatgctggcggtattcccgatcaaggcgtggtctgctatggcatgcatgaaggcaaagaagttcttggtattcgtttgagttggaacaagcgttacatcactctcgcccctgtcgcaaccgtgcttggtctcgcatttaaacttcaagaccctgatcatctgttaggtgataaaaccgatgttggcatcacttgtgctttgattcccgccgatcatgaaggtgtggtgattggtgagcgtcacgatcctctaggtctggcgtttatgaacggcccaactcgtggccatgatgtgttcatcccgatggactggctgattggtggtgcggattatgctggtaaaggctggcgcatgctggtggagtgtttatcggctgggcgtggtatttcactgcctgcgcttggcacggccataggtcatttgaccacgcgcacaacgggggcatacgcctatgtgcgcaaacaatttggcatgtcgatcggtaagtttgaaggtgttgcagaagcgatgggacgaattggcggtttgacctacttattggaagccactcgtactttgaccacaacatcgctcgatctgaaggaaaaacctggcattgtaaccgctattgctaagtatcacatgacggagatggcaagaacgattcttgatgactcgatggatattcactctggtcgtgcgattcaagatggtccgatgaactacctagcgacccattatcttggtatccctgtagcgattacggttgaaggtgccaatattctcactcgtaacctaatgatttttggccaaggtgcaacgcgatgccatccttacgttttgaaagaaatggaagccgcagcgaacccagatgccaaagaaggtgcgaaacaattcgacgatttgctgtttaagcatattaaacatgccacgttcaatactctcggtgccttaggtgccgcgctaactggctcacgctttgtaaaagcacacatgagcggcccaacgcaacgttactacaaagacatgacacgtctgagtcgagccttggcggtcagtgccgatttcgccatgttaacactaggcggtgaactgaaacgtaaagagatgatttctgcacgtttgggtgatggccttagctatctttacatggcctcagcagcattgaaaaaatatgaagacgaaggtcgccaacaagcggatctcaacttcgtccattacgcagtgcagcactgtttgcatcacgcagcgaagtcgttgaacgaagcctatgctaacttcccagtgaaatatgtcggtggcgtgctcaaagggctactattcccacttggcaatcactttgctaaaccaagtgatgaactctgtgtggatattgcggaagcgatgatgaccccaggcgtgcagcgcgaccgattgactaacttgtgttacatcggcaaagagaaagacgacagtgttggtttgatggagcaagcattccttgcgatgtacgacatcaaaccgctggagcgtaagctgatgaaagcggcaaaagatggcaaagtggctcgtaaaggcttgctggctgagcgtctgcaacaagcgctagacgccgatgtgctaacgcaaagtgaagtggataaaatcttggccgccgataagctgcgttaccaagcgatccaagtggatcacttcagctttgacttctcaaagacgcttaccaatgcgcctgagaaaaaaaagaagttaactagcgcggcgtag

SEQ ID NO: 35637 - protein, 761 aa, Vibrio vulnificus YJ016
MCSLRKKWVSDPAFKMFKKVLPPLSETEKEAMEAGSVWWDAELFSGKPDFSKLHHYPKPTLSVEEQAFIDNELETLLAMLDDHKIVKEDRDLPKEVWEYLRKERFFSLIISKKYGGRQFSALANSTIVTKIATRSISTAVTVMVPNSLGPGELLSHYGTQAQKDYWLPRLADGTDIPCFALTGPEAGSDAGGIPDQGVVCYGMHEGKEVLGIRLSWNKRYITLAPVATVLGLAFKLQDPDHLLGDKTDVGITCALIPADHEGVVIGERHDPLGLAFMNGPTRGHDVFIPMDWLIGGADYAGKGWRMLVECLSAGRGISLPALGTAIGHLTTRTTGAYAYVRKQFGMSIGKFEGVAEAMGRIGGLTYLLEATRTLTTTSLDLKEKPGIVTAIAKYHMTEMARTILDDSMDIHSGRAIQDGPMNYLATHYLGIPVAITVEGANILTRNLMIFGQGATRCHPYVLKEMEAAANPDAKEGAKQFDDLLFKHIKHATFNTLGALGAALTGSRFVKAHMSGPTQRYYKDMTRLSRALAVSADFAMLTLGGELKRKEMISARLGDGLSYLYMASAALKKYEDEGRQQADLNFVHYAVQHCLHHAAKSLNEAYANFPVKYVGGVLKGLLFPLGNHFAKPSDELCVDIAEAMMTPGVQRDRLTNLCYIGKEKDDSVGLMEQAFLAMYDIKPLERKLMKAAKDGKVARKGLLAERLQQALDADVLTQSEVDKILAADKLRYQAIQVDHFSFDFSKTLTNAPEKKKKLTSAA

SEQ ID NO: 35638 - DNA, 2451 bp, Bdellovibrio bacteriovorus HD100
  CDS (1)..(2451): transl_table=11
gtggattctatcagctcattctatggaatgtttttggagaactacacgggcctgtgggtattgggctctgtggtacttctgttgtttgtgggctttttctcaagccctctgattgtgtgggcgatagccctggccgcaattcttgtcggctttggtgcgccaacctggctgctggcggtttacgctgtcatcgccatcatcttcctgatcacgccgctgcgtgcagccctggtgacatccggtttgctggcattcatgaagaagatgcagttccttccgaaaatctctgacacagaaaaagcggcactggatgctggtgctgtgtgggttgagaaagatcttttctctggcaacccgaatttcggcaatcttctgaaagaagactatccgcaactgacggcggaagaacaagccttcatggacggcccggtgaacaacctgtgcaaggttttggatcactggaaaatccacaaagacaaagacatccctaaagaagcctgggatatcatcaagaaagaaaaattcctgggtatgatcatcccgaaagagtacggcggtcttggattctccgcgctggcgcactcggaagtgatcatgaaaatctcttcccgttctttgtccacagcaatcacggtgatggttccaaactctttgggtcctgcagagcttctggcgcactacggaactgacgctcagaaaaaccgctatcttccacgtctggcaacgggtgacgaaatcccttgctttggtttgactgagccaacggcgggttcggatgcgggttccatcacttccaccggtgtacttttcaaaggtccggatggaaaactgcaaatcaaattgaactggaataaacgctggatcacactggcggcaatctctacaacgatcggtcttgccttccgtctgcgcgaccctgaaaatctgctgggcaaaggcgaagacgtgggtatcacgtgtgcgttgatcccttccagcactccaggtgttgttttgggtcgtcgtcatgatccactgggtattccgttctataactgtccgactcaaggtaaagacgttatcgttaacgccgaagatgccatcatcggtggtgttgccggagccggtaagggctggttgatgttgatggagtgtctggctgcaggtcgtggtatctccttgccagctcaggcaacgggtggcgcgaaattggctgctcgtgttgtgtctgcgcactctttggttcgtcgtcagttcggtatgtccatcggtcgcttcgagggtgttgaagaacctttggcgcgtatcggggctgccgcttaccagcttgaagccatgagacgttattgcctgggcgcgatcgataaaggtatcaagccgggtgttatcacggcgatgcaaaaatactatgcgactgaaatgggccgccaagtgatcaacgattccatggacatcatgggtggagcgggtatctctatgggtcctcgcaacgtgttggcagaaatctatattgcgactccaatcggtatcacggtggaaggtgcaaacattctgactcgtactttgatgatcttcggtcagggggctcttcgtgcccatccatttgcttacgcggaagttaaaactgcggaagcgggtgatttgaaaggctttgacagagcgttctggggtcacatcggtcacgttattcgtaacacatgccgtgcggttctgttgtcttgctctcgcggtttcctggcatccactccggatgttcacccgcaaatgaaagtttacgttcgtcgtttgacttggacatctgcaacgttcgcgttgttgtctgacgtggcgatgggtgttttgggtggtcagttgaaagcaaagcaaaaaatcaccggtcgtttcgcggatatcctggcgaacatgtacatggcgacagcaattcttcgtcgtttcgagtacgaaggtcgtcgtgaagaagacctggcgtttgctcactacaacctgaagcgttgtatggcgaacatccagactggttttgatggcatcttcgacaacctgaaaatcccgggtctgcgttggttcttcaaaggctggatcggtgcttggtctcgtatcaactctgtagggtctcaagcttctgatggctggtctcacggcatcgctgctgcgatgttgaaagagggtggtattcgtgagcgtctgtctgatggtatctatctgccaacagaccgcaacgaagctatcggtcgtctggaacacgcgttctctgtgacgaacaaagctgaagcggcagagaaaaaagtgaaaaaagccatccgcgaaggtgttctgcctaagaagaaagttcacttgttgctggatgaagcccttcagaagaatgtgatcactcaggatgaactgaagttgatccaggaatccgatgcggttcgctacgacgcaatcctggtggatgacttctctcaggaagaatacatgtcccgtcactcttaa

SEQ ID NO: 35639 - protein, 816 aa, Bdellovibrio bacteriovorus HD100
MDSISSFYGMFLENYTGLWVLGSVVLLLFVGFFSSPLIVWAIALAAILVGFGAPTWLLAVYAVIAIIFLITPLRAALVTSGLLAFMKKMQFLPKISDTEKAALDAGAVWVEKDLFSGNPNFGNLLKEDYPQLTAEEQAFMDGPVNNLCKVLDHWKIHKDKDIPKEAWDIIKKEKFLGMIIPKEYGGLGFSALAHSEVIMKISSRSLSTAITVMVPNSLGPAELLAHYGTDAQKNRYLPRLATGDEIPCFGLTEPTAGSDAGSITSTGVLFKGPDGKLQIKLNWNKRWITLAAISTTIGLAFRLRDPENLLGKGEDVGITCALIPSSTPGVVLGRRHDPLGIPFYNCPTQGKDVIVNAEDAIIGGVAGAGKGWLMLMECLAAGRGISLPAQATGGAKLAARVVSAHSLVRRQFGMSIGRFEGVEEPLARIGAAAYQLEAMRRYCLGAIDKGIKPGVITAMQKYYATEMGRQVINDSMDIMGGAGISMGPRNVLAEIYIATPIGITVEGANILTRTLMIFGQGALRAHPFAYAEVKTAEAGDLKGFDRAFWGHIGHVIRNTCRAVLLSCSRGFLASTPDVHPQMKVYVRRLTWTSATFALLSDVAMGVLGGQLKAKQKITGRFADILANMYMATAILRRFEYEGRREEDLAFAHYNLKRCMANIQTGFDGIFDNLKIPGLRWFFKGWIGAWSRINSVGSQASDGWSHGIAAAMLKEGGIRERLSDGIYLPTDRNEAIGRLEHAFSVTNKAEAAEKKVKKAIREGVLPKKKVHLLLDEALQKNVITQDELKLIQESDAVRYDAILVDDFSQEEYMSRHS

SEQ ID NO: 35640 - DNA, 2490 bp, Acinetobacter sp. ADP1
  CDS (1)..(2490): transl_table=11
atgacttttttcctgtttatcgttgccattctcgtacagttattcacgatctgggctgttttttattttagcctttctagaactgtcggtagcatcgtaacgattgtagtggcgatatcgtctgcctttgtttttaccgcttggtctttattattaggaattccactcattattttgagcctgatcttactcattgatccgctacgttttaacttaatcaccaagcccgctttcaacacattagcgaattcaatgccaagtatcagtacgactgaacaagaagcgcttgaagcaggcacaagctggtgggaaaaagaattatttacaggtgccccggattgggatcagttcaatacttatccatttccacaattatcagaagaagagcaatctttcattgataatgaagtagaacaactttgtagtatgttaaacgagtgggaaattcatcatcatcgtaaagatttaccagaacacgtctggcaatttattaaagataaaggctttcttagcttgatcattcccaaatcatatggtgggaaagagtttacatcatttgcgcaaagtcgcattatgagcaaaattgcctctcgctcgctcacggctgcggtcagttgtatggtgcccaattcattgggtccaggtgaattgttaatgcactatggaaccgatgaacagaaacaacgttatctgcctggcttggcagcaggaactgaaattccatgctttggactgactagtccagaagcgggttcagatgcaggcgcgattcctgatactggcgtcgtatgttatggggaattcgaaggtcaggatgtccttggcttacgtatgaacttttctaagcgatggattacattggctcctattgcaactgtggttggattagcatttaaactctacgacccagaaggtttactgggtgattcatccaaaacggaatacggtattacgtgcgcattgattccagctaaccatcacggtgtagaaattggccctcgacactaccctggttcaccctttatgaatggtactgttgaagggcgcgatgtttttattccaatcgactggattattggtggccctaaaaatgctggaaaaggctggcggatgttaatggaatgtctaggtgttggccgtggtatttccttacctgcacttgcaacagcagcaggtgaaatgagttatcttactgtgggtgcatttgccaaagtgcgtgaacaattcaaattatcggtaggtaaatttgaaggtgtacaagaagccaccagtgatattgccagtgatacgtacatgctagagtctttccgttatttagtgacctgtggtcttaatcaaggtggtactcccgccgtgatgacagcaatggcgaagtactatgcaaccgaaaccatgcgtaaagttatcaatcatggtatggatgtggtgggtggacgtgctattcagcttggaccacgtaactttctcgctttatcttatcaagcgattcctgttgcaattaccgtcgaaggtgccaacattctgacccgttcattaatgattttcggtcaaggctctatgcgttgtcatccttatttatttaatgaattgcaattgttgcaatcagaagataagccaaatgcattgaagcaatttcatgaaattctatttaagcatttgggatacaccttcaaccgaggcgcgcgttcatttgcttatggctttacgggtggctcaggcgatgcaccgcttattgcagatgactttacccatccatattataaaattattaaccgattcagtgctaatttggcattgaccgcagatatggcattaggtttactcgctggagatattaaacgcaaagaaatgctgtcaggtcgtttagccgatatgcatgcccatctctttatcgcgactgcaatcttgaaatactacgcacatggtcgtaaatcagatgctgaacaattacatgccaagcttgctttggaaaaatcactctacaatgttcaagaagctttttatggtttatttgagaatttcccaatcaaaccagctgctgcattggttaaattggtctgttttcctttaggtcgaccaattgaaaaaccaagtgatgatttaaaacagtctgtagctgaactgatgatgcaagaaaatccatttagagatcaactcaaaaagcatgtctattattcgcaagatgtgggtgatgttacaggtcgtatggaatctgcctttcagatgttattagaaattgagcctctatggcacaaatttaaaaaagcggaatctaaggatcaatttaaaggtttaacttttgaagaacatattactgatgcagtagaaacaggttttatcaccgaatcagaagctcaaagtttaattctttataatgcaaaacgcttcgatagtatgttgactgatatttttgacatggaattaaatcgggatttagagcttgaaaatccacacatgcctattacaggtgaagtagccttagataaataa

SEQ ID NO: 35641 - protein, 829 aa, Acinetobacter sp. ADP1
MTFFLFIVAILVQLFTIWAVFYFSLSRTVGSIVTIVVAISSAFVFTAWSLLLGIPLIILSLILLIDPLRFNLITKPAFNTLANSMPSISTTEQEALEAGTSWWEKELFTGAPDWDQFNTYPFPQLSEEEQSFIDNEVEQLCSMLNEWEIHHHRKDLPEHVWQFIKDKGFLSLIIPKSYGGKEFTSFAQSRIMSKIASRSLTAAVSCMVPNSLGPGELLMHYGTDEQKQRYLPGLAAGTEIPCFGLTSPEAGSDAGAIPDTGVVCYGEFEGQDVLGLRMNFSKRWITLAPIATVVGLAFKLYDPEGLLGDSSKTEYGITCALIPANHHGVEIGPRHYPGSPFMNGTVEGRDVFIPIDWIIGGPKNAGKGWRMLMECLGVGRGISLPALATAAGEMSYLTVGAFAKVREQFKLSVGKFEGVQEATSDIASDTYMLESFRYLVTCGLNQGGTPAVMTAMAKYYATETMRKVINHGMDVVGGRAIQLGPRNFLALSYQAIPVAITVEGANILTRSLMIFGQGSMRCHPYLFNELQLLQSEDKPNALKQFHEILFKHLGYTFNRGARSFAYGFTGGSGDAPLIADDFTHPYYKIINRFSANLALTADMALGLLAGDIKRKEMLSGRLADMHAHLFIATAILKYYAHGRKSDAEQLHAKLALEKSLYNVQEAFYGLFENFPIKPAAALVKLVCFPLGRPIEKPSDDLKQSVAELMMQENPFRDQLKKHVYYSQDVGDVTGRMESAFQMLLEIEPLWHKFKKAESKDQFKGLTFEEHITDAVETGFITESEAQSLILYNAKRFDSMLTDIFDMELNRDLELENPHMPITGEVALDK

SEQ ID NO: 35642 - DNA, 2448 bp, Erwinia carotovora subsp. atroseptica SCRI1043
  CDS (1)..(2448): transl_table=11
atggttgctgtcagtatcctcctcctactgattatcatcggagcgatgttttaccatcggctcagtctgctgctcggcagcgccatcctgctggcctacttcgccgccatgtccgccatgctgctgtggcccatctggctgatggttccgctcgtgattctgctgattccgattacggttcccgccgtgcgtcaaaagctggtttccgcttccgcgctgcgcatgttccagaaggtcatgccgccgatgtcgaacacggaaaaagaagcgatcgatgcaggaacaacctggtgggaaggcgatctatttcgcggcgcgccagactggaaaaagctgcataactacccacgcccgcagctgacggctgaagagcaggcgtttatcgacgggccagttgaagaagcctgtcgaatggctaacgactttgaaatcacccatgaacgtgccgatattccaccggaattgtgggcgtttttaaaagaacatcgtttcttcgccatgatcattaaaaagcaatacggtgggctggaattctccgcctatgcacaagcgcaggtgctgcaaaaactgtcgggcgtctccagtattgtggcgatcaccgtcggcgttcccaactcactcggccccggcgagctgctgcaacactacggtacagaagcgcaaaaagatcactacctgccacgtctggcacgcggtcaggaagtcccctgttttgcgctgaccagcccggaggccggatctgatgcgggctcgattcccgataccggcattgtctgctacggcaactggcacggggaacaggtcgtgggcatgcgcctgacctggaataaacgctatatcacactcgcgccggtcgccaccgtgctcgggctggcctttaagctgtacgatcccgaccacctgctaggtgatgaggatgacgtagggattacctgtgcgttaattccgacggataccgacggcgttaaaatcggccgccgccatttcccgctgaacattccgttccaaaacgggccgacgcagggcgagaacatttttgttccgctggattacatcattggtggtgcgaagatggcaggtcagggctggcgtatgctgatggagtgcctgtcagttgggcgcggcattacgctaccgtccaattccaccggcgggttgaaatcgattgccctcggcatcggtgcttacgcccatatccgccgtcagttcaaaatctccatcggtaagatggaaggtatcgaagaaccgctggcacgtatcgcgggtaacgcttacgtgatggatgccgctgcaacgctgattactagcggcatcatgcagggtgaaaaaccggcggtgctttccgctatcgtcaaatatcactgtacccaccgtggtcagcgcagcgtgctggatgcgatggatatcgccgggggcaaaggtatctgtctcggcccgtccaacttccttgcgcgcagctatcagggcgcaccgattgccatcaccgtggaaggggcgaacatcctgacgcgcagtatgattatcttcggccaaggtgcaatccgctgtcatccttatgtactggaagaaatggcagccgcgcaggacaacgatgtgccacgctttgaccgtgcgctggttgggcacatcggccatgtcggcagtaacaaggtgcgcagcttctggcttggtttaaccaatggccgcctgagcagtgcgccggtgaacgacaaaacgcgccactactaccaacagctcaaccgactcagcgcgaatctcgctctgctagcggatgtgtcgatggcggtactgggcggtagcctgaagcgtcgtgagcgtatctcggcacgtttaggggatattctcagccagctctatttagcctctgcgacgctgaaacgctatgaggacgaaggacgtcagaaagcggatctaccgctggtgcactggggcgtgcaggacagtctgcatcaggcagagcaggcgctggacgatctactgcgcaatttcccgaatcgcgtagtggcagggctgctgaccttcattatcttcccactgggtctacgctgccctgcgccatctgatcgcctcgaccatgaggtcgcgaagattctgcaaacgccatcggaaacgcgcagtcgtctgggacgcggccaatatctggctgccagtgagcacaaccctgtcgggctgctggaagaagccttgcgggatatcatcgcagccgagccgatttaccaacgcctgtcgaaggccagcgataaaccgctgccattcatgcgattggatcaactggcagagcaagcgctgatcgaaggtcagattaccgcagaagaagcgggcattttgaccaaagccgaagccagccgcttacgttctattaatgtggatgactttgcgttcgacgcactggccgccaacaagcccacgtccgtaccgcagtcggaaagaaaaaccgaagcagcataa

SEQ ID NO: 35643 - protein, 815 aa, Erwinia carotovora subsp. atroseptica SCRI1043
MVAVSILLLLIIIGAMFYHRLSLLLGSAILLAYFAAMSAMLLWPIWLMVPLVILLIPITVPAVRQKLVSASALRMFQKVMPPMSNTEKEAIDAGTTWWEGDLFRGAPDWKKLHNYPRPQLTAEEQAFIDGPVEEACRMANDFEITHERADIPPELWAFLKEHRFFAMIIKKQYGGLEFSAYAQAQVLQKLSGVSSIVAITVGVPNSLGPGELLQHYGTEAQKDHYLPRLARGQEVPCFALTSPEAGSDAGSIPDTGIVCYGNWHGEQVVGMRLTWNKRYITLAPVATVLGLAFKLYDPDHLLGDEDDVGITCALIPTDTDGVKIGRRHFPLNIPFQNGPTQGENIFVPLDYIIGGAKMAGQGWRMLMECLSVGRGITLPSNSTGGLKSIALGIGAYAHIRRQFKISIGKMEGIEEPLARIAGNAYVMDAAATLITSGIMQGEKPAVLSAIVKYHCTHRGQRSVLDAMDIAGGKGICLGPSNFLARSYQGAPIAITVEGANILTRSMIIFGQGAIRCHPYVLEEMAAAQDNDVPRFDRALVGHIGHVGSNKVRSFWLGLTNGRLSSAPVNDKTRHYYQQLNRLSANLALLADVSMAVLGGSLKRRERISARLGDILSQLYLASATLKRYEDEGRQKADLPLVHWGVQDSLHQAEQALDDLLRNFPNRVVAGLLTFIIFPLGLRCPAPSDRLDHEVAKILQTPSETRSRLGRGQYLAASEHNPVGLLEEALRDIIAAEPIYQRLSKASDKPLPFMRLDQLAEQALIEGQITAEEAGILTKAEASRLRSINVDDFAFDALAANKPTSVPQSERKTEAA

SEQ ID NO: 35644 - DNA, 2448 bp, Yersinia pseudotuberculosis IP 32953
  CDS (1)..(2448): transl_table=11
atgatagttcttagcattgttgccttactggttcttattagtgtgttgttctatcaccgggtgaacctttatctcagcagtttaattcttctggtttacaccgccgctttgggcgcctcgcagttatggtcattctgggtattattaccaatggtgattattctgttgccactgatcctaacgccgctgcgcaagtcactgttctctgcgccagcattacggattttccgtagcgtcatgcctgctatgtcacgtacagaaaaagaagcgattgatgcagggactacctggtgggaaggtgatttattccgaggggctcctgactggaaaaaattacacaactatccaaaaccgcaattaaccgccgaagagcaagcctttatcgatgggccggttgaagaagcctgtcgtatggctaatgacttccagataacccatgaactggctgatttgccaccagaattatgggattacctgaaagaaaaacgcttcttcgcgatgatcattaagaaagaatatgggggtcttgaattttctgcttatgctcaggcccgcgtgttacagaaactagccggggtctcaggtattctggccatcaccgttggcgtaccaaactcccttggcccaggtgaattattgcaacattacggcactgaagagcaaaaaaatcattatctgccaagattagcccggggtgacgagatcccttgctttgcactaaccagcccggaagccggttctgatgccggtgcgatccctgatgttggtattgtctgtatgggcgagtggcaaggtaaacaggttctcggcatgcgcctaacctggaacaagcgctatattacgctggcccccatcgcgacggttctggggctggccttcaaattatcggaccccgaacacttactgggcgatacggtagacttggggattacctgtgcactgatcccaacccatacaccaggagtagagatcgggcatcgtcacttcccgctcaatataccgttccaaaatggccctacccgcggtaacgatatttttgtccccattgattacatcatcggcggccctcaaatggccggtcaaggctggcggatgctggtggaatgcctgtctgtggggcgtggaatcaccttgccttccaatgccactggtagcctgaaaagtgtggcgatggggatcggtgcttacgcttatattcgccgtcaattcaaaatctccatcggtaagatggaggggattgaagagccactggcgcggatcgccggtaacacttatgtgatggatgcagccgcaactttaatcaccagcggcattatgatgggcgagaaaccggccgtcttgtctgccattgttaaatatcactgtacacaccgtggtcaacgcgccgtgatggatgccatggatatcgccggtggtaaagggatctgccttggccccgctaactttgtcgcccgtggttatcagggcgcacccatcggtatcaccgtcgaaggcgcaaatattctgacccgcagtatgattatctttggtcagggtgctatccgttgccatccatttgttctcgatgagatggcggctgcgcaatccaatgacgttgccgctttcgataaagccctgtttggtcacttgggccacgtcggtagtagtatggtacgcagcttctggctgggcctgaccaatggccgcaccagtgcaacaccagtcaaagacagcacccgtcgttattatcaacaactaaaccgtctgagcgctaacttggccttgctgtctgatgtttcaatgggcgtgctgggtggtagcctaaaacgtcgcgaacgtatctctgcccgtttgggtgatatcctcagccaactgtatttagcatccgccacactgaaacgctatgaagatgaaggccgtcagaaagaggatctgccgttggtacattggggggtacaagatgctctgtatcaggccgaacaagcactggatgacttgctgcgtaacttcccgaatagcgtgattgctggattgatgcgcgtcgtggtcttcccgttgggccgtgtacatcgggcaccgtccgatcatctggatcaccagttggcgcaattgctacaagttccatcagccacccgtagccgtatcggtcgtggtcagtacctgacaccaagtgaatttaacccggtagggttattggaagcggccttactggatgtgattgccgcagaaccgattcacaaacgcctgagtaaagaagcgggtaagagcctgccctttactcgcttggatcagttagctaaacacgccttggcagaagggaaaatcagcgccgaagaggccgcgttgctgactaaagcagaaaacagccgcctgcgttctattaatgtggatgagtttgacgccagcgccttggcagcaaacccagtagtcaaaaaaccggctaaacagcagcaaactgaagccgcatga

SEQ ID NO: 35645 - protein, 815 aa, Yersinia pseudotuberculosis IP 32953
MIVLSIVALLVLISVLFYHRVNLYLSSLILLVYTAALGASQLWSFWVLLPMVIILLPLILTPLRKSLFSAPALRIFRSVMPAMSRTEKEAIDAGTTWWEGDLFRGAPDWKKLHNYPKPQLTAEEQAFIDGPVEEACRMANDFQITHELADLPPELWDYLKEKRFFAMIIKKEYGGLEFSAYAQARVLQKLAGVSGILAITVGVPNSLGPGELLQHYGTEEQKNHYLPRLARGDEIPCFALTSPEAGSDAGAIPDVGIVCMGEWQGKQVLGMRLTWNKRYITLAPIATVLGLAFKLSDPEHLLGDTVDLGITCALIPTHTPGVEIGHRHFPLNIPFQNGPTRGNDIFVPIDYIIGGPQMAGQGWRMLVECLSVGRGITLPSNATGSLKSVAMGIGAYAYIRRQFKISIGKMEGIEEPLARIAGNTYVMDAAATLITSGIMMGEKPAVLSAIVKYHCTHRGQRAVMDAMDIAGGKGICLGPANFVARGYQGAPIGITVEGANILTRSMIIFGQGAIRCHPFVLDEMAAAQSNDVAAFDKALFGHLGHVGSSMVRSFWLGLTNGRTSATPVKDSTRRYYQQLNRLSANLALLSDVSMGVLGGSLKRRERISARLGDILSQLYLASATLKRYEDEGRQKEDLPLVHWGVQDALYQAEQALDDLLRNFPNSVIAGLMRVVVFPLGRVHRAPSDHLDHQLAQLLQVPSATRSRIGRGQYLTPSEFNPVGLLEAALLDVIAAEPIHKRLSKEAGKSLPFTRLDQLAKHALAEGKISAEEAALLTKAENSRLRSINVDEFDASALAANPVVKKPAKQQQTEAA

SEQ ID NO: 35646 - DNA, 2439 bp, Legionella pneumophila subsp. pneumophila str. Philadelphia 1
  CDS (1)..(2439): transl_table=11
atggctattgtgttctttttaatttatttggcttttactctggtagtactgtccagaagaattaatccattggtttgggaaattggaagcataatctacctcattcccgcaacattttattttgggttcccctggattatcggtttattcatttggttctttattatagctgccgtgctggtagttcgagtggagccattacgccttttcatcggggattatttgtataaaaccgcaggaaaatcggtgcccaagctctctaaaacggaagaagaagctttaaacgcgggggatacctggctggaacaagatatttttacaggaaaacctgattggcaaaaattatcagcagtttctacagagctcacagcagaagaacaagcttttttggataatgaaactcatactttgtgcagtatgttggatgaatgggaaattagtcaggaatatgatttatctcccaaggtttggaattacattaaagagaaaggatttttaggattagtgataccaaaggagttcggtggcaaagggttctcagctcgagcccattctgatattgtaatgaaaattgccactcgctcaagagtagcggcagtgacggtaatggttcctaattccctgggcccgggcgagctaataaattattatggaaccgatgagcaaaaagcatattatcttccacgtcttgccaaaggtgttgagattccctgttttgcattgacagagccaggggctggaagtgatgcgacctccatccagtcagaagccattgtagttaaaaagaagatagatgggaaatcagtacttggcttaaatatcaccctggataaacggtggattactttagctcctgttgcgactttaattggattggccgtgaacttgaaagatccggatgggcttttgaatggtgaaggagaggaaggcataacttgcttgctgattccaagagatactaaaaatcttgaaattggcaataggcatttaccagctgatcagccctttatgaatggaactttacgcggcaaagatatttttgtgcctattgataccatcattggtggtcaaaagaaagcgggatccggttggcaaatgctggttgagtgcttatctatagggcgctcaatatctctgcctgcacttggagcaggttcttcttctatttcttatttaacaacaggtgcttttgccagaattcgtcgccaatttaatgtagaaatcgctcagtttgaaggagtagaggaaaaacttgcagaaatagcgggtttgaattatttaatcaactctacccggttgttgacggttgctgcagtgaatgaacataaaaaaccctctgtagcttcagcgattaccaaatattttaatacggaattggcacgaatcactgtgaatgcttctatggatgttcatgctgggcgagccattgttgttgggccacgcaattacttaaatagtttatatcaaagtgttcctatttctattacggtagaaggggctaatattatgtctcgcaatttattgatttttgggcagggatctatggcatgtcatccgtttattcgtgatgaattctacgccatctccagtgagaataaagaggcatttagagagataatttggaagcatattcattattttatgcagaattttgctaaaacaatctgttcagcatggacaagtggtttgtttattgcggttcccgaaaattcaatgaaaagagagtataagaaactggcgcgtttgagttatgcctattcctggcttgctgatctgtctttaatttatttgggaggtgatttaaagcgcaaggagcgattgtctgcaagattggctgatggcatgtcttatctctatatggcaatggctgctttacgaaatgtgcaattaaaccaagaccatcccgatgagcaattgcatgccagatgggcggtaagctattgtttttaccacgcgcaaaaatccatgattgcactttgtcacaatttcccttccaaatttttaggctttattgcccgagtagttgcgtttccatttgggcaaaccatgcgttatccttcagacaaactagatcatcagttggctcgtttgatgacgggcaacaatcattatcgtgaccgtttgaaaaaatcggtctttctcagtggtgatcccaagcagcctgtagatcgtatggaacatgctttacagcttattattgaagcggatggattaagcaaaaaagtgagtgatttgaagcgctataagtggagtaagttgaaagagaagttaaaagaaaaagtagagtctggccagttgtcacaacaggaaatggaagagttgcttgctgttgaagacgcacgttgggatgccattttagtggatgaatttaccttcgactccatgaagaagaagacattgcattccgtgatagaaaaaatgaaatctcccttggcgtga

SEQ ID NO: 35647 - protein, 812 aa, Legionella pneumophila subsp. pneumophila str. Philadelphia 1
MAIVFFLIYLAFTLVVLSRRINPLVWEIGSIIYLIPATFYFGFPWIIGLFIWFFIIAAVLVVRVEPLRLFIGDYLYKTAGKSVPKLSKTEEEALNAGDTWLEQDIFTGKPDWQKLSAVSTELTAEEQAFLDNETHTLCSMLDEWEISQEYDLSPKVWNYIKEKGFLGLVIPKEFGGKGFSARAHSDIVMKIATRSRVAAVTVMVPNSLGPGELINYYGTDEQKAYYLPRLAKGVEIPCFALTEPGAGSDATSIQSEAIVVKKKIDGKSVLGLNITLDKRWITLAPVATLIGLAVNLKDPDGLLNGEGEEGITCLLIPRDTKNLEIGNRHLPADQPFMNGTLRGKDIFVPIDTIIGGQKKAGSGWQMLVECLSIGRSISLPALGAGSSSISYLTTGAFARIRRQFNVEIAQFEGVEEKLAEIAGLNYLINSTRLLTVAAVNEHKKPSVASAITKYFNTELARITVNASMDVHAGRAIVVGPRNYLNSLYQSVPISITVEGANIMSRNLLIFGQGSMACHPFIRDEFYAISSENKEAFREIIWKHIHYFMQNFAKTICSAWTSGLFIAVPENSMKREYKKLARLSYAYSWLADLSLIYLGGDLKRKERLSARLADGMSYLYMAMAALRNVQLNQDHPDEQLHARWAVSYCFYHAQKSMIALCHNFPSKFLGFIARVVAFPFGQTMRYPSDKLDHQLARLMTGNNHYRDRLKKSVFLSGDPKQPVDRMEHALQLIIEADGLSKKVSDLKRYKWSKLKEKLKEKVESGQLSQQEMEELLAVEDARWDAILVDEFTFDSMKKKTLHSVIEKMKSPLA

SEQ ID NO: 35648 - DNA, 2487 bp, Legionella pneumophila subsp. pneumophila str. Philadelphia 1
  CDS (1)..(2487): transl_table=11
gtgtcagaacttatattaatactagcagcaattggtgtggctggaacgttattaacccgacatgcatcgatatctgtatgggctattagttataccatttttcttggcttggttttgcaattcagttctcctggtttgttgtcgcaaatcgtcttatgggcaatcgaagctgtactggttttaggctccattaagcctttaagaagagaagtactatcgaaacatttgtttcaaataattaaaaaaacgatgccttccatgtctattactgagagagaggcattggaagcaggtacagtgagttgggaaggagatttatttagtggtaatcctaatttctctcttttgaggaatgctccaactgttgcattaactgaagaagagcaggcttttatagacggccctgtcagtaccctctgtgaaatgttagatgattgggatatcactcataatagaacggatcttccccccgaagtttggcaatttataaaagagaatcgttttctgggaatgataattccaaagcagtatggtggacttggtttttccgctactgctcagatgtcaattttggtaaaaatctatggccgttctattactgctgctacaactatttcagtacctaattcactggggcctggtgaattacttttaaagtatgggacagaagaacaaaaaaattattatttaccaagattggccgatggaagggagattccatgctttgccttgacaggacctaatgctggttcggatgcggcctctatacctgataaaggtgttgtttgccggcaggagttcaatggtgagctcatattgggagttcgtttgaattgggacaaacgatatattaccttgtgcccggtggcgacagttattggtttggcttttagaatgtttgatcccgacaacttgctaggcaaaggtgaagacattggtattacttgtgcgcttattcctgcaactactccggggatcacaaaagggcgcaggcacttccctttaaatacagggtttatgaatggtccaactcaaggcaaagatgtttttattccgcttgattatttgatcggcggtgcttctatggctggtcaagggtggcgaatgttaatggagtgtttaagcgcgggtcgtgcaatctctttgccatcaagcgccagtggaggtgcacaagccgttgcattagcatctggtgcctatgccagaatccgtaaacaattcaatcaaccaatcggcaagttcgaggggatagaagaacctcttgccagaatagcctcagctgcttatatcattgattcttctttaactatggcagcagcggctatagataatggagcaaaaccttctgtcgcaggggctattttaaagtatcatactactgaaagagcgagacaacttgcactggatggaatggatatacatggtggtaaagggatatgccttggtccaaataattatattggaagaggatatcaaggttctcctattggcattacggtggaaggggccaatattttaaccagaagcttaattatattcgggcaaggagcgatacgttgtcatccttatgttttcaaggagttagaaagtattagaaataatgatttagttgcgtttgatgattccttttttgcccatgtgggttttgttattactaattttacaaagtcacttatttttggatggaccgatgctcgttttagcaagtctccagccagttctgtaaaaagatattatcaattaattcataagtacagttccaatctggcttttttagcagatttttcaatgattgtattaggtggtgagttaaagcgaaaagaaaaattatcggcacgcttaggtgacatgctgagttgtttatacatggcatccgctgttttgaaacgattttacgaagacggagaacctcgtgctgatttacctgttgttcattggagttgtcagcagttattgcatgagtgtgaaaccgctatgcatggggtaatcattaattttccggcacgctgggcaagaattgttttatcgttaattctaaaacctcttggcaacagaaggcataaaccggatgataaattgggtcataaggtagcaagaatactgatagagcctaatgaaacaagaaatcgaatcacgagattggtttataagaagccaggggataattgtcccttaggaaggatggaggaagcatttcataagatttgtgcagttgaagagctagagcgcaaagtgatgaaggctgttaaagataatatccttcattcattgactttccaggagcaaatattggaagcgcttgagcatcaaatattgactccagttgaagcgaaacaactagaggaggctgagaaggccagacaggatgttataagggtagacgattttgctgatgaagaactacgtcgtccctcgtcacttggtgagaaggtaaagtcagaaaaaaagattccagccagggatgacatggaaactgaaacagcttaa

SEQ ID NO: 35649 - protein, 828 aa, Legionella pneumophila subsp. pneumophila str. Philadelphia 1
MSELILILAAIGVAGTLLTRHASISVWAISYTIFLGLVLQFSSPGLLSQIVLWAIEAVLVLGSIKPLRREVLSKHLFQIIKKTMPSMSITEREALEAGTVSWEGDLFSGNPNFSLLRNAPTVALTEEEQAFIDGPVSTLCEMLDDWDITHNRTDLPPEVWQFIKENRFLGMIIPKQYGGLGFSATAQMSILVKIYGRSITAATTISVPNSLGPGELLLKYGTEEQKNYYLPRLADGREIPCFALTGPNAGSDAASIPDKGVVCRQEFNGELILGVRLNWDKRYITLCPVATVIGLAFRMFDPDNLLGKGEDIGITCALIPATTPGITKGRRHFPLNTGFMNGPTQGKDVFIPLDYLIGGASMAGQGWRMLMECLSAGRAISLPSSASGGAQAVALASGAYARIRKQFNQPIGKFEGIEEPLARIASAAYIIDSSLTMAAAAIDNGAKPSVAGAILKYHTTERARQLALDGMDIHGGKGICLGPNNYIGRGYQGSPIGITVEGANILTRSLIIFGQGAIRCHPYVFKELESIRNNDLVAFDDSFFAHVGFVITNFTKSLIFGWTDARFSKSPASSVKRYYQLIHKYSSNLAFLADFSMIVLGGELKRKEKLSARLGDMLSCLYMASAVLKRFYEDGEPRADLPVVHWSCQQLLHECETAMHGVIINFPARWARIVLSLILKPLGNRRHKPDDKLGHKVARILIEPNETRNRITRLVYKKPGDNCPLGRMEEAFHKICAVEELERKVMKAVKDNILHSLTFQEQILEALEHQILTPVEAKQLEEAEKARQDVIRVDDFADEELRRPSSLGEKVKSEKKIPARDDMETETA

SEQ ID NO: 35650 - DNA, 2490 bp, Azoarcus sp. EbN1
  CDS (1)..(2490): transl_table=11
atgacgtggctgctgatcgcttttctccctgtcatggggggcattctcgcctaccggcgggcggggtttccggtctgggcggccgtcggcttcctgtggctggtgctcttcggcgcggcggccgggtggccgaccgccgcgagggtcaccgtgctcgtcctctacgcggcgctcgccggcgtgttcctgctccgcccgctgcggcgcaggctcgtgacggcgcgcatcttcaccgctttccgccgtgcgctgccgtcgatgtcgcagaccgagaaggacgcgctcgaagccggcagcgtgtggtgggaaggcgagctcttcgccggcaagccggactgggcgaagctgctcgcgtatccgtggccgacgctcaccgccgaggagcgtgcgttcctcgacaacgagacgggcgagctgtgccgcctcaccgacgactgggcggcgacgcagcgccaggacttgtcgcccgaagtgtggcgctacatcagggagcgcggctttctcggcatgatcatcccgaaggaatacggcgggaaaggcttctcggcgttcgcccattcgcaggtcatcacgaagctgtcgacgcgctcgtcggcgccggccgtcacggtgatggtgccgaactcgctcggacccgccgagctgctgctgcattacggcacgccggagcagaaagcgcatttcctgccgcggctcgccgccggcgtcgacatcccggcgttcgcgctgacgagcccgtgggccggctcggacgcggcatcgatccccgattccggcgtcgtctgcaaaggcatgtggcagggacgcgaggtgctcggcatgcgcgtgacgttcgacaagcgctacatcacgctcgcgccggtctgcactgtgttcgggctcgcgttccgcctgtacgacccggacggcctgctcggcgcggacgcggacctcggcatcacctgcgcgctcgtgccggccgagcacccgggcgtcgatatcggccggcgccacctgccgctcaatgcggtgtggatgaacgggccggtgcgcgggcgcgacgtgttcatgccgctcgatttcatcatcggcggcccgcagatggccggccagggctggcggatgctgatggagtgcctcgcggcgggacgttcgatctcgctgccgggctcgaacaccggcatgcagaaaatgaccgcgcgcgcggtcggcgcgtatgcccgcgtgcgccaccagttcaagactgcgatcggccgcttcgaaggcgtcgaggaggcgctgacgcgcatcggcgcgaacacttacctgtccgatgcggcgcggatcatgacggcgggcgcgatcgatctcggcgagaagccgtcggtggtgtcggcgatcgtcaagtaccacgtcaccgagcgcgcgcgccagacggtcaatgacggcatggacgtcatcggcggcaagggcatctgcctcgggccgcagaacttcctcggccgcgcctaccagcaggtcccgatcggcatcaccgtcgaaggcgcgaacatcctgacgcgcagcctgatcctgttcggccagggcgcgatccgctgtcatccttacgtcctcgacgagatgcacgcggcgcagaaaggcgacctcgccgcgttcgaccgcgcgttctgggggcacgtcggctacacgctgtcgtcggcggtgcgcgcgctggtgatgggactcaccggctcgcatttcgtcgccgtgccgcagcacgtcgcgcccgagacgcgccgttactaccagcagctgacgcgcttctcggcggcgttcgcgttcctcgcggacatctcgatggggacgatgggcggcgcgttgaagcgcaaggaaaagctctccgcgcggctcggcgacatcctgtcgctgatgtatctcgcgtcggcagtgctgcggcgcttcgaagccgaagggcgtcaggtgacggatgcgccgctgatgcactgggcgatctgggactgcatgttccgcgcccagaacgcgttcgaaggcgtcatcgcgaacttcccgaaccggttcttcgcagcggtgctgcgccggctcgtcgtgttcccgctcgggcggccgtacgtcgtgccgtccgacgcgctcggccacgaagtcgcgaagctgctgatcgagccgtcgccgacgcgcgaccggttgactgccgacgtgtatgtgccggacgacctcgacgagccggccgcggcgctcgaagcggcgctcgccgcgacgatcgcagccgagccggtcgaagcgaagctgaaagaggcgcgccgccaggggcgcttcgacccgggcctggccgtcggcggcggcgtcgatgcggtgtggcggcgcgctctcgaagccggtgtcatcagcgacgccgaattcgcgctcgtcgaacggcgcaacgtgctgcgcgacaaggtcatccgcgtcgacgatttcccgtacgacttcggcttgcgcgaagcgcttgccgaagtcgggccgaacgattcgcgcccgctgcacgcggtcgcctga

SEQ ID NO: 35651 - protein, 829 aa, Azoarcus sp. EbN1
MTWLLIAFLPVMGGILAYRRAGFPVWAAVGFLWLVLFGAAAGWPTAARVTVLVLYAALAGVFLLRPLRRRLVTARIFTAFRRALPSMSQTEKDALEAGSVWWEGELFAGKPDWAKLLAYPWPTLTAEERAFLDNETGELCRLTDDWAATQRQDLSPEVWRYIRERGFLGMIIPKEYGGKGFSAFAHSQVITKLSTRSSAPAVTVMVPNSLGPAELLLHYGTPEQKAHFLPRLAAGVDIPAFALTSPWAGSDAASIPDSGVVCKGMWQGREVLGMRVTFDKRYITLAPVCTVFGLAFRLYDPDGLLGADADLGITCALVPAEHPGVDIGRRHLPLNAVWMNGPVRGRDVFMPLDFIIGGPQMAGQGWRMLMECLAAGRSISLPGSNTGMQKMTARAVGAYARVRHQFKTAIGRFEGVEEALTRIGANTYLSDAARIMTAGAIDLGEKPSVVSAIVKYHVTERARQTVNDGMDVIGGKGICLGPQNFLGRAYQQVPIGITVEGANILTRSLILFGQGAIRCHPYVLDEMHAAQKGDLAAFDRAFWGHVGYTLSSAVRALVMGLTGSHFVAVPQHVAPETRRYYQQLTRFSAAFAFLADISMGTMGGALKRKEKLSARLGDILSLMYLASAVLRRFEAEGRQVTDAPLMHWAIWDCMFRAQNAFEGVIANFPNRFFAAVLRRLVVFPLGRPYVVPSDALGHEVAKLLIEPSPTRDRLTADVYVPDDLDEPAAALEAALAATIAAEPVEAKLKEARRQGRFDPGLAVGGGVDAVWRRALEAGVISDAEFALVERRNVLRDKVIRVDDFPYDFGLREALAEVGPNDSRPLHAVA

SEQ ID NO: 35652 - DNA, 2448 bp, Pseudomonas syringae pv. syringae B728a
  CDS (1)..(2448): transl_table=11
atgctgttgttgtggattgttgtgctggtcgtcggcattgcctggctggctcatcggcgaaccgccccgctcccggcgcttggcgtggtagctgtctacctgctggccatgggtattttcagtcacgcgccaggatggctgctgacggtgttctggttgctctggctggcagtgttcgtaccggtaatgctgcccgatctgcgccgtaagcatttcactgcaccgatgttcagctggtttcaaaaagtcctgccgccgatgtcgcagaccgagcgcgatgcgatcgatgccggcacggtctggtgggatggcgagctgttcagcggtcgtccggactgggacaagctgctggcctacccgaaagtccagctgaccgaagaggaacaggcctttatcgacgggccgaccgaagaactctgcgcaatggtcagcgactgggaaatcggccaggccatggacctgccgcccgaagcctgggcgcacatgaaagcgcacggcttcttcgcgctgatcatccccaaggaattcggtggcaagggcttctcggcctacgcccactctcaggtggccatgaagctggccacccgcagcggcgacctggcctccacggtgatggtgcccaactccctcggccctgccgaattgctgctgcattacggcaccgacgagcaacgcaatcactacttgccacgtctggcacgcggcgaagacattccctgcttcgcgctgaccggtccgctggccggttccgatgctggcgcgatgaccgacaccgggatcatctgcaaaggtcagtggcagggtgaagaagtcatcggcctgcgcctgacctgggaaaaacgctacatcaccctcggcccggtcgccaccctgctcggcctggccttcaaggcccacgatcctgagcacctgctcggcgaaaaagaagatctgggcatcagcctggcgctgattccgaccgatacgcccggcgtggagatcggccgccgtcacctgcctctgggagcagcgttcatgaacggccccaactccggcaaggacgtgttcgtcccgctgagctacctgatcggcggtcagccgatgctgggcaagggctggatgatgctgatgaactgcctgtcggtgggtcgttcgatctcgctgccggccgtcggcaccggcgctgccaagtacaccagcctggtcaccggccagtacgcgaaggtgcgtgagcaattcaatgtgcctctctcggcattcgaaggcatccaggaagcactggcgcgcatcggcggcaatgcctggctgatggacagtgcgcgcatgctgacggccaatgcggtcgacctgggcgagaagccttcagtgctctctgcgatcctcaaatatcacctgaccgagcgcggccgcgagtgtatcggtcacgccatggacgtgcatggcggcaagggcatcatcatgggcccgaacaattacctgggtcgcaactggcaaggtgcgccgatcttcatcactgtcgagggcgccaacatcctctcgcgcaacctgatgatcttcggccagggcgcgattcgctgccatccgttcgtactcaaggaaatggccttggccgggcgtgaggacaaacagcaggcgctgatcgagtttgacagcctgctgctcaaacacatcggctttgcggtgagcaatgccgccagcacctttatcctcaacctgggttttggccatttcgaaagagcgccgggcaacggcctgagccagggctacttccgggcgctcaaccgccaggcagcagcgttcgcgatgctcgccgacttgagcatgatgctgctcggcggcgagctgaaacgccgcgaacgcctgtcggcccgcctgggcgacgtgctcagccacatgtacctggcctcggcagcgctcaagcgttatcacgacctcggatcaccggaccacatgagcccgttgttccgctgggccatggaagaaagcctcgggcattcggaacgggcaatggacgagatcctcagcaacttccccaaccggatactgggcggggtgctgcgtgccgtagtgttcccgttcggtcgccgacacaaggggccttcggacagactggatgccgaagttgctcaggtactgggccgcgccaagggcgatccgacgctggaagagttgctggcaggctgctatcgcccgcaatcggcagacgacccggtcggcgcgctgcaacaggccatcgacctgctcagcgctgcgtatccactgcacaagaagctgcaagtggcaatcaagagtggtcaggtcaagccggacgctggcgagccggtcatcgacgccgcgctgcgcatcggtgtgttgcaggccgacgaagcgcagaccctgcgtaccgccgaggcagcccgccgcaaggtgatcgatgtggatgatttcgacaaggaggaactgaccctggcagccggcaagattcgctga

SEQ ID NO: 35653 - protein, 815 aa, Pseudomonas syringae pv. syringae B728a
MLLLWIVVLVVGIAWLAHRRTAPLPALGVVAVYLLAMGIFSHAPGWLLTVFWLLWLAVFVPVMLPDLRRKHFTAPMFSWFQKVLPPMSQTERDAIDAGTVWWDGELFSGRPDWDKLLAYPKVQLTEEEQAFIDGPTEELCAMVSDWEIGQAMDLPPEAWAHMKAHGFFALIIPKEFGGKGFSAYAHSQVAMKLATRSGDLASTVMVPNSLGPAELLLHYGTDEQRNHYLPRLARGEDIPCFALTGPLAGSDAGAMTDTGIICKGQWQGEEVIGLRLTWEKRYITLGPVATLLGLAFKAHDPEHLLGEKEDLGISLALIPTDTPGVEIGRRHLPLGAAFMNGPNSGKDVFVPLSYLIGGQPMLGKGWMMLMNCLSVGRSISLPAVGTGAAKYTSLVTGQYAKVREQFNVPLSAFEGIQEALARIGGNAWLMDSARMLTANAVDLGEKPSVLSAILKYHLTERGRECIGHAMDVHGGKGIIMGPNNYLGRNWQGAPIFITVEGANILSRNLMIFGQGAIRCHPFVLKEMALAGREDKQQALIEFDSLLLKHIGFAVSNAASTFILNLGFGHFERAPGNGLSQGYFRALNRQAAAFAMLADLSMMLLGGELKRRERLSARLGDVLSHMYLASAALKRYHDLGSPDHMSPLFRWAMEESLGHSERAMDEILSNFPNRILGGVLRAVVFPFGRRHKGPSDRLDAEVAQVLGRAKGDPTLEELLAGCYRPQSADDPVGALQQAIDLLSAAYPLHKKLQVAIKSGQVKPDAGEPVIDAALRIGVLQADEAQTLRTAEAARRKVIDVDDFDKEELTLAAGKIR

SEQ ID NO: 35654 - DNA, 2448 bp, Pseudomonas fluorescens Pf-5
  CDS (1)..(2448): transl_table=11
atgctgttgttgtggatactggttctggtgctcgcagtggcctacctggcccatcgccgtaccgcccccctgcccgccctcggcgtggtcgccatctacctcttggccatgggcgcctttagccgtgcccccggctggctgctgctgattttctgggtgctgctggcagcggtcgccgtccctctgctgctgcccgatctgcggcgcaagtatttcagtgcgccgctgttcagctggttccagaaggttctgccgccgatgtcccagaccgagcgcgatgccatcgatgccggcaccgtctggtgggacggcgagctgttcagtggccgccccgactggaataccttgctggcctaccccaaggcccagttgaccgaagaagagcaggcgttcatcgacggcccgaccgaggagctgtgcgccatggtcagcgactggcagatcggccagcacatggacctgccggccgaagcctgggcccacatcaaggagcacggtttctttgccctgatcattcccaaggagttcggcggcaagggcttctcggcctacgcccactcccaggtggccatgaagctggccacccgcagcggcgacctggcctccaccgtgatggtgcccaactccctgggcccggccgaactgctgctgcactacggcaccgacgaacagcgcaatcactacctgccgcggctggcccggggcgacgacattccctgcttcgccctcaccggtcccctggccggctccgatgcaggggccatgcccgacaccgggatcatctgcaaaggccaatggcagggtgaagaaaccctgggcctgcgcctgaactgggaaaagcgctacatcaccctgggcccggtggccaccctgctcggcctggccttcaaggcccatgacccggaccacctgctgggcgaccaggaagacctgggcatcagcctggcactgatccccaccgacacccccggggtggatatcggtcgccgccacctgcccctgggcgcggccttcatgaacggcccgaactccggcaaggacgtgttcattcccctggacttcctcatcggcggccaggaaatgctcggcaagggctggatgatgctgatgaattgcctgtccgtgggccgttcgatctccctgcccgcggtgggcaccggcgccgccaaattcaccagcctggtgaccggccagtacgcccaggtgcgggagcagttcaacgtgcccctcgccgccttcgagggcatccaggaggctctggcccgcctcggcggcaatgcctggctgatggacagtgcacgcatgctcactgccaacgccgtggacctgggggaaaaaccctcggtgctgtcggcgatcctcaagtaccacctcaccgagcgcggccgcgagtgcatcagccacgccatggacgtgcacggcggcaagggcatcatcatgggccccaacaactacctgggccgcagctggcaaggagcgccgatcttcatcaccgtggaaggcgccaacatcctttcgcgcaacctgatgatcttcggccagggggcaatccgctgccatccgttcgtgctcaaggaaatggccctggccggtcgcgaagaccacgaccaggcgctgcaggagttcgacgccctgctgctcaagcacataggtttcgccgtgagcaacgccgccagcaccctggtgctgaacctcggcctgggccacttcgaacacgttccgggagacaaggtcagccagggctacttccgtgccctgaaccgccaggccgcggccttcgccctgctggcggacttctcgatgatgctgctggggggcgaactcaaacgccgcgagcgcctttccgcccgcctgggggatgtgctcagccacctgtacctggcgtcggcagcgctcaagcgctaccacgacctggactccccggaatacctgcgccccctgctggcctgggccatggaagagagcctcgggcattccgaacgggccctggacgagttgctcagcaacttccccaaccgggtgttcggttgcgtgctgcgggtgctggtgttccccttcggccgtcgccataccgggccatcggaccagctggatgccgaagtggcggcgatcatcggtcgtgcccagggcgatccggccctggaagcggtgcttgccggctgctaccgcccgcaatccaaggacgacccggtgggcgccctgcaacatgccagcaacctgctgagcgccgtgcacccgttgcacaagaagctccacgaagcgctgaaaagcggccaggtcaaaccggctgccggcgaatcggccatcgacgcggcgctggaagccggcgtactgcaggccgccgaggcccagagcctgcacgaggccgaggcggcgcggcgcaaggtcatcgatgtggatgattttgctaaggaggagctgaccctaagcgaaggcaagacccgctag

SEQ ID NO: 35655 - protein, 815 aa, Pseudomonas fluorescens Pf-5
MLLLWILVLVLAVAYLAHRRTAPLPALGVVAIYLLAMGAFSRAPGWLLLIFWVLLAAVAVPLLLPDLRRKYFSAPLFSWFQKVLPPMSQTERDAIDAGTVWWDGELFSGRPDWNTLLAYPKAQLTEEEQAFIDGPTEELCAMVSDWQIGQHMDLPAEAWAHIKEHGFFALIIPKEFGGKGFSAYAHSQVAMKLATRSGDLASTVMVPNSLGPAELLLHYGTDEQRNHYLPRLARGDDIPCFALTGPLAGSDAGAMPDTGIICKGQWQGEETLGLRLNWEKRYITLGPVATLLGLAFKAHDPDHLLGDQEDLGISLALIPTDTPGVDIGRRHLPLGAAFMNGPNSGKDVFIPLDFLIGGQEMLGKGWMMLMNCLSVGRSISLPAVGTGAAKFTSLVTGQYAQVREQFNVPLAAFEGIQEALARLGGNAWLMDSARMLTANAVDLGEKPSVLSAILKYHLTERGRECISHAMDVHGGKGIIMGPNNYLGRSWQGAPIFITVEGANILSRNLMIFGQGAIRCHPFVLKEMALAGREDHDQALQEFDALLLKHIGFAVSNAASTLVLNLGLGHFEHVPGDKVSQGYFRALNRQAAAFALLADFSMMLLGGELKRRERLSARLGDVLSHLYLASAALKRYHDLDSPEYLRPLLAWAMEESLGHSERALDELLSNFPNRVFGCVLRVLVFPFGRRHTGPSDQLDAEVAAIIGRAQGDPALEAVLAGCYRPQSKDDPVGALQHASNLLSAVHPLHKKLHEALKSGQVKPAAGESAIDAALEAGVLQAAEAQSLHEAEAARRKVIDVDDFAKEELTLSEGKTR

SEQ ID NO: 35656 - DNA, 2985 bp, Psychrobacter arcticus 273-4
  CDS (1)..(2985): transl_table=11
atggccattggcttatttattttggcagtcatcattcaattagccatggtcttggccatctttttgttgtcgttatcgcgtgtcacaggcagcgtcgttgccttaattactgtcctcgttactgcttttatcagtccatggtcacttatcttaggtctacccattgcgctactttgcctagtgctgcttatcacccctatccgtcaaagcttgattaccaagcctgtctataaagcattgggcggcgcgatgccaagtatgagtgacacagagcgtgaagcgcttgatgcaggcaccagctggtgggaaaaagagctgtttatgggtgcgcctgattgggatacctttgcaaaatacccctatccagaattatcaaaagaagaacagagctttatagacaacgaagtagaagtactttgcgcaatgcttgatgagtggcaaattcatcatgaagataaagaattgtcaccagaggcgtggcgatttatcaaagctaatggctttttgggtttaattattcccaaagaatatggtggattggaatttagctcgtatgcccaaagtcgggtgatgagtaaaattgcatctcgctcgccgactgccgcagtgacttgtatggtaccaaactcactcggtcctggtgagctattgatgcattacggtaccgatgagcaaaagcaacgctggctacctggtctggctaaaggtgaagaagttccgtgctttggtttgacaggtccagaagctggatctgatgccggtgctattcctgataccggtgtggtttgttatgggctacatgaaggcgagcaagcgcttggtctgcggatgaatttttctaagcgctggattactttagcgcctatcgctacagtggtaggtttggcgtttaaactgcatgaccctgaaggcctgcttggtgatgctgaaaaaaccgattatggtattacttgtgcgctggtgccagccagccatcaaggggtcattattggtccacggcacaatccaatcggttcgccatttatgaatgggacagtcgatggtcaagatgtctttataccactagattatattatcggtggggttgaaaatgcaggacgcggttggcggatgctgatggagtgcttgggtgtcggtcgcggaatctcattgcctgccctatcaacttcagccagtgaaatgagctatttgtctgttagtgcctttgcaaaggttcgtgagcagtttaaaatctccgtcggtaaatttgaaggcgtgcaagatgccaccagccgcattgccagtaatacttatatgttagaagcctttcggcatatggtcacttgtggtctaaatcaaggtggtacaccatcagtaatgacagcaatggcaaaatactatgccaccgagaccatgcgttcagtgattaatgatggtatggatgtcgttggtggtcgcgctgtacaaatgggaccacgtaattttttagcgattccttatcaagccattcctgtatcgattaccgttgaaggtgccaatatattgacacgctcattgatgatttttggtcaaggtgccatgcgatgccacccttatctattcgatgagctacaactgttgcaaagcgaagataaagaaggcgcgcttaagcagttcgataacttattctttaagcatttaggttatacctttaatcgcggtgccaaagcatttgtcgcaggctacgtcggtggcagcaatgatgcgccaagcttttcggacaattttacccgtccttattataaggacatcaaccgcttaagcgcaggctttgctttaaccgctgacatgtctttagggttgcttgctggtgatttaaaacgtaaagagatgctctctggacgcttagcagacatccactctcatctgtttatctgtacagcaattttacaattttatgaatatggcagtaaatcagtcgctgaacgcttacatgctgaagtggcgctaaaaaatagcctttacactattcaagaagcattcctctctttatttgccaacttcccaaatcgtatggcagccaatttggtgagctttgttactttcccaagtggtcgtatctttgcgccagtgagcgatgcgctaaaacgccaattgggcgatacctttatggatgattttgaagccaatccttttcgcgattaccttaaaaccatggtgtattataatactgagcccgatgatgtcacggggcgtatggagcatgcctatcaaatactgctcgaagtcgaacctctatggcaaaaatttaagaaagcggaacataaagacagctttgaaggtttgacctttgaagaccatgtggtttatgccagtcaaaatggtgatattactgaagaagaagctgagcagctgataacctataatgcgatacgctatgattcattattgaccgatgtatttgataaacatttatccaaagtgcaagaacgtgaaaacccgcacagtctagagaatgccgtacataggctaactgactatgctgagttaaagagtcatgctgagttaaagagtcatgctgagttaaagagtcatgctgagttaaagagtcatgctgagttaaagagtcatgctcagttaaaccaggcattaagcgctgataacttgcagcagacctctgcaaatatggcatcaatgccagatagtaaccaaccaacaggagatgctaaccctgatcatggctatgagagtgatggcgatgtaaaaatggtgaatgagcaagatactgccaaggaaattaatgcacagactgattttcaggactcacatcctgaaatagaagcccttggctcgcgtcaccgtgatgcagcatcacacttgaatgaacgtatgagttacaaccatcgcctgaacaaagataaatttgttagcccagatagtgggcaagccgatcacgcgcagcaaacagaaagtagtgaccctacatggaaagatggtttgcgccgtgatgaaaacgacaatgtataa

SEQ ID NO: 35657 - protein, 994 aa, Psychrobacter arcticus 273-4
MAIGLFILAVIIQLAMVLAIFLLSLSRVTGSVVALITVLVTAFISPWSLILGLPIALLCLVLLITPIRQSLITKPVYKALGGAMPSMSDTEREALDAGTSWWEKELFMGAPDWDTFAKYPYPELSKEEQSFIDNEVEVLCAMLDEWQIHHEDKELSPEAWRFIKANGFLGLIIPKEYGGLEFSSYAQSRVMSKIASRSPTAAVTCMVPNSLGPGELLMHYGTDEQKQRWLPGLAKGEEVPCFGLTGPEAGSDAGAIPDTGVVCYGLHEGEQALGLRMNFSKRWITLAPIATVVGLAFKLHDPEGLLGDAEKTDYGITCALVPASHQGVIIGPRHNPIGSPFMNGTVDGQDVFIPLDYIIGGVENAGRGWRMLMECLGVGRGISLPALSTSASEMSYLSVSAFAKVREQFKISVGKFEGVQDATSRIASNTYMLEAFRHMVTCGLNQGGTPSVMTAMAKYYATETMRSVINDGMDVVGGRAVQMGPRNFLAIPYQAIPVSITVEGANILTRSLMIFGQGAMRCHPYLFDELQLLQSEDKEGALKQFDNLFFKHLGYTFNRGAKAFVAGYVGGSNDAPSFSDNFTRPYYKDINRLSAGFALTADMSLGLLAGDLKRKEMLSGRLADIHSHLFICTAILQFYEYGSKSVAERLHAEVALKNSLYTIQEAFLSLFANFPNRMAANLVSFVTFPSGRIFAPVSDALKRQLGDTFMDDFEANPFRDYLKTMVYYNTEPDDVTGRMEHAYQILLEVEPLWQKFKKAEHKDSFEGLTFEDHVVYASQNGDITEEEAEQLITYNAIRYDSLLTDVFDKHLSKVQERENPHSLENAVHRLTDYAELKSHAELKSHAELKSHAELKSHAELKSHAQLNQALSADNLQQTSANMASMPDSNQPTGDANPDHGYESDGDVKMVNEQDTAKEINAQTDFQDSHPEIEALGSRHRDAASHLNERMSYNHRLNKDKFVSPDSGQADHAQQTESSDPTWKDGLRRDENDNV

SEQ ID NO: 35658 - DNA, 2430 bp, Colwellia psychrerythraea 34H
  CDS (1)..(2430): transl_table=11
gtggatattattatttggttaatcgtcgcgctaaccctaacttggtttatgagctatacaagggcatcattatcaagttttaccttatgttttgccgctctaatggcgttagggtctttatttaacataatcggcatagtttcttggttactttttgctgtcatagccttgccgataaatattgataatattcgtcagcagtttattagtatgcctttattggctatttttaaaaaaataatgccgcaaatgtcttcgacagaacaagaagctatcgatgctggcaccacctggttcgatgcagatttatttcgtggtgaccctgactggctgaaacttcacaattaccctcgccctagactgagttcacaagaaaaagccttcttagatgggcctgttgaacaagtttgtgccatggttaacgattggcatattacccatgaaattgctgatcttccaccagaaatatggcagttcttaaaagaaaataaattttttgccatgattattaaaaaacaatatggtggattagaattttcagcttatgctcaatctagagtattacaaaaactcaccggcgtgagctcggttcttgccagcacggtcggtgttccaaactctttaggtcctggtgaattattacaggaatacggtacaaaagaacagcaggattactacttacctcgcctagcgaaaggtgaagaaataccttgttttgcgctaacaagtcctgaggcaggatccgatgcaggatctatccctgattatggtgttatatgtcatgggcaatttaacggagaagatgttttaggaatgaagttgacgtgggataaacgttacatcacccttgcccctatcgctacagtgctaggattagcctttaaattacaagaccccgataatcttctatctgagcaagaagacttaggtattacttgtgcacttatcccaactgatattgaaggaataacgattggtcgtaggcattttcccctaaacgttccttttcaaaatggaccaacccaagggaaagatgtttttgtcccactagattttataatcggtggttcagacatggcaggacaaggttggcgtatgttagtggagtgtttatctgttgggcgcgcaattacattgccttctaatagcacgggcggtgttaaaaccgcagcgttagctacaggtgcatatagccgcataagacggcagtttaagatgccaataggtaaaatggagggtattgaagagccacttgcccgtatcggtgctaatgcctatttaatggacgctgtcacaacgatgtcaacgggtgccatcgacttgggagaaaaaccttctgttatttcagccatagctaaataccatcttactgaaaaaatgcgctcttctattattgatgcgatggatattcatggcggaaaaggtatttgtatgggaccgaataattacctagcgcgtggttatcaaggcgcacctattgctgtgacggttgaaggagccaatattcttactcgcagtatgataatttatggtcaaggtgctattcgttgccacccatacgtattagcagaattagaagcagcaaataatagtgataatgaacaagcgctcaatgattttgaccatgccctttttggtcatataggttttagtctcagtaacattagccgtagtttatggtgctcaattaccggttcacgtttcttaggcagtccatatgatgatgggacacgccgctattatcaattactgacacgttttagtgccaatttagccatgctttcagatatttctatgttatcacttggtgcagatttaaaacgtaaagagcgaatttcagcaaggttaggtgatgtactaagtcaactgtatttagcgagcgcgaccttgaaacgctataatgatgaaggaagaaatactgctgaccttcctctagtacaatgggctgtagaggattgtctctacaatatccaacatgctattgatgagttgattagtaattttcctaacaaaattgttggaaaattattacgcgtgatcatcttccctctaggtacttggttaaaaaaacctaacgatgaaacatcacataaagttgcacaattattacaaacccctggctccgcacgtactcgattaggtcaaggacaatacctaacccgtgatggcaacaatatttttggcaggttagaacaagtacttgaagacatcattagttgcgagcctatttatgaaaaagtatgccgagaattaaataaaaaactacctttttatcacctagataaagtagctgagctcggacttactaataacattatttcaaaagtagaggctgaattattaacaacggccgaggttgggcgtcagtgggtaattgccgttgatgattttgatagtaaagacatgacggcattttcaggttctgcatag

SEQ ID NO: 35659 - protein, 809 aa, Colwellia psychrerythraea 34H
MDIIIWLIVALTLTWFMSYTRASLSSFTLCFAALMALGSLFNIIGIVSWLLFAVIALPINIDNIRQQFISMPLLAIFKKIMPQMSSTEQEAIDAGTTWFDADLFRGDPDWLKLHNYPRPRLSSQEKAFLDGPVEQVCAMVNDWHITHEIADLPPEIWQFLKENKFFAMIIKKQYGGLEFSAYAQSRVLQKLTGVSSVLASTVGVPNSLGPGELLQEYGTKEQQDYYLPRLAKGEEIPCFALTSPEAGSDAGSIPDYGVICHGQFNGEDVLGMKLTWDKRYITLAPIATVLGLAFKLQDPDNLLSEQEDLGITCALIPTDIEGITIGRRHFPLNVPFQNGPTQGKDVFVPLDFIIGGSDMAGQGWRMLVECLSVGRAITLPSNSTGGVKTAALATGAYSRIRRQFKMPIGKMEGIEEPLARIGANAYLMDAVTTMSTGAIDLGEKPSVISAIAKYHLTEKMRSSIIDAMDIHGGKGICMGPNNYLARGYQGAPIAVTVEGANILTRSMIIYGQGAIRCHPYVLAELEAANNSDNEQALNDFDHALFGHIGFSLSNISRSLWCSITGSRFLGSPYDDGTRRYYQLLTRFSANLAMLSDISMLSLGADLKRKERISARLGDVLSQLYLASATLKRYNDEGRNTADLPLVQWAVEDCLYNIQHAIDELISNFPNKIVGKLLRVIIFPLGTWLKKPNDETSHKVAQLLQTPGSARTRLGQGQYLTRDGNNIFGRLEQVLEDIISCEPIYEKVCRELNKKLPFYHLDKVAELGLTNNIISKVEAELLTTAEVGRQWVIAVDDFDSKDMTAFSGSA

SEQ ID NO: 35660 - DNA, 2448 bp, Pseudomonas syringae pv. phaseolicola 1448A
  CDS (1)..(2448): transl_table=11
atgctgttgttgtggattgtagtgctggtcgtcggcattgcctggctggcccatcggcgtaccgccccgctcccggcgcttggcgtggtagccgtctacctgctggccatgggcattttcagccacgcgccaggatggctgctgactgttttctgggtgctgtggctggcagtgttcgtacctgttgtgctgcccgacctgcgccgcaagcacttcactgcgcccatgttcagctggtttcagaaagtgctgccgcccatgtcggaaaccgagcgcgatgcgattgacgccggtacggtctggtgggatggcgagctgttcagcggtcgcccggactgggacaagctgctggcctatccaaaagtccagctcaccgaagaagaacaggcctttatcgacgggccgaccgaagaactctgcgcgatggtcagcgactgggaaataggtcaggccatggacctgccgcctgaagcctgggcgcacatgaaagagcacgggttctttgccctgatcattccgaaagaattcggtggcaagggcttctcggcctacgcccactctcaggtggccatgaaactggccacccgcagcggcgacctggcctccaccgtgatggtgcccaactccctcggccctgcagaattgctgctgcattacggcaccgacgaacagcgcaaccattacctgccacgtctggcacgtggcgaagatatcccctgcttcgcgctgacgggtccattggcaggttccgatgcgggcgcgatgcccgacaccggggttatctgcaaaggtcagtggcaaggcgaggaagtcatcggcctgcgcctgacctgggaaaagcgctacatcacccttggcccggtcgccaccctgctcggcctggctttcaaggcttacgaccctgagcacttgctaggcgaagaggaagatctcggcatcagcctggcattgattccgaccgacacgccaggcgttgaaatcggccgtcgccacttgccgctgggcgcagcgttcatgaacggcccgaattcaggcaaggacgtctttgttccgctgagctacctgatcggcggccagccaatgctcggcaaaggctggatgatgctgatgaactgcctgtcggtaggacgttcgatttcgctgcccgcggtcggcaccggcgctgccaagtacactagcctggtcaccggccagtacgccaaggtgcgcgagcaattcaatgtgccgctgtcggcgttcgaaggtattcaggaagcgctggcgcgcatcggcggcaacgcctggctgatggacagcgcgcgcatgctgaccgccaatgcggtcgatctgggagaaaaaccctcggtgctctccgcgatcctcaaataccacctgaccgagcgtggccgcgaatgtatcggtcacgccatggatgtgcatggcggcaagggcatcatcatgggcccgaacaactacctgggccgcaactggcaaggcgcgccgattttcatcaccgttgaaggggcgaatatcctttcacgtaacctgatgatcttcggccagggtgccattcgctgccatccattcgtgctcaaggaaatggccttggccggtcgcgaagacaagcagcaggcgctgctcgagtttgacgcgctcctgctcaagcacatcggttttgcggtgagcaacgccgccagcaccctgattcttaatctgggctttggccattttgaaagagcaccgggcaacagcctgagccaaggctacttccgcgcgttgaaccgtcaggcagcagctttcgcgatgttggcggacttgagcatgatgctgctgggcggcgagttgaaacgccgcgaacgcctgtcggcgcgtctgggggatgtgctcagtcatatgtatctggcttcggcggcactcaagcgctaccacgatcttggctcgccagatcacatgagcccgctgtttcgctgggccatggaagaaagtctgggccattcggaacgtgccatggacgaaatcctcggcaacttccctaaccgtgtactgggtgggctgttgcgtgcagtggtgttcccgttcggtcgtcgccacaagggcccttcggacaagctggacgccgaagttgcacaggtactgggccgcgccaagggcgatccgacactggaagagttgctcgcaggctgctatcgcccgcaatcggcagaagatccggttggcgcgctgcaacatgccatcgacttgctgactactgcgtatccgctgcacaagaagctgcaaacggcgctcaagagtggtcagatcaaaccggccgcaggcgagcatgccatcgacgctgcgttgcgcatcggtgtattgcaggcagaagaggcacagacactgcgtacagccgaagccgcccgtcgcaaggtgatcgacgtggatgatttcgacaaggaagaactgaccctggcagcgggcaagattcgctga

SEQ ID NO: 35661 - protein, 815 aa, Pseudomonas syringae pv. phaseolicola 1448A
MLLLWIVVLVVGIAWLAHRRTAPLPALGVVAVYLLAMGIFSHAPGWLLTVFWVLWLAVFVPVVLPDLRRKHFTAPMFSWFQKVLPPMSETERDAIDAGTVWWDGELFSGRPDWDKLLAYPKVQLTEEEQAFIDGPTEELCAMVSDWEIGQAMDLPPEAWAHMKEHGFFALIIPKEFGGKGFSAYAHSQVAMKLATRSGDLASTVMVPNSLGPAELLLHYGTDEQRNHYLPRLARGEDIPCFALTGPLAGSDAGAMPDTGVICKGQWQGEEVIGLRLTWEKRYITLGPVATLLGLAFKAYDPEHLLGEEEDLGISLALIPTDTPGVEIGRRHLPLGAAFMNGPNSGKDVFVPLSYLIGGQPMLGKGWMMLMNCLSVGRSISLPAVGTGAAKYTSLVTGQYAKVREQFNVPLSAFEGIQEALARIGGNAWLMDSARMLTANAVDLGEKPSVLSAILKYHLTERGRECIGHAMDVHGGKGIIMGPNNYLGRNWQGAPIFITVEGANILSRNLMIFGQGAIRCHPFVLKEMALAGREDKQQALLEFDALLLKHIGFAVSNAASTLILNLGFGHFERAPGNSLSQGYFRALNRQAAAFAMLADLSMMLLGGELKRRERLSARLGDVLSHMYLASAALKRYHDLGSPDHMSPLFRWAMEESLGHSERAMDEILGNFPNRVLGGLLRAVVFPFGRRHKGPSDKLDAEVAQVLGRAKGDPTLEELLAGCYRPQSAEDPVGALQHAIDLLTTAYPLHKKLQTALKSGQIKPAAGEHAIDAALRIGVLQAEEAQTLRTAEAARRKVIDVDDFDKEELTLAAGKIR

SEQ ID NO: 35662 - DNA, 2355 bp, Dechloromonas aromatica RCB
  CDS (1)..(2355): transl_table=11
atgttcaacagcatcatccctctgctcgggttagtcaccctggtggctttggtcgggctgatggtcgttcggccaatccgccggacgatcatcacccgacccattttttccacttatcgcaaggtgctgccgcagatgtcggataccgagcgcgatgcgctggaagccggcaccgtctggtgggagggggaactgttccgtggcaagccggactggcagaaattgcatgcctaccctgtgcccaaactgacaccggccgagcagtccttcctcgacaacgaatgtgaagaagcctgccgtcgggtcgatgactggaaggtgacgcacgagctgtacgatctgccggccgaggcctggcgctacatcaaagacaagggcttcctcggcatgatcattccgaagaagtacggtggcctggagttctcggcctacgcccattcgcaggtggtaaccaagttgtcgacgcgctcttcggcgctgtcggtttcggtcatggtgccgaactcgctcggcccggccgagttgctgctgcattacggtaccgaggcacagaaaagccactatctgccgcgcctggccaagggcatcgaggtgccggccttcgcgctgaccagcccgtgggccggttccgatgcggcgtcgattcccgatgccggcgtggtttgcaagggcatgtaccagggcaaggaagtgctcggcatgcgcgtcagttgggacaagcgttacatcaccttggccccggtttgcaccgtgttcggtctggcttttcacctgtatgacccggatggcctgctcggcgacaagaaacatatcggtatcacctgcgcgctggtcccttatgatcatccaggcgtcgataccggccgccgtcacttcccgctcaacgccatgttcatgaatggcccgacgcgcggtaccgatgtgttcatgccgctcgatttcattatcggtggtccggaaaaggccgggcacggttggcgcatgctaatggagtgcctggctgccggtcgttcgatctcgctgccttcatcgaataccggcatggcccagatgacggcgcgtgccgttggcggttatgcccgtgtccgcagccagttcaagatggcggtcggcaagttcgagggcgtcgaggaagcgctgacccggatcggcgcctacacctacatgatggacgccgtgcgcacgatgacggccggtgccgtcgacctcggcgaaaagccgtcggtcgtctcggccatcgccaagtaccacgtcaccgagcgtgcccgccaggtggtcaatgacggcatggacgtgatcggtggcaagggcatctgccttggcccttccaacttcatggggcgtgcctaccagcaggtgccgatcggcatcacggtcgaaggcgccaatatcctgacccgttcgctgattatcttcggccagggcgctatccgttgccatccatatctgttgccggaaatgcaggcagcgcagaacccggatcagaaaaaaggcctggtcgacttcgacaaggcactgttcggccatatcggcttcaccattaaaaatggcctgaaggccctgtggctgggcatgactggttcgcacttcgcctcggtgaacgtcgataccgccccggaaatgaagcgttattaccagcaactgacgcgcttctcggcagcctttgccttcatgtcggatatctccctgctggtccttgggggcagcgtcaaacgtcgtgaaaagctgtcggcccgccttggcgacatcctggcccagatgtatctgatttcctgtaccttgaaacgctacgaagacgaaggtcgcaaggccgaagatgcaccgctggctcactgggcgatctgggatgccatgtacaaggcgcaggaggcattcgatggcgtgatcgccaacttcccggtgcgcttcatcgcggccttcctgcatcgctcgattttcccgtggggccatccgtatgtcgtgccatcggacgatgtcggccaccaagtcgccaagctgctgatttcgccatcggcttcccgtgatcgtctgacggccgagtgcttcctgccgttgcttgaaaccgagccggttggcgccatcgaactggccctgaaggcgacgctgctggctgaaccgatcgaagccaaaatccgtgctgccgaaaaagaagggcgtttcgataacaatccgctggccaacgtccgcgacatcgccatcgttgctttcgaggccggggtgatctcggcggccgattacgaaatcatgaagcagcgtaaccacctgcgcgacatcgtggtccatgtcgatgactttcccttcgattacggcgtggcgactgcaaacaagccggccgaatgccggatggctgcctga

SEQ ID NO: 35663 - protein, 784 aa, Dechloromonas aromatica RCB
MFNSIIPLLGLVTLVALVGLMVVRPIRRTIITRPIFSTYRKVLPQMSDTERDALEAGTVWWEGELFRGKPDWQKLHAYPVPKLTPAEQSFLDNECEEACRRVDDWKVTHELYDLPAEAWRYIKDKGFLGMIIPKKYGGLEFSAYAHSQVVTKLSTRSSALSVSVMVPNSLGPAELLLHYGTEAQKSHYLPRLAKGIEVPAFALTSPWAGSDAASIPDAGVVCKGMYQGKEVLGMRVSWDKRYITLAPVCTVFGLAFHLYDPDGLLGDKKHIGITCALVPYDHPGVDTGRRHFPLNAMFMNGPTRGTDVFMPLDFIIGGPEKAGHGWRMLMECLAAGRSISLPSSNTGMAQMTARAVGGYARVRSQFKMAVGKFEGVEEALTRIGAYTYMMDAVRTMTAGAVDLGEKPSVVSAIAKYHVTERARQVVNDGMDVIGGKGICLGPSNFMGRAYQQVPIGITVEGANILTRSLIIFGQGAIRCHPYLLPEMQAAQNPDQKKGLVDFDKALFGHIGFTIKNGLKALWLGMTGSHFASVNVDTAPEMKRYYQQLTRFSAAFAFMSDISLLVLGGSVKRREKLSARLGDILAQMYLISCTLKRYEDEGRKAEDAPLAHWAIWDAMYKAQEAFDGVIANFPVRFIAAFLHRSIFPWGHPYVVPSDDVGHQVAKLLISPSASRDRLTAECFLPLLETEPVGAIELALKATLLAEPIEAKIRAAEKEGRFDNNPLANVRDIAIVAFEAGVISAADYEIMKQRNHLRDIVVHVDDFPFDYGVATANKPAECRMAA

SEQ ID NO: 35664 - DNA, 2241 bp, Francisella tularensis subsp. holarctica
  CDS (1)..(2241): transl_table=11
atgttcaataaaatttataaaatagccaaaaaagccacgccgacaatttcgcaaacagaacaaacagctcttaatgctggcaataactggtttgaacaagatatattccaaggtaaacctgactttaataaactgcatagtttgaaaaagtttgaactaacagctgaagaaaagtcttttttagcaaatgaaacaaccgagctatgtaaactaattgatgattggaagattaattatcaagaaaaagatttaagtgtcgaagcttgggattttatccgtaacaaaggctttttagggctagtaatcggtaaagagtacggtggtaaaggtttctcagcagcagcgcactcagaaatagtgatgaaattagcaaccaagagtgtcactgcagcaattactgtgatggtacctaactcacttggaccaggagagcttctagttcattatggtacagatgagcaaaaagatcactatctaccaagattagcctctggccaagagataccatgttttgctttaacaggaccaacagctgggtctgatgcggcttcattacctgactatggtgttgtctgccatgaagagttcaatggtaaaaaaactctagggataaaactaaaaaatattaataaacgctatatcacattagctcctatagccaccctcgttggtctagcttttcaactacaagatcctgataatctactcggtgatacaggtaaagaaggcataacatgcgcactgctaccatataaccataaaggcttagaaatcggcaaacgtggctttccactagggcaaacatttatgaatggctatatcaaagcgaaagatgtatttatcccaattgattggataattggcgaacaaaaaatggctggcgaaggttggcggatgctagttgagtgtctatctataggtagagctatttcactaccagcgtgtggtacagctaacacactaatgtcagctgtaattaccgcagcatatgcaagtgtgcgtgaacaattcaaagttccaatcgcacaatttgaaggagtccaagaaaaactagctcaaactgcaggacttgcatatattgctaatgctactcgtcaattcacggttgctgctgttgatagtggtctgcgaccatctgtatcatctgcgattgcaaaatatcacctaaccgagatggggcgcacaactatcaacaatgctatggatatccatggtggtcgagcaatcattatgggaccaaataactatctagctattccatatatggcgacaccgattggtataactgttgagggtgccaatatcatgacacgaaatctaatgatctttggtcaaggtgcgatgaagtgccatccatatattcgtaacgagatagaaagcctaatgaatgatgatgaagaacaatttacaactaatttcaaaagtcattttaaatatatggctttgaatggctcgcgtactctttggtatggtttaagtggtggtttcactgctcctagctacccttctaaatttaaacgttactatcgctatatctcacatatgagtactgcttattcgtatgtgaatgatatttcaataacagttttaggtgctggtctaaaacgtaaagaaagattatctgcccgtttgggagatataatgagttatctgtatatggctgtagctgtattgaaatactataaggacacaggcgaacctcaaagtgatgatatctatgttgattggagtattcagcactgtctataccaagctcaacaagcgatgttagacttatttagaaatttcccaaatagaatatttgctaccaagatgaagctttttgtttttccttatggtaaaaaattcagaagaccatctgacaagcttgaagcacaaatctgtaattcattagtcagtaatagtgatactagacaatggatgaaagataaatgctacatacctaatgacgataatgatcctattggtagagttgaaaatgcttatcttgcatcattgactactcaacctatcaagaaaaaaattattgatgctataaaaactgctaagctaccaaaagcaagctggcaaaactctatagacatagccctagagaataaaataatcacacaacaagaggcaaatattgctcatgagatgcttacaaaggtcaataatataatccaaactgatgagtttgatgattatgctctagggcctaaaaatgctcatctagaatggcaaaaagataccgacaagtag

SEQ ID NO: 35665 - protein, 746 aa, Francisella tularensis subsp. holarctica
MFNKIYKIAKKATPTISQTEQTALNAGNNWFEQDIFQGKPDFNKLHSLKKFELTAEEKSFLANETTELCKLIDDWKINYQEKDLSVEAWDFIRNKGFLGLVIGKEYGGKGFSAAAHSEIVMKLATKSVTAAITVMVPNSLGPGELLVHYGTDEQKDHYLPRLASGQEIPCFALTGPTAGSDAASLPDYGVVCHEEFNGKKTLGIKLKNINKRYITLAPIATLVGLAFQLQDPDNLLGDTGKEGITCALLPYNHKGLEIGKRGFPLGQTFMNGYIKAKDVFIPIDWIIGEQKMAGEGWRMLVECLSIGRAISLPACGTANTLMSAVITAAYASVREQFKVPIAQFEGVQEKLAQTAGLAYIANATRQFTVAAVDSGLRPSVSSAIAKYHLTEMGRTTINNAMDIHGGRAIIMGPNNYLAIPYMATPIGITVEGANIMTRNLMIFGQGAMKCHPYIRNEIESLMNDDEEQFTTNFKSHFKYMALNGSRTLWYGLSGGFTAPSYPSKFKRYYRYISHMSTAYSYVNDISITVLGAGLKRKERLSARLGDIMSYLYMAVAVLKYYKDTGEPQSDDIYVDWSIQHCLYQAQQAMLDLFRNFPNRIFATKMKLFVFPYGKKFRRPSDKLEAQICNSLVSNSDTRQWMKDKCYIPNDDNDPIGRVENAYLASLTTQPIKKKIIDAIKTAKLPKASWQNSIDIALENKIITQQEANIAHEMLTKVNNIIQTDEFDDYALGPKNAHLEWQKDTDK

SEQ ID NO: 35666 - DNA, 2499 bp, Burkholderia xenovorans LB400
  CDS (1)..(2499): transl_table=11
atgccgtggttcatcctagtgctcgtcatcgccgctctcgcgctcgtctacgttcaggcacgcgccgcatggtggcttgccttcatgatcgtctgggtggcggccgcgcacgtgagcggtgccgcgggcgcggtggccaccacgctgctcgccatcgtcttcgtcctgcctgccctcgtgctcgcgctcaagccgctgcgccgcgcgtggctcgcgaggcccgtgctcgacatcttccgcaagatcctgccggagatgtcgccgaccgagcgtgacgcgatcgaagccggcacggtctggtgggacgccgaactgttctcgggccgcccgcactgggacaagctgctcggctacggccccgccacgctgagcgcggaagaacagtcgttcctcgacgtcgaatgcgagcagctgtgcgatctcgcgaacgactgggacaccaccatgatctggcaggacctgtcgccgcaaacctggcagtacatcaaggagcgcggctttctcggcatgatcattccgaagcggtacggcggcaagcagttctccgcgtatgcgcattcgcaggtcatcatgaagctcgccacgcgctgctcggccgccgccgtttcggtgatggtgccgaactcgctcggccccgccgaactgctgatgcactacggcaccgacgagcagaaaaaccactatctgccgcgcctcgcccgcggcgaggaaattccctgcttcgcattgacgagcccgtacgccggttccgatgcagcggcgattccggatgtcggcatcgtatgccaaggcacgttcgaaggccgcgagacgctcggttttcgcgtcacgtgggacaagcgctacatcacgctcggaccgatcgcgaccgtgctcggtctcgccttccgcgcgctcgatcccgaccatctgctcggcacgaacgatgaacccggcattacctgtgcgctgattccgaccgaccatccgggtgtgaacatcggccggcgtcactggccgctcaacgcggtgttccagaacggtccgaactcgggcaaggacgtgttcattccgctcgactgggtgatcggcgggcgcgcgcaggtcggcaacggctggcgcatgctgatggaatgcctcgcagcgggccgggcgatttcgctgccgtcctcgaatgtgggaatggcgaaaatcgccgtgcgcggcaccggcgcttatgccgcgattcgccgccagttccgcaccgccgtcggcaagttcgaaggcgtgcaggaagcgctcggccgcatgggcggcaacctgtatgtgatggacgccgcgcggcgcctgtcggcgcacgcggtggacctcggcgaaaaaccctcggtgatttcggcgatcgccaagtatcacatcaccgagcgcgcccgcatcgtcatcaacgacggcatggatatcgccgccggcaagggcatctgcatggggccgtcgaactttctcgcgcgcgcctatcagcaggtgccgatcgcgatcaccgtggaaggcgcgaacattctcacgcgctgcctgatcattttcggccagggtgcgatccgctgtcatccgtatgtgctgaaggaaatggccgccacgcgcgaaacggatcgcgcgaaggcgctgcgcgatttcgacgcagcgttcttcggccacgtcagcttcacgctgtccaacgtggtgcgcagtttcgtgtacggcgtgacgggtggcgcgttcatcgccaggccgcgcatggcccatgcgccgctgcatgcgtactatcgcgcggcgacccgcctttccaccgcattcgcgctgctcgccgacgtctcgatgttcgtgctcggcggcgatctgaaacgccgtgagcgcatctccgcgcgtctgggcgacgtgctgtcgcagctctacctgatctcggccacgctcaagcgcttcgaggacgaaggccgtcaggaagaagacctgccgctggtccgctggggcgtcgaggattcgctgtacaaggcgcaacacgcgctcgacggcgtgcttgccaactacccgaaccgcgtcgccgccggcctcgtgcgcgtgctcgcgtttccgttcgggctgccgcaccgtgagccgtccgaccgcctcggcagccaaatcgccgaactgatgcaaacgccgggcgccgcgcgcaaccgtctggtgtccgattcatacgtgccgcatcccgatgtcgatgcgctcggctacggcgagctggtgttcgaactgaacccgcgcttcacgcagatcgaccagaagctgcgcgaggcggtcaaacaaggtctgctcgagccgatgccgcagagcctgccgcaactggccgcatggaccgacgcggcgcagaaaaaaggcctgctcgacgccgacgaacgccgcgtgctcgacgactacgcgcgttatggcgcacaagtcgtgaaggtggacgatttccccgccgacttcgacatgcttgccaatctgcaaaaacgcaaggagacgctggaaaaggcgctggagctcgcggcctga

SEQ ID NO: 35667 - protein, 832 aa, Burkholderia xenovorans LB400
MPWFILVLVIAALALVYVQARAAWWLAFMIVWVAAAHVSGAAGAVATTLLAIVFVLPALVLALKPLRRAWLARPVLDIFRKILPEMSPTERDAIEAGTVWWDAELFSGRPHWDKLLGYGPATLSAEEQSFLDVECEQLCDLANDWDTTMIWQDLSPQTWQYIKERGFLGMIIPKRYGGKQFSAYAHSQVIMKLATRCSAAAVSVMVPNSLGPAELLMHYGTDEQKNHYLPRLARGEEIPCFALTSPYAGSDAAAIPDVGIVCQGTFEGRETLGFRVTWDKRYITLGPIATVLGLAFRALDPDHLLGTNDEPGITCALIPTDHPGVNIGRRHWPLNAVFQNGPNSGKDVFIPLDWVIGGRAQVGNGWRMLMECLAAGRAISLPSSNVGMAKIAVRGTGAYAAIRRQFRTAVGKFEGVQEALGRMGGNLYVMDAARRLSAHAVDLGEKPSVISAIAKYHITERARIVINDGMDIAAGKGICMGPSNFLARAYQQVPIAITVEGANILTRCLIIFGQGAIRCHPYVLKEMAATRETDRAKALRDFDAAFFGHVSFTLSNVVRSFVYGVTGGAFIARPRMAHAPLHAYYRAATRLSTAFALLADVSMFVLGGDLKRRERISARLGDVLSQLYLISATLKRFEDEGRQEEDLPLVRWGVEDSLYKAQHALDGVLANYPNRVAAGLVRVLAFPFGLPHREPSDRLGSQIAELMQTPGAARNRLVSDSYVPHPDVDALGYGELVFELNPRFTQIDQKLREAVKQGLLEPMPQSLPQLAAWTDAAQKKGLLDADERRVLDDYARYGAQVVKVDDFPADFDMLANLQKRKETLEKALELAA

SEQ ID NO: 35668 - DNA, 2274 bp, Mesorhizobium sp. BNC1
  CDS (1)..(2274): transl_table=11
atgggttttcgccgcgatcgtctcaccgcgcccattttcaagtgggcttccggcatcatgcctcccatctcccagacggagcgggaggcgatcgatgccggcactgtctggtgggacggggctctctttaccggaaatccggattggaacgagcttctctccatgccggaggccgagctttcggcagaggagcaggccttcatggacgggccggtgcgccagctttgcgccatggtcgacgattggacgctcaactggcgcgaccgcgacctcgcgaactcggtttgggatttcatgcgccgcgagaagttcttcggcatgatcattccgaaggcgtatggcgggcttggcttctccaatttcgcccattcggaggtcgttcgcaccgtctcctccgcaagcgtggtcgcgggtgtgaccgtgatggtgccgaactctctcggacccggcgaactcctcatgcatttcggtaccgacgagcagcgggattattggctgccgcggctggcggacggccgggaaatcccctgcttcgggcttacatcgccgcatgcgggttcggatgccgcgtccatgacggatacgggcgtggtggaatacggcacgtggaaggggaggaaggtccttggcatcaggctcaatttccacaagcgctatatcacgctaggaccgatcgcgaccgtcatgggcctcgccttcaagatgcgcgatccgcaaaaactcctcggccgcggggaagagcttggcatcacggtggcgttgctccccaccgacacgcccggcgtttcccatggcgagcggcacattccgctcttcacctttttccagaacggccccctctacggcaaggatgttttcgtgccgctcgaccacattctcggcggagaaaaacagatcggccagggatggaccatgctgatgaccgcgcttgccgccgggcgcagcatttcgctgccctcccaatcggcggcatccgcggcgatggccgcgcgaacgagcggggcttatgcgcggattcgcacccagttcaatgtccccattggttttttcgagggcgtgcaagtgccgctggccgaaatggcggccaatgcctatctgatcgatgccggaaggaggctgaccctcgccgccctggacaagggccatcggccgtcagtgctttcggccatcatgaaatatcatgccacagaacgcatgcgccgttccatgacgcacgcgatggatgtccacggcggcaaagccatcatcgaggggccgcgtaactatctggcctcaggctatcgctcggtccccatcggcattacggtggagggcgccaatatcctcacgcgcaatctgatgattttcggccagggcgcgatccgttcgcatccattcatgctgaaggagctgttggcgctttcaaatgaggacaaaggccgcgggctgaccgcatttgatgatgttttttggaagcatctcgcgcatgccgcaaagaatgcaggccgcgcctttttccgcggctggtcgggatcaatgattggtcccgctccgcgcagtgccgcgaacccgcgctactggaagaagctttcccgccatacggcggcatttgcgcttaccgccgatcttgcgctcctgacgctgggcgggtctttgaaacgcaaggagatgctttcggcccggctgggcgatatccttgcggaactttatctcctgggcgcggtgctgaagcgcttcgaagacgaaggccgccaagccgaagatctgccgatcgtggagtatttgatgcggcagggagaaagccgcatcgccgccgcctttcgcggcgtgctcgacaatctgcccgcgcgttgggcggcgtggctggtgcggctgctcgcctttccattcggcgtgcccgatcccactccctccgaccggctgacggcgcgcatcgcggaaattcttttgaaaccctcatctcaaagggaccgtctgacacccggcctctatcttggcgacggccatgccgagcatcccctcaaggatttggaggaagctttccggcttgtgattgaagccgcgcctatcgagaagaagatgcgggaagcacgcattcacgacactcaagcggcgctggatgagaaggtcattacgccagcggaacgggagttgcttggccgcgctgcggcggcggtggaaaaggttgttgcggtcgatgcgttcccgatggaggcgctttctcccacggccggccagcacaagcggcagaagcccacaccgcggcgcccacgtcagaagcaaacagcggaatag

SEQ ID NO: 35669 - protein, 757 aa, Mesorhizobium sp. BNC1
MGFRRDRLTAPIFKWASGIMPPISQTEREAIDAGTVWWDGALFTGNPDWNELLSMPEAELSAEEQAFMDGPVRQLCAMVDDWTLNWRDRDLANSVWDFMRREKFFGMIIPKAYGGLGFSNFAHSEVVRTVSSASVVAGVTVMVPNSLGPGELLMHFGTDEQRDYWLPRLADGREIPCFGLTSPHAGSDAASMTDTGVVEYGTWKGRKVLGIRLNFHKRYITLGPIATVMGLAFKMRDPQKLLGRGEELGITVALLPTDTPGVSHGERHIPLFTFFQNGPLYGKDVFVPLDHILGGEKQIGQGWTMLMTALAAGRSISLPSQSAASAAMAARTSGAYARIRTQFNVPIGFFEGVQVPLAEMAANAYLIDAGRRLTLAALDKGHRPSVLSAIMKYHATERMRRSMTHAMDVHGGKAIIEGPRNYLASGYRSVPIGITVEGANILTRNLMIFGQGAIRSHPFMLKELLALSNEDKGRGLTAFDDVFWKHLAHAAKNAGRAFFRGWSGSMIGPAPRSAANPRYWKKLSRHTAAFALTADLALLTLGGSLKRKEMLSARLGDILAELYLLGAVLKRFEDEGRQAEDLPIVEYLMRQGESRIAAAFRGVLDNLPARWAAWLVRLLAFPFGVPDPTPSDRLTARIAEILLKPSSQRDRLTPGLYLGDGHAEHPLKDLEEAFRLVIEAAPIEKKMREARIHDTQAALDEKVITPAERELLGRAAAAVEKVVAVDAFPMEALSPTAGQHKRQKPTPRRPRQKQTAE

SEQ ID NO: 35670 - DNA, 2280 bp, Shewanella sp. MR-4
  CDS (1)..(2280): transl_table=11
atgttgacgattataattattgccctgattgcgattattgcgctgtttgcagtaaagagccttcggatgcaatttatcacccagccggtttttcacttctttaaaaaagtattaccgccattatccgataccgagcgcgaagcgatggaagcgggtgatgtgtggtgggaaggcgagctattccgcggtaatccaaattggaataccctgcacagctacggtaaacccacactcacggctgaagagaaagactttatcgataatcaggtgatgaccgccctgaagatgatcgatgattttgatatcgtgcataaccgtaaggatttgccaccagagctgtgggactactttaagaaagaaggcttttttgcgctgatcatcccgaaaaagtttggtggtcgtgcgttttctgcctacgccaactcgacgattgtgagtaaattagccagccgcagcgtgagtgccgcggtcactgtgatggtgccaaactcattaggccctggtgagcttttgactcactatggcactaaggagcaaaaggagcgctggttacctgcattagctaagggtgatgagatcccatgctttgcattaactggtccagaagcaggtagtgatgcgggcgctatccccgatgtgggtattgtttgccgtggtgagtttaacggtgaagaagttttaggcctgaaattaacctgggacaagcgttatattaccctcgcaccagtggcaaccgtattaggtttagccttccagatgcgcgatcctgatggtttgcttggtgataaaaagaatttaggtattacctgtgccttgatcccaaccgatcatcctggtgttgtcattggccgtcgtcataatccgctcaacatggcgtttatgaacgggactactaagggcgaagaagtctttattccgctggattggatcatcggtggtcctgagtttgcgggcagaggctggcgcatgctggttgaatgtttatcggcgggtcgcggtatttctctgcctgcattggctaccgcgtctggccatatggcgaccaaaaccaccacggcttacagctatgtgcgtcatcaatttggtatggcgattggcaactttgaaggtgtgcaggaagcgctggcgcgcattatcgccaatacttatcaattggaagcggcgcgccgtttaaccaccacggggatcgatcttaaagttaaaccttcagtggtgacagcgattgccaaattccacatgactgaacttggccgcgcggtgatgaacgatgcgatggatattcagtcgggtaagggcattcaattaggacctaaaaactacttaggccacccttatatgtcgaatcctatttcgattaccgttgaaggagcgaacattttgacgcgttccttgatgatttttggtcaaggtgcaacccgttgccatccttatgtgttggccgaaatggaagccgcggcgatggaaaacgagcacgatgcgctcgagcgtttcgactcgctgttaatgggtcatatgggttacgccactcgtaacgcgtttagcgccttattcaacgccttgactgccagccgctttggtagtgcgccagtgagcggtgaaactaagcagtattataaagatatgtcgcgcatttcatcggcattagccttgatgacagatatttcgatgctgatcatgggcggcgatttgaagcgtaaggaaatgttgtcggcacgtatgggggatgtgttaagccagctgtacttaggctcggctaccctaaaactgtttgaagacaatggccgtcaacaggacgatttacccgcggtgcgttatgtgatggcaaatcgcttgcacttagcagctaaagcgcttgaagaagtgatccgtaacttcccgaaccgcccatttgcatggctgctacgtgcgctgattttccccatcggcaaccatttcaacgcgcctagcgataaaatggggaccgaattggtctctggcatgttaaaaccaagtcctgcccgtgaacgcattactttcctatgccctgagtttgaaggcgacgtgggtggtattgctgaagttgaacaggccttcgtggcgcaatatgcctgtaaagagatttacaagaagctcaagaaagcgcaacgcgccggtgagttaccagccaaagtgcctaacttggtgttatttgctaaagcgttggagcagggcactgtgactcaagatgagcatcaaaagctgttacatgctgataagctgcgcttagcggccatcaatgtgaatgattttgaagccttataa

SEQ ID NO: 35671 - protein, 759 aa, Shewanella sp. MR-4
MLTIIIIALIAIIALFAVKSLRMQFITQPVFHFFKKVLPPLSDTEREAMEAGDVWWEGELFRGNPNWNTLHSYGKPTLTAEEKDFIDNQVMTALKMIDDFDIVHNRKDLPPELWDYFKKEGFFALIIPKKFGGRAFSAYANSTIVSKLASRSVSAAVTVMVPNSLGPGELLTHYGTKEQKERWLPALAKGDEIPCFALTGPEAGSDAGAIPDVGIVCRGEFNGEEVLGLKLTWDKRYITLAPVATVLGLAFQMRDPDGLLGDKKNLGITCALIPTDHPGVVIGRRHNPLNMAFMNGTTKGEEVFIPLDWIIGGPEFAGRGWRMLVECLSAGRGISLPALATASGHMATKTTTAYSYVRHQFGMAIGNFEGVQEALARIIANTYQLEAARRLTTTGIDLKVKPSVVTAIAKFHMTELGRAVMNDAMDIQSGKGIQLGPKNYLGHPYMSNPISITVEGANILTRSLMIFGQGATRCHPYVLAEMEAAAMENEHDALERFDSLLMGHMGYATRNAFSALFNALTASRFGSAPVSGETKQYYKDMSRISSALALMTDISMLIMGGDLKRKEMLSARMGDVLSQLYLGSATLKLFEDNGRQQDDLPAVRYVMANRLHLAAKALEEVIRNFPNRPFAWLLRALIFPIGNHFNAPSDKMGTELVSGMLKPSPARERITFLCPEFEGDVGGIAEVEQAFVAQYACKEIYKKLKKAQRAGELPAKVPNLVLFAKALEQGTVTQDEHQKLLHADKLRLAAINVNDFEAL

SEQ ID NO: 35672 - DNA, 2448 bp, Shewanella sp. MR-4
  CDS (1)..(2448): transl_table=11
gtgactaccctactttggatcatcgccatgatcttagtgctaggagccctagcttaccttcgggtatctttgctcactgccactattgcagccgctgttgtgatgacagccggatggacactcgatgttgttggccctatctcttggattatcttcctagtgatcgcgctgcccctcaatatcagtgcatttagacaaaatgttatcagtcgcccactgatgaagatgtaccgtggcatcatgcccgaaatgtcttctaccgaaaaagaagcgattgaagccggtaccacttggtgggaagccgatctgtttgcgggtaacccgaactggaaaaaactccacaactaccctgtcgctcgtttaagtgccgatgagcaagccttcttagacggtccagttgaagaagtgtgccgcatggtgaaccaacatcaagtatcacatcaactggctgatttgcctgctgaagtatggcaatacctgaaagatcacggcttcttcgccatgattatcaagaaaaaatacggcggtttagagtactcagcctacgcccaatcacgcgtgctgcaaaagcttgcgggtttaagcagcgagctggcatccactgtaggtgtacctaactccttaggccctggcgaactgttacaacactatggtacgcctgagcagcaaaaccattacctgccacgtttagccaaaggtttagaagtcccttgtttcgcattaactagccctgaggctggtagcgacgcgggttctatccctgactttggtatcgtgtgtaaaggtcaatgggaaggcgaagaagtcttaggtatgcgcttaacctggaacaagcgttatatcaccctagcgccagttgcgactgtattaggtctggcgtttaaactgcgtgaccctgaacacctattaggcgacaaagaagaactgggcattacctgcgcgctgatcccaactgatgttgaaggcgttgaaacaggccgtcgtcacttcccgctgaactgtatgttccaaaacggtccaactcgcggtaaagacgtattcgtaccattaagctttatcattggtggtccgaaaatggctggccaaggctggcgtatgctggttgagtgtttgtctgttggccgtggtatcacactgccatcaaactctgccggtggcgtaaaaaccgcagcgcttgcaacgggtgcctatgcgcgtattcgtcgtcaattcaaactgccgattggtaagttagaagggattgaagagccaatggcacgcatcggtggtaacgcctacctgatggatgcagtgacctcattaaccaccactggtatcgacttaggtgaaaaaccttcggttatctcggctatcgtgaaatatcacctgaccgatcgtatgcagaaatgcgttatcgacgccatggatatccacggtggtaagggtgtgtgtttaggcccgaacaactacttaggtcgtggctatcaagcggctccgattgcgattaccgttgaaggtgcaaacatcctgacacgttcgatgatcatctatggtcaaggtgcaatccgttgtcatccttatgtattggctgaaatggagtcagcgtttgacactgagtctggccaaggcttagccaacttcgatgcagccatcttcggtcacattggttttgcgaccagtaactttgtccgtagcttctggttaggtctgacatcaagccgtttctctaacgcgccttactcagataaaaccaagcgttattatcaacatatgaaccgtttcagtgccaacctagccctgctgtcagacttagccatggcaaccttaggcggtaacttaaaacgtaaagaacgtatttctgcccgtttaggcgatctgttaagccagttataccttgcttctgcaactttaaaacgttaccaagatgaaggccgtcaaaccgacgatctaccactggtgcaatgggcggttgaagatgctctgtacaagttacaggcttcattagacgatttactggataacttccctatgggtctaggcggcgtactacgtgccatcatgttcccattcggccgtccactgaaacgtccaagcgatgtgttggaccataaagtggctaagatcatgcaaaccccttgtgaaagccgtgatcgtttaggtaaaggccaattctggactaactctgagcacaatgctgtgggtatccaagagcaaacgctgaaggatattctggctgccgaacctttattcgataaagtctgtaaggccagtggcaagcgtttacctttcatgtggttagataaagtcgccgctgaaggtaaagccttaggggtattaagcgacagcgaagtacaactgttggaacgtgccgaaatcggccgtatgaagtctatcaatgtggatgactttgacccagcagagctgcgccctgaagtggtatctaccacttcacaggaacgcgcagcctaa

SEQ ID NO: 35673 - protein, 815 aa, Shewanella sp. MR-4
MTTLLWIIAMILVLGALAYLRVSLLTATIAAAVVMTAGWTLDVVGPISWIIFLVIALPLNISAFRQNVISRPLMKMYRGIMPEMSSTEKEAIEAGTTWWEADLFAGNPNWKKLHNYPVARLSADEQAFLDGPVEEVCRMVNQHQVSHQLADLPAEVWQYLKDHGFFAMIIKKKYGGLEYSAYAQSRVLQKLAGLSSELASTVGVPNSLGPGELLQHYGTPEQQNHYLPRLAKGLEVPCFALTSPEAGSDAGSIPDFGIVCKGQWEGEEVLGMRLTWNKRYITLAPVATVLGLAFKLRDPEHLLGDKEELGITCALIPTDVEGVETGRRHFPLNCMFQNGPTRGKDVFVPLSFIIGGPKMAGQGWRMLVECLSVGRGITLPSNSAGGVKTAALATGAYARIRRQFKLPIGKLEGIEEPMARIGGNAYLMDAVTSLTTTGIDLGEKPSVISAIVKYHLTDRMQKCVIDAMDIHGGKGVCLGPNNYLGRGYQAAPIAITVEGANILTRSMIIYGQGAIRCHPYVLAEMESAFDTESGQGLANFDAAIFGHIGFATSNFVRSFWLGLTSSRFSNAPYSDKTKRYYQHMNRFSANLALLSDLAMATLGGNLKRKERISARLGDLLSQLYLASATLKRYQDEGRQTDDLPLVQWAVEDALYKLQASLDDLLDNFPMGLGGVLRAIMFPFGRPLKRPSDVLDHKVAKIMQTPCESRDRLGKGQFWTNSEHNAVGIQEQTLKDILAAEPLFDKVCKASGKRLPFMWLDKVAAEGKALGVLSDSEVQLLERAEIGRMKSINVDDFDPAELRPEVVSTTSQERAA

SEQ ID NO: 35674 - DNA, 2475 bp, Alkalilimnicola ehrlichei MLHE-1
  CDS (1)..(2475): transl_table=11
atgaccctcatctttgcgatcgcggtggccctggcgggctttctggccctggcttatgccggcgcacggctgccggtatggacagcggccgtggccctctacctgctgggcctctgggttgtcggcgcggcgtccggcgcggcggtggctctcgccgcgctggtgttggcaccggtggcgttactgttcaacctgccggcgttgcgccggcgggtgatcacccggcccctgttccaggccttcaagcgggtgttgccgcccatgaccaccaccgagcgcgaggccctggaggccggggacacctggtgggaaggcgagctcttccagggccggccggactggcagcgcctgcgcgagaccccggtgacccggctcagcgatgaggagcaggcctttctggataaccaggtggcgacactctgccggatgctggataacgaccggatcgagcgcgaggcgcacgatctgcccgccgaggtgtgggacttcatccgccgtgagcgcttcttcagcctgatcatccccaggcagtacggcggccgggcgttttccagttacgcccagagctgcgtggtcacccgcattgccacccgcaatatctccgccgcggtgacggtaatggtgcccaactccctggggccgggtgagctgttgatgcaatacggcacccaggcgcagaaggactactggctgccgcgcctggccgacggccgcgagatcccctgtttcgccctcaccggcccggatgtgggctccgatgcggcggccatgcccgactacggggtggtctgtcggggcgagcatgagggccgggaggtgctgggcatccgcctgagcttcagcaagcgctatatcaccctggcgccggtggccacggtgctgggtctggccttcaagctgcacgacccggacgggctgctgggcggtgagcgggactgcggtatcacctgtgccctggtgcccaccgaccacccgggggtgcaggtgggggagcgccacttccccatggggatggccttcatgaacggcccggtgcagggcgaggatgtcttcatcccgctcgactggatcatcggcgggccggagatggccggccgcggctggcgcatgctgatggagtgcctgtcggtgggccgagccatctccctgcccgcattgggcaccgccgccggtcacatgagcgcgcgcatgaccggcgcctacgcccgcatccgccggcagttcaagctgcccatcggcaagttcgaaggggtgcaggccgccatggcgcggattggcggctatgcctaccggctggaagcggcccggcggctcacggccagcgcgggcgatctgggggtgaagccctccgtggtctcggccatcgccaagtaccacatgaccgagatgatgcgcacctccctgaacgacgccatggacgtgcacggggggcgcggcatcatcttcgggccgcgcaactacctgggctacggctaccaggccatcccagtgggcattacggtggagggggccaacatcctcacccggaacctgatgatcttcggtcagggggccatccgctgccacccctacgtctttccggagatggaggcggcgcgcaaggacgacctggccggtttcgaccggttgctgttcagccatatcgggtattcgctgaaccgcggtgtgcgcgccttcgtcctggggctgaccggtgcccgcctcggcgacagtccggtcaagggggccaccgccccctactatcgggagctctcgcgcatgagtgcggcccttgcctttgtctccgatgtggccatgggggtgctggggggcgacctgaagcgccgggaacggctctcagcccgcctgggggatgtgctcagccacctttacctggcctcggcggtgctcaagttccacgaggacgccgggagcccggaggccgagcgccccttcctgcgctgggccctcgacgactcgctcaacgccatctacgaggccttcgacggcttccttcgtaactttccgaaccggttgctggccggcgtcctgcgccgggtgatcttccccctcgggcggccttaccacccggccgccgaccgcgacggccagcgggtggccgaggccctgatggagcccggtggcgtccgtgagcgagtgaccgcgatcggctactgggcggaggatgaccgggacgaccccatgggccggatggaggtggcgctgcggaccctggtggcggtggagcccctctataaccgcttccagaagtgggtggccaagggggaggcgcagggcttcagtttcgccgagcgcatcgccgacgcccgtggcaaggggctcatcaccgcggccgaggccgagcaactgcaggcctgggagcacctgcgctacgactgcatcatcaccgatgccttcccgccggaggcgatcagccccgccgccccggcggggcgatccggtgccgcccactggcggcgccaggccaccgggtaa

SEQ ID NO: 35675 - protein, 824 aa, Alkalilimnicola ehrlichei MLHE-1
MTLIFAIAVALAGFLALAYAGARLPVWTAAVALYLLGLWVVGAASGAAVALAALVLAPVALLFNLPALRRRVITRPLFQAFKRVLPPMTTTEREALEAGDTWWEGELFQGRPDWQRLRETPVTRLSDEEQAFLDNQVATLCRMLDNDRIEREAHDLPAEVWDFIRRERFFSLIIPRQYGGRAFSSYAQSCVVTRIATRNISAAVTVMVPNSLGPGELLMQYGTQAQKDYWLPRLADGREIPCFALTGPDVGSDAAAMPDYGVVCRGEHEGREVLGIRLSFSKRYITLAPVATVLGLAFKLHDPDGLLGGERDCGITCALVPTDHPGVQVGERHFPMGMAFMNGPVQGEDVFIPLDWIIGGPEMAGRGWRMLMECLSVGRAISLPALGTAAGHMSARMTGAYARIRRQFKLPIGKFEGVQAAMARIGGYAYRLEAARRLTASAGDLGVKPSVVSAIAKYHMTEMMRTSLNDAMDVHGGRGIIFGPRNYLGYGYQAIPVGITVEGANILTRNLMIFGQGAIRCHPYVFPEMEAARKDDLAGFDRLLFSHIGYSLNRGVRAFVLGLTGARLGDSPVKGATAPYYRELSRMSAALAFVSDVAMGVLGGDLKRRERLSARLGDVLSHLYLASAVLKFHEDAGSPEAERPFLRWALDDSLNAIYEAFDGFLRNFPNRLLAGVLRRVIFPLGRPYHPAADRDGQRVAEALMEPGGVRERVTAIGYWAEDDRDDPMGRMEVALRTLVAVEPLYNRFQKWVAKGEAQGFSFAERIADARGKGLITAAEAEQLQAWEHLRYDCIITDAFPPEAISPAAPAGRSGAAHWRRQATG

SEQ ID NO: 35676 - DNA, 2325 bp, Alkalilimnicola ehrlichei MLHE-1
  CDS (1)..(2325): transl_table=11
atgctgagctacctcatcgcggttgcggtgctactggtgctggcgctgctgtggctggcgccgctgcgccgttcgctgctcagcgccccggtcatgggcctgctccggcagcggctgccgtcaatctccgccactgagcgggaggcgctggaggcgggcgatacctggtgggatgcgcagctcttcaccggccggccggactgggcggtgctgcgctcgctgcccccggcgcggctgagcgaggcggagcaggcctttctcgacgggccggtggaggcgctctgccgcatgctcgacgcctgggaggtgaacgagcagcgggacctcccggagccggtctggcgctttatccgcgatcagggcttgctcgggatgatcatcccccgggcctatggcggcctggggttctccgccgccgcccactcccaggtggtgatgaaggtgggcgcgcgtgagggcaccgccggggtcacggtctcggtgcccaactcgctgggcccggcggagctgttgctgcgctacgggacggaggcacagcgcaaccactatctgccgcgcctggcccggggggaggagatcccctgttttgccctcaccgggcccaccgccggctccgatgcggcctccatccccgatcgtggggtggtctgttacggcgactaccgcggagagcgggtgctgggcatgcgcgtgagttgggacaagcgctacatcaccctggcccccgtggccacggtgctgggcctggccttccggctggaggatccggacgagctgttgggccggggtccggtgcccgggatcaccgtggcactgatccccaccgatcaccccggcgtggagatcggccgacgccatttcccggccggggtggccttccagaacggccccacccgcgggcgcgatgtcttcatccccctggatttcatcatcggcgggccgccgcgcgccggccagggttggcgcatgttgatgggctgtctcgccgcggggcgctcgatctcgctgccggccgccggcgtgggcaacgccaagctggcggcgcgcaccgctggcgcctacgcccgggtgcgccgccagttcaataccccggtgggccgcttcgagggggtgcaggaggcgctgacgcgcattgccggccaggcctatcgcctggacgccggccgctgggtcaccaccgccgccctggatgccggcatcgagccggcggtgatctcggccattctcaaataccaggccaccgccggcggccgcgaggccatcaccgacgccatggatgtgcatggcggcaaggccatctgcaccggcccgtccaacaccctcttcggggcctaccaggccctgccggtggggatcaccgtggagggggccaacatcctgacccgcagcatgatcgtcttcgggcagggggccctgcgctgccacccgtggctgctgcgggaggtgcagaccgcccaggcgggggacctgacgggcttcgaccgcgccttctggggccacgtgcgccacctgctcgccaacctgggtcgggtggccctccacaacgccaccggcggtcgcctggccagtgcccccggcgccggtgcgttggatcgctggtaccgccagctcgcacgcgagtcggccaattttgccctggttgcggatgccgcgctgctgatcctcggcggcgagctgaagcggcgcgagcgcctctccggccggctggcggacgtcctcagtgagctctacctgatgagctgtgcgttgaaacagcacgaggacgacggctgtccgatcgccgaccggcccctgctggactgggtctgccaggaggggctctaccgcatccaggagcggttggaccgggttctggccaacctgccggtgcgcccggcggcgttcctgctgcggcggttgctcttcccctggggccggcgccggcgccccgcggacgaccgcctgggtcgccgcgtggccgagaccctgttggaaccgggcgaggtgcgggaccggctcacggcagggctgtacctgagtcgggatcgcgacgacgccaccggcgccctggagtgggccctgcgcgaggtggtggccaccgaggacctggagcaacgcctgcgccaggcggtgcgcgacggccgtctgcccgatctcgacggtgccgcgctccaccaggcggcgctggacgcgggggggatcagcgaaccggaccaccgccggctgcgagcggcccaccaagcggtgatgcgggtgatccaggtggacgaattcgaggccgcggacctgtcccggcccggaaaagtgccgcgaccggcacagcggtgtcaatcagaggctgcctga

SEQ ID NO: 35677 - protein, 774 aa, Alkalilimnicola ehrlichei MLHE-1
MLSYLIAVAVLLVLALLWLAPLRRSLLSAPVMGLLRQRLPSISATEREALEAGDTWWDAQLFTGRPDWAVLRSLPPARLSEAEQAFLDGPVEALCRMLDAWEVNEQRDLPEPVWRFIRDQGLLGMIIPRAYGGLGFSAAAHSQVVMKVGAREGTAGVTVSVPNSLGPAELLLRYGTEAQRNHYLPRLARGEEIPCFALTGPTAGSDAASIPDRGVVCYGDYRGERVLGMRVSWDKRYITLAPVATVLGLAFRLEDPDELLGRGPVPGITVALIPTDHPGVEIGRRHFPAGVAFQNGPTRGRDVFIPLDFIIGGPPRAGQGWRMLMGCLAAGRSISLPAAGVGNAKLAARTAGAYARVRRQFNTPVGRFEGVQEALTRIAGQAYRLDAGRWVTTAALDAGIEPAVISAILKYQATAGGREAITDAMDVHGGKAICTGPSNTLFGAYQALPVGITVEGANILTRSMIVFGQGALRCHPWLLREVQTAQAGDLTGFDRAFWGHVRHLLANLGRVALHNATGGRLASAPGAGALDRWYRQLARESANFALVADAALLILGGELKRRERLSGRLADVLSELYLMSCALKQHEDDGCPIADRPLLDWVCQEGLYRIQERLDRVLANLPVRPAAFLLRRLLFPWGRRRRPADDRLGRRVAETLLEPGEVRDRLTAGLYLSRDRDDATGALEWALREVVATEDLEQRLRQAVRDGRLPDLDGAALHQAALDAGGISEPDHRRLRAAHQAVMRVIQVDEFEAADLSRPGKVPRPAQRCQSEAA

SEQ ID NO: 35678 - DNA, 2337 bp, Magnetococcus sp. MC-1
  CDS (1)..(2337): transl_table=11
atgtggctatggcttgtggtaataccgctgctcacgctatttctggtgatcagcctaccgatgttaagacgtcgtttgctgtcgggacccatcatggcgttgatgcaaggtgccatgccgcccctttcccagaccgagcgcgaggcgctggagagcggcaccgtttggtgggagcgggagctcttttctgggcggcccgattggtccaagttgcaaaatctgcccgcagacaccttgagtaaggaggagcaagcctttctggagggtccagtccagcggctctgcgcccgtttggatgagtggcgtattaagcaagaggagcacgacctgcccgccgacctctgggagatgcttaaacaagagggcttttttggcatgattatcccccgagaatatgggggattgggcttctcggcgcggggtcattcggcggtgatcaccaagattgccagccgcagtgttaccgcagcggtaacggtgatggtgcccaactcattgggaccggcggaactgctgatgcgctatggtacccctgaacagcagcgttactatctaccccgtttggccaatgggcgcgagatcccctgttttgcccttaccagcccacgggccggtagcgatgcgggggcgattccagataccggtgtggtatgtcggggtaacttccggggtgagacggtggtgggtatccgcctcaattgggataaacgctacatcaccctagcaccggtggccaccctattggggctggcttttcggctctatgatccagataacataatgggcaatatacgggatctggggataactctggcattaattcccacccaaaccgccggtgtctccattggcacccggcatgaccccctgggggttcctttcctcaccggtccgacccgtggtcaccaagtttttatccccatgagctatttaattggcggcgagcagggcattggccagggttggcgaatgttgatggcgtgcctctctgaagggcggggtatctcattgcctgcgctcagtgtgggtgcggccaagctggcggcgcgtagcagtggcaactatagccgggtgcgcaaacagtttgggctcgccataggccggtttgaaggggtacaagaggcgctgggccggattggtctgaacgcctatcgtatggagtctgcccgcactctgaccgtaaccatactagaccaaggtgagcgccccagtgtggcggcgggtattgttaagtatcacctaaccgaagggatgcgccagaccatcaatgatgccatggatatatgggggggtaccgccatctgtcggggtccccataatttactggcgcacgcctatcaggctattcccatcggcatcaccgtggagggggccaatatcctgacccgtaccatgatgatctttggacaaggggccattcgtgcccacccctacctgttgcaagagatggaagcggtcacggggcaacagccggtggcagagcgagtcattgcctttgaccggctattatgggcgcatgtgggttacaccatgatgaatggtctgcgggctctggtttatgggctgttggggaacgctggtgccgcagccccacaaggggtgtgcgctaccgaacgcaagtgttaccaacgcattagccattggagtgccgcctttgcttttatgtcggacctcgccctggcgcggttgggggggtctctcaaacggcgtgaatcactgtcggcgctgttgggggatgctttgagccatctttacatggccagtgcgattctgcatcgctacagcaaggatggttccccgccccaggatcgccccatcatggaggccgccctagaggatagcctattgcaggtgcgtcaagcgctggtggaggtggtgcgtaacttccccgatcctgtggtggcgctgctcatgcgtctggtggtgttccccaccggtttagcccaacgccgtttgccccaacaccatttacaccgggtggcaatcctgatgcagcagagcggtccggcgcgtgagcggctgacggcggggatctatctgggtggcggggatgaaggggattccatggctgagttagaggcggcctttatcgccaccgaacgcagtgacgaagctgagaaacgcttgatccagtggatgaagtcccgacgttgggatcccatcctcagcaacggcatgcatgtaccggaagggtatctgcaaagcgccgtgcaggagggggtgatctcggaactggaggccaaacagttggatgataccctagagcgccgtatgcgggtggtgcgggtggatgagtttccagcggtctgttggttgggagaggaggtggcagcatga

SEQ ID NO: 35679 - protein, 778 aa, Magnetococcus sp. MC-1
MWLWLVVIPLLTLFLVISLPMLRRRLLSGPIMALMQGAMPPLSQTEREALESGTVWWERELFSGRPDWSKLQNLPADTLSKEEQAFLEGPVQRLCARLDEWRIKQEEHDLPADLWEMLKQEGFFGMIIPREYGGLGFSARGHSAVITKIASRSVTAAVTVMVPNSLGPAELLMRYGTPEQQRYYLPRLANGREIPCFALTSPRAGSDAGAIPDTGVVCRGNFRGETVVGIRLNWDKRYITLAPVATLLGLAFRLYDPDNIMGNIRDLGITLALIPTQTAGVSIGTRHDPLGVPFLTGPTRGHQVFIPMSYLIGGEQGIGQGWRMLMACLSEGRGISLPALSVGAAKLAARSSGNYSRVRKQFGLAIGRFEGVQEALGRIGLNAYRMESARTLTVTILDQGERPSVAAGIVKYHLTEGMRQTINDAMDIWGGTAICRGPHNLLAHAYQAIPIGITVEGANILTRTMMIFGQGAIRAHPYLLQEMEAVTGQQPVAERVIAFDRLLWAHVGYTMMNGLRALVYGLLGNAGAAAPQGVCATERKCYQRISHWSAAFAFMSDLALARLGGSLKRRESLSALLGDALSHLYMASAILHRYSKDGSPPQDRPIMEAALEDSLLQVRQALVEVVRNFPDPVVALLMRLVVFPTGLAQRRLPQHHLHRVAILMQQSGPARERLTAGIYLGGGDEGDSMAELEAAFIATERSDEAEKRLIQWMKSRRWDPILSNGMHVPEGYLQSAVQEGVISELEAKQLDDTLERRMRVVRVDEFPAVCWLGEEVAA

SEQ ID NO: 35680 - DNA, 2472 bp, Azoarcus sp. BH72
  CDS (1)..(2472): transl_table=11
atggtgtggtggatcctgcttggccttcccccgttgctggtcgcgctcgcctatcggcgcgtgccgcccgtcgcatccgcgctggccgtgctcgcctggctggccgcgctggcatgggcgggcggctggccgccgatgctggccgtgggtgcattgctcgccttgggcgtggcactggcgttgctgctggtggcgcccctgcggcggcgcgtggtcaccgcgccggtgttcgccgccttccgccgcgcgctgccggcgatgtcgcagaccgaacgcgacgcgctagaagccggcaccgtgtggtgggagggcgagctgttccgcggcgatccggactggcgccgcttcgccggctttccgtggccgcgcctcagcgccgccgagcaggccttcctcgatgacgacaccgaggcgctgtgccggctggtcaaggactgggacaccacccggctgcaggacatgccggcgccggtgtggcaattcatcaaggaacgcggctttctcggcctgatcatcccggcggaatacggcggcaagggtttttccgcctacgcccactcgcaggtcatcaccaagctgtccacccgctcgtccgccccggcggtgacggtgatggtgccgaactcgctcggcccggccgagttgctgctgcactacggcacgccggcgcagaagcagcactacctgccgcggctggcgcaggggctggagatccccgcctttgcgctgaccagcccgtgggcgggttccgatgcggcgtcgattcccgatgccggggtggtgtgcaccggccagtggcaggggcgcgaggtgcttggcatgcgggtgtccttcgacaagcgctacatcacgctggcgccggtatgcacggtgttcggccttgcgttccgcctgtacgaccccgaccacctgctcggcgacacggtcgatctcggcatcacctgcgcgctggtgccgcgcgagcatcccggggtggagatcggccgccgccatgtcccgctcaacgcggtgtggatgaacgggccgatccgcggcaaggacgtgttcatgccgctcgatttcatcatcggcgggccacagatggccgggcagggctggcggatgctgatggagtgcctggcggccgggcgcagcatctcgctgcccggctccaatgccggcatgcagcagctcaccgcgcgcgcggtgggcgcctacgcccgcgtgcgccaccagttcaagaccgcgatcggccgcttcgagggggtggaggaagcgctgacccggatcggcgccaacacctatctcagcgacgcggcgcgggtgatgaccgccggcgcgatcgacctcggcgagaagcccgcggtggtgtccgccatcgtcaagtaccacgtcaccgaacgcgcccgccagacggtgaacgacggcatggacgtgatcggcggcaagggcatctgcctcggcccgcagaacttcctcggccgcgcctaccagcaggtgccggtggggatcacggtggaaggggccaacatcctcacccgcagcctgatcctgttcggccagggcgcgatccgctgccacccgcacgtgctggacgagatgcacgccgcgggccggggtgatctcaccgcgttcgaccgcgcgttctggggccacatcggctacacgctgggcaatgccgcgcgcgcgctggtgaccggactgaccggctcgcacgtggtcgcggtgccgatcgacgtggcgccggaaacccgccgctactaccagcagctcacccgcttctcggcggccttcgcattcatcgccgacatctccatgggcaccatgggcggtgcgctgaagcgcaaggaaaagctctccgcgcggctcggcgacatcctctcgctgctctacctggccaccgcggtgctcaagcgttacgaggccgagggccgccaggccgaggacgcgccgctgatgcactgggcgatctgggactgcatgttccgcgcccagaacgccttcgaaggcgtgatcgccaatttccccaatcccgtgctcgcgacgctgctgcggcggctggtgtttccgctcggccggccttacgtggtgccgtcggacgcgctgggtcatgccgttgcggaccgcctgatcgcgccctcggccacgcgcgaccgcctgaccgccgcggtgcatctgccggccgacctcgacgagccgctgggggcgctggaggcggcgctggcggccacgatcgcggccgagccggtcgaagcaaaggtgaaggccgcgcagcgcgaggggcgctttgcccccggcgcgctggtggcgggcggcgtggatgcgctgtgggcccgcgcccacgccgacggcatcatcgacaacgccgaattcgcgctgctgcagcgccgcgccgaactgcgcgacaaggtgatccgggtggacgacttccccttcgacctcgccgccgaaaccggcagcgaagcggcgccgaagatgcgggtggtggcatga

SEQ ID NO: 35681 - protein, 823 aa, Azoarcus sp. BH72
MVWWILLGLPPLLVALAYRRVPPVASALAVLAWLAALAWAGGWPPMLAVGALLALGVALALLLVAPLRRRVVTAPVFAAFRRALPAMSQTERDALEAGTVWWEGELFRGDPDWRRFAGFPWPRLSAAEQAFLDDDTEALCRLVKDWDTTRLQDMPAPVWQFIKERGFLGLIIPAEYGGKGFSAYAHSQVITKLSTRSSAPAVTVMVPNSLGPAELLLHYGTPAQKQHYLPRLAQGLEIPAFALTSPWAGSDAASIPDAGVVCTGQWQGREVLGMRVSFDKRYITLAPVCTVFGLAFRLYDPDHLLGDTVDLGITCALVPREHPGVEIGRRHVPLNAVWMNGPIRGKDVFMPLDFIIGGPQMAGQGWRMLMECLAAGRSISLPGSNAGMQQLTARAVGAYARVRHQFKTAIGRFEGVEEALTRIGANTYLSDAARVMTAGAIDLGEKPAVVSAIVKYHVTERARQTVNDGMDVIGGKGICLGPQNFLGRAYQQVPVGITVEGANILTRSLILFGQGAIRCHPHVLDEMHAAGRGDLTAFDRAFWGHIGYTLGNAARALVTGLTGSHVVAVPIDVAPETRRYYQQLTRFSAAFAFIADISMGTMGGALKRKEKLSARLGDILSLLYLATAVLKRYEAEGRQAEDAPLMHWAIWDCMFRAQNAFEGVIANFPNPVLATLLRRLVFPLGRPYVVPSDALGHAVADRLIAPSATRDRLTAAVHLPADLDEPLGALEAALAATIAAEPVEAKVKAAQREGRFAPGALVAGGVDALWARAHADGIIDNAEFALLQRRAELRDKVIRVDDFPFDLAAETGSEAAPKMRVVA

SEQ ID NO: 35682 - DNA, 2241 bp, Oceanicola batsensis HTCC2597
  CDS (1)..(2241): transl_table=11
gtgtcatttcgaaagtcccacatcaccaggccgatcttcgattgggccaagggtgccctgccgaccctctcggagaccgaagccgaggcgatcagcgcgggagacgtccacttcgaggccgagctgttttccggcaagccggactggagcaagttgcgcgccatgaaggcgcccgccctgacggaagaggagcgggccttcatcgacggcccctgccgcgagttctgcgatatggtggacacctgggtgatcgaccacaggaccggcgatctttcgtccgaggcatgggaccacatgcgcgacaagggctttttcggcatgatcatcccgaaggagcacggcgggctgggcttctccgcctacgcccattccgaggtcgtccgctatatcgccagccactcggtcgtggcggcggtgaccgtcatggtgcccaattcgctcggcccgggcgaactcatcctgcaattcggcaccgacgagcagaagagccaatggctgccccggctggcccgcggcgacgagcttccggccttcggtctgaccagcgaggacgccggatcggacgcctcggccatgacggacgagggcgtcatctgcaagggcgactggaacggacgggaggttctgggaatccggctgaactgggccaagcgctacatcacgctggcgccggtctgcaccgttctggggctggccttcaagctgcgcgatcccgacggcctgatcggcgagaccgaggatatcggcatcacctgcgccctcgtcccgaccgatctgccgggcgtcgagaccggccgccgccacctgccctcgggcaccatgttccagaacggacccaccaccggcaaggacgtcttcattccgctggaccacatcatcggcggccccgactacgccggacggggctggatgatgctgatgagcgcactggcggcggggcgcggcatctccctgccctccctgtccgccgcagccacggccatggccgcgcataccaccggcgcctattcgcgcatccgcaagcagttcaacctgccgatcggcctcttcggcggcgtgcaggaaccgatggcccggatcgccgcaagcgcctacacgatcgatgcggggcgccgcctgaccaccgccgccctcgacgaggggcacaagctggccgtcatctcggccatcatgaaataccacgccaccgaccggatgcgcgacgcgatcaacgacgcgatggacgtgcattccggcaaggcggtgatcgacgggccgctgaactacctgcaaccgatctaccggacgatccccatcgggatcaccgtcgagggtgccaacatcgtcacccgcaacctcatcatcttcggccagggcgcgatccgtgcgcatccccacatcctggacgagatgcaggcgctgcaggaacccgaccgcgaaaagtccctcgatgccttcgacacgcatttctgggcccatgtgaagcattcggtccgcaccgtcttccgcgccggatgggctgcctggaccggccgcgccgacgcgcccgcggatgccggcgccgtggcgccgatctatcgccggctgtcgcgctggtccgcggccttcgcggtcaccgccgacatggccttcctcaccctgggcggcgcgctcaagcggaaagagatgatctcggcccggctgggcgacgcgctgtccgagatgtacctcatcgccgccacgctgaaacgatgggaggacgagggccgcaacgaagaggacctgccgctggtccggcacgccgcggagaccgggttcgcccggatcgggcaggtgctggacgagaccatagccaacatgcccgccaggtgggtgaactggctgctgcgtccggtgctccgccccggcgcgcatccccgcggcccctcggacaagaccaccgaagaggccgcccggatcatctacgagcccaacccggcccgtgaccgtcttgtcaccggcttccatccgccgcatcccgacagcggactgggcctgctcgagaccgcctaccggctggtgctcgaggccgaaccgatcgccaagcgcctgcgcgaggcccgcaagacgccacgcgcggcgctcgaggccgggcttctttcggatgccgaattcgaccagctccggcgcgtcgacgaggccgtgcagaaggtcgtggcggtcgacgactattcccccgacgagctgcaacagctctttcccgacatgcgccggtttaccggctggcaggaggccgcagaatga

SEQ ID NO: 35683 - protein, 746 aa, Oceanicola batsensis HTCC2597
MSFRKSHITRPIFDWAKGALPTLSETEAEAISAGDVHFEAELFSGKPDWSKLRAMKAPALTEEERAFIDGPCREFCDMVDTWVIDHRTGDLSSEAWDHMRDKGFFGMIIPKEHGGLGFSAYAHSEVVRYIASHSVVAAVTVMVPNSLGPGELILQFGTDEQKSQWLPRLARGDELPAFGLTSEDAGSDASAMTDEGVICKGDWNGREVLGIRLNWAKRYITLAPVCTVLGLAFKLRDPDGLIGETEDIGITCALVPTDLPGVETGRRHLPSGTMFQNGPTTGKDVFIPLDHIIGGPDYAGRGWMMLMSALAAGRGISLPSLSAAATAMAAHTTGAYSRIRKQFNLPIGLFGGVQEPMARIAASAYTIDAGRRLTTAALDEGHKLAVISAIMKYHATDRMRDAINDAMDVHSGKAVIDGPLNYLQPIYRTIPIGITVEGANIVTRNLIIFGQGAIRAHPHILDEMQALQEPDREKSLDAFDTHFWAHVKHSVRTVFRAGWAAWTGRADAPADAGAVAPIYRRLSRWSAAFAVTADMAFLTLGGALKRKEMISARLGDALSEMYLIAATLKRWEDEGRNEEDLPLVRHAAETGFARIGQVLDETIANMPARWVNWLLRPVLRPGAHPRGPSDKTTEEAARIIYEPNPARDRLVTGFHPPHPDSGLGLLETAYRLVLEAEPIAKRLREARKTPRAALEAGLLSDAEFDQLRRVDEAVQKVVAVDDYSPDELQQLFPDMRRFTGWQEAAE

SEQ ID NO: 35684 - DNA, 2241 bp, Pseudoalteromonas tunicata D2
  CDS (1)..(2241): transl_table=11
atgagcttacgaacaacattaaaaaaagtattacctagtatttctattaccgaacaagaggcgcttgacgcaggcgatgtatggttagagggctcgatttatcgaggcaaaccagatttttctgcattacgtgctgtgccaaacggtcaattaacggctgaagaacaagcctttcttgacggcccagtaatggagttacttgaacttattgatgatacagagattcaaaatggtaagcatttaccagattacatcttagattttcttaaaaaagagcgtttcttctctttaatcattcctaaagcatacggtggtcgcgagtttagtccatatgctaattcaactatcgtagcaacaattgctacaaaaagttcaggtgttgcagtaactgtaatggtgcctaactcattaggaccaggtgaattattgatgcattatggtacagaagagcaacgttctttttggttaccacgcttgtcaaatggtacagatattccttgttttgcactaacaagccctgaagctggctctgatgctggcggaattccagatcaaggcattgtgactaaaggtttatatcaaggcaaagaagtacttggtttaagtattacttgggacaaacgttatattacattagcaccaatagcgacagtgttaggtcttgcatttaaagtacgtgatcctgaagggttattgggtgcgaaagaagatttaggtattacttgtgcacttattccacgtgaacatccaggcgtagaacttggtaatcgccatgaccctatggggatccgtttttataatggtacaacccgtggtgaaaaagtgtttattccaatggatttcattatcggtggacaaaaaaatattggtcgtggctggcagatgcttgttagctgcttaggtgcaggccgtggtatttctttacctgctctaggttgttctacaagtcaagttgctttgaaatctgcgagtgagtatgccgcagttcgtgagcagtttggtttatcaattggtcagtttgaaggtattcaagaaaagcttgccgatattgcaggtaaaacatttttgcaagaagcgatgcgcgtattaacaactgagggcctaggattaggtttaaaaccatcagttgtaactgctattgctaagtatcatatgactgaaattggccgtgatacgttaaattcagcaatggatattcaagcaggtaaagcaattcagtgcggcccacaaaatacgttagcaaaaggttatgttgctcaaccaattgctattacggttgagggggccaatatcttaacgcgtaatttaatgatttttggtcaaggtgtaatgcgttgtcatccatacctgcagtctatggttgaagcaattcatagcgatgacaaaaatgcggataaagaatttaacaaaatattcagaaaaacggttggttacagtgtagcaaacagtttacgctcattccgtttaggtttattacctttcactgcaagtgcttcttcagaacttgcagaagtaaaacaatatgagaaatcagtacaaaagttagcatctaaactagccgtttatgccgatttttcgttattagtgctaggtggtaaactaaaacaagctgagttgttatctgctcgtttaggtgatgtgatgagctatttatatgcagcaatggcatgtatccgtttctatgagcaaaaagtgactgtagatgagcgtaatcaagcggctccatactttcattatgcaacacgttgggcattaatgaatgctgaaaatgcgttattagcgttcttggataacttcccatcgggtgcaacacggaaattcatgcgcttaatcactgtaacctacagcgctaaaatgccgaaaatttctgataacttaattcgcgaattagcagagcaggcgcaattaaatacatcgttcaagaaaaagctaacacatttagttcgctcagtaccaggtgatggtcactatattaatgagcaagcatatctcgccaaactagcatgtttagatttactgaaaaaagtgaagcaagctcttagaagtaaacaaattaaagcaggtgtaagatttgctgaaactctagagaatgcgcttaatgctaaagttgtcactgctgatgagtacaagcaattaattgattacaacctaaaacgcgaaagagcaattcgtgtcgatgagtacgattatgatttagagttagtagcagctcaaagtgagttaaaagtagctaactcttaa

SEQ ID NO: 35685 - protein, 746 aa, Pseudoalteromonas tunicata D2
MSLRTTLKKVLPSISITEQEALDAGDVWLEGSIYRGKPDFSALRAVPNGQLTAEEQAFLDGPVMELLELIDDTEIQNGKHLPDYILDFLKKERFFSLIIPKAYGGREFSPYANSTIVATIATKSSGVAVTVMVPNSLGPGELLMHYGTEEQRSFWLPRLSNGTDIPCFALTSPEAGSDAGGIPDQGIVTKGLYQGKEVLGLSITWDKRYITLAPIATVLGLAFKVRDPEGLLGAKEDLGITCALIPREHPGVELGNRHDPMGIRFYNGTTRGEKVFIPMDFIIGGQKNIGRGWQMLVSCLGAGRGISLPALGCSTSQVALKSASEYAAVREQFGLSIGQFEGIQEKLADIAGKTFLQEAMRVLTTEGLGLGLKPSVVTAIAKYHMTEIGRDTLNSAMDIQAGKAIQCGPQNTLAKGYVAQPIAITVEGANILTRNLMIFGQGVMRCHPYLQSMVEAIHSDDKNADKEFNKIFRKTVGYSVANSLRSFRLGLLPFTASASSELAEVKQYEKSVQKLASKLAVYADFSLLVLGGKLKQAELLSARLGDVMSYLYAAMACIRFYEQKVTVDERNQAAPYFHYATRWALMNAENALLAFLDNFPSGATRKFMRLITVTYSAKMPKISDNLIRELAEQAQLNTSFKKKLTHLVRSVPGDGHYINEQAYLAKLACLDLLKKVKQALRSKQIKAGVRFAETLENALNAKVVTADEYKQLIDYNLKRERAIRVDEYDYDLELVAAQSELKVANS

SEQ ID NO: 35686 - DNA, 2310 bp, Pseudoalteromonas tunicata D2
  CDS (1)..(2310): transl_table=11
atgtctattttaattctgctgatagttgcagtggtaattatctttatggtgactgatattcgtttgagtttgatcagtcgaccagcatttgcgtttttcaaaagagtactgccgccattatcacaaactgaacgtgaagcgatggaagcgggcgatatctggtgggatggagaactatttaaaggtgatcctgattggcataaattacatgcatacgccaaacctagcttatctgaaaaagagcaaagctttttagataaccaagtacaaacactgtgtgcaatgttagatgactataaaattgttcatcaagataaagacctttcgccagaggtttggcagtacctaaaagacgaaggtttttttgccctcattattccagaaagttacggtggtcgtgacttctcagcaattgcaaattcaaccatagtctcaactattgcaacaaaaagcttaaccgcagcggtcactgtaatggtacctaatagcttaggtccgggtgaattactgatgcattacggtactgaggagcaaaaagagcgttggttgcccagtttagcaaaaggtaaagatgtaccttgttttgccctgactggccctgaggcaggctctgatgccggctcaattcctgacaccggggttgtttgtgagggtctttataatggtgaaacagtattgggtttaaggcttaattggtctaaacgctatattaccctagcgccagtagcaagcgttttaggccttgcatttaaaatgtcagatcctgatggattactcggcgataaggtcgatattggtattacctgcgcgctaatacctacgagtcatcctggtgtgcaaataggagagcgtcattacccaatggccatggcgtttatgaacggtacaacctacggcgaagatgtttttattcctcttgattggattattggtggcccagaatatgctggaagaggctggcgcatgttagttgaatgcttaagtgctggacgcggtatttcattacctgcacttgccagtgcgaccggtcacttaagtgctcgcatgaccggtgcttatgcttatgtgcgtaaacagtttggtttatcaattggtaaatttgaaggtgtgcaagagtcacttgctcgaattggtggccatacgtatgccctagaagcgatgcgattgatgacagcaagcgctattgatatgaaattaagcccgtcggtcgtgactgcgattgctaaatatcatatgactgaaatgagtcgtgtcgtagttaacgatgcgtttgatattcatgcaggtaaagctatccaattaggtcatcacaattatttagcgcatggttatatgggcgtgccgatttcaattactgttgaaggcgctaacattttaacccgcaacttaatgatctttggtcaaggtgcaacccgttgtcatccgtatgtactcaaagagatggaagccgctgcgatggccgatgcagaagagggtcttaaacagtttgatgacttattagtcaaacatatcctctttgcaggtaccaacgctacaatgactctatttcatggtttaactgctgcgcgttttaattcggcgccagtttctggcccaacggcaaaatattataaacagcttggccgtatgagtcgtgcgcttgcaatttctactgatttggcaatgttgttacttggtggtgagcttaaacgtaaagaaatgatttcggctcgcttgggtgatgtattaagtcatttgtatatcgcttcaacggtgttaaagcgttatgaagaccaaggccgccagcaatctgatttaccttttgttgaatactcaatagatcacagtttgtatcaaattggccaagctttttatggcttgtgtagtaacttcccaaataaattgatcggttatgcacttaagcgtttgatttttccgtttggtaatagttatagacaaccgagtgacgagtccgctcagcaaatttgtcagcatatgattaaaccaggagtcatgcgcaaccgtttaacgcacttatgttttattgatgacaatgcaggtactggtgtaatggaacaggcgtttcaagccatgtaccgctgtgaaggattatttgcaaagctaaacaaagcgcaacataaaggtgagttgccaagcaaagtatcgattatcgaattaattgaaaaagcaaaattcattaagctgattaatgaagatgaagccgaagcgatgcttgcggctaatgagctacgtttacaggcaattaatgttgataattttgcccctggggagcttgaaggacgcacagttaagagttcaaaagcggcttaa

SEQ ID NO: 35687 - protein, 769 aa, Pseudoalteromonas tunicata D2
MSILILLIVAVVIIFMVTDIRLSLISRPAFAFFKRVLPPLSQTEREAMEAGDIWWDGELFKGDPDWHKLHAYAKPSLSEKEQSFLDNQVQTLCAMLDDYKIVHQDKDLSPEVWQYLKDEGFFALIIPESYGGRDFSAIANSTIVSTIATKSLTAAVTVMVPNSLGPGELLMHYGTEEQKERWLPSLAKGKDVPCFALTGPEAGSDAGSIPDTGVVCEGLYNGETVLGLRLNWSKRYITLAPVASVLGLAFKMSDPDGLLGDKVDIGITCALIPTSHPGVQIGERHYPMAMAFMNGTTYGEDVFIPLDWIIGGPEYAGRGWRMLVECLSAGRGISLPALASATGHLSARMTGAYAYVRKQFGLSIGKFEGVQESLARIGGHTYALEAMRLMTASAIDMKLSPSVVTAIAKYHMTEMSRVVVNDAFDIHAGKAIQLGHHNYLAHGYMGVPISITVEGANILTRNLMIFGQGATRCHPYVLKEMEAAAMADAEEGLKQFDDLLVKHILFAGTNATMTLFHGLTAARFNSAPVSGPTAKYYKQLGRMSRALAISTDLAMLLLGGELKRKEMISARLGDVLSHLYIASTVLKRYEDQGRQQSDLPFVEYSIDHSLYQIGQAFYGLCSNFPNKLIGYALKRLIFPFGNSYRQPSDESAQQICQHMIKPGVMRNRLTHLCFIDDNAGTGVMEQAFQAMYRCEGLFAKLNKAQHKGELPSKVSIIELIEKAKFIKLINEDEAEAMLAANELRLQAINVDNFAPGELEGRTVKSSKAA

SEQ ID NO: 35688 - DNA, 2349 bp, Pseudoalteromonas tunicata D2
  CDS (1)..(2349): transl_table=11
atgttacttggtagcattattggcgcaatctcgaccttaggttggctagtctttttagcacttactatcccattatctgttacaagcttacgtcagcagtacatcactaaacctatttttgccgcatttaaaaaagtaaccccaaccatgagtgaaaccgaaaagtcagcaattgacgcgggcacaacttggtgggaagcggatttattttgtggtaacccagattggaaaaaactacataaataccctgtgccacgtttaaataccgaagaacaagcatttatggatggccctgttgaaacggtatgtggcatgcttgatgattggcacgctactcatgaattaaccgatttacctcctgatgtatggcaatatttaaaagataataagttttttgccatgatcattaaaaaacaatacggcggcttagaattttctgctttcgcgcagtcgtgtgtattacaaaagttgaccagtaaatctacattgctgtcgtcgattgttggtgtaccaaattctctaggcccaggtgagttattacaacactatggtactgaagaacaaaaagatcattatttacctcgcttagcgtcaggtcatgaaattccgtgttttgcgctaacttctccagaagcaggctctgatgcaagcagcattcctgattatggtgtcgtatgcaaaggtatgtggaatggtgaagaagtcttaggtttaaaccttacatggaataaacgctacatcacccttgcacctgttgcaactgtacttggtttggcgtttaaattacgcgacccagatggcttgctaagcgacaataaagagcccggtatcacttgcgccctgatcccaacagatactcctggagttgaaattggtcgtcgtcacttccctttaaatgtgccatttcaaaatggaccaaccaaaggcgaaaatgtatttgtgccaatcgattatattatcggtggcgctaaaatggctggccaaggctggcgtatgctggttgaatgcttgtcggtcggccgtgcaattacgctgccttcaaactcagccggtggtgtaaaagccattgcactggcaagtggttcttatagccggatccgtcgccaatttcgcttaccgattggtcacatggaaggcattgaagagtcattagcaaaacttgcaggttatgcgtatagctctgatgccgcagtgagtatgtcaaccggtgcggttgatttaggtgaaaaaccatctgttgtgtcagcaataatcaaatatcacttaaccgagcaaatgcgcgattcaaccattcatgccatggatattcatggtggaaaagggatcatgcttggcccaaacaactatttaggccgtggttatcaaggtgctcctattgcaattacagttgaaggtgcaaatattttaactcgcaatatgatcatatatggccaaggcgctattcgttgccatccttttgtacttgatgaattagcatcatgtagcattgctgataaagacgaagcgcttaaagcctttgatacagcgcttatgggtcacattggttacactatttcaagctttgttcgtaccgtatggcttggcttaacgggtgctaagtttgctaaaaccccatacaaagatgaaaccgccgagttttatcaaacagcctctcgctttagtgcttctttagcattgatgtcggatatttgtatggcggtttttggtggttcactaaagcgtaaggagcgtatttctgcacgtttgggcgatttactgagctatttatatttagtatcagcaacattaaaacgctacaacgacgaaggccgtaaaaaagaagactttgcattagtccagtggagctgccaagagcatctttatcactgccaacgtgcattggctgatttaatcaataacatgccgtttgcaccaatgcgagcattgctaaaaatcattttattcccttggggtcggccggtgcgcaaacctactgacatccttgagcaaaaagttgctcgtttattgcaagtacctagtgctacgcgcgatcgcctcgccaatcacatctacttaaccaatgaaccaaacaacttaatcggacgccaagagcaaacgttaaaagatattttagccgtagagccaatcttcgataaaatttgtctcgctaaaggtgagaagcttcctttcttcgcgttagataaagtggctgcaatgggccttgaaatgaacgtaattaccgaaaaagaagcagatatgctgatcaaagcggaaattggccgacttcaagtgattaatgtcgatgattttgatcctgaagatttaaaagcgggtgctgctcgcaccagtaaaaaaagtaaagcggcttaa

SEQ ID NO: 35689 - protein, 782 aa, Pseudoalteromonas tunicata D2
MLLGSIIGAISTLGWLVFLALTIPLSVTSLRQQYITKPIFAAFKKVTPTMSETEKSAIDAGTTWWEADLFCGNPDWKKLHKYPVPRLNTEEQAFMDGPVETVCGMLDDWHATHELTDLPPDVWQYLKDNKFFAMIIKKQYGGLEFSAFAQSCVLQKLTSKSTLLSSIVGVPNSLGPGELLQHYGTEEQKDHYLPRLASGHEIPCFALTSPEAGSDASSIPDYGVVCKGMWNGEEVLGLNLTWNKRYITLAPVATVLGLAFKLRDPDGLLSDNKEPGITCALIPTDTPGVEIGRRHFPLNVPFQNGPTKGENVFVPIDYIIGGAKMAGQGWRMLVECLSVGRAITLPSNSAGGVKAIALASGSYSRIRRQFRLPIGHMEGIEESLAKLAGYAYSSDAAVSMSTGAVDLGEKPSVVSAIIKYHLTEQMRDSTIHAMDIHGGKGIMLGPNNYLGRGYQGAPIAITVEGANILTRNMIIYGQGAIRCHPFVLDELASCSIADKDEALKAFDTALMGHIGYTISSFVRTVWLGLTGAKFAKTPYKDETAEFYQTASRFSASLALMSDICMAVFGGSLKRKERISARLGDLLSYLYLVSATLKRYNDEGRKKEDFALVQWSCQEHLYHCQRALADLINNMPFAPMRALLKIILFPWGRPVRKPTDILEQKVARLLQVPSATRDRLANHIYLTNEPNNLIGRQEQTLKDILAVEPIFDKICLAKGEKLPFFALDKVAAMGLEMNVITEKEADMLIKAEIGRLQVINVDDFDPEDLKAGAARTSKKSKAA

SEQ ID NO: 35690 - DNA, 2457 bp, Photobacterium sp. SKA34
  CDS (1)..(2457): transl_table=11
atggttacgcttgcgtatgtcattagctttatcggtgttatgttcatattggcgtatcatcgcgcgtcattaaaaacctttacggcggtaattgctgcaacactattaatcggtactgttttttctattacaggtgttgttagctggttaattttcgctgcgattgctattcctcttaatatcccgaccttgcgtaaaaaatatcttgccactcctgcattaaaagcctttaaaggtgtaatgccagaaatgtctcgtactgaaaaagaagcaatcgatgccggtacagtgtggtgggaagctgatttatttggtggcaatccagactggaaaaagctccatgatattcccgcgccaaccctttcagcagaagagcaagcttttctcgatggaccagtaaatgaactttgccgtatggtgaatgattttcaaattacccatgaacttgccgatctaccacccgaagtatggcaatacttaaaagatcataagttcttcgccatgatcattaaaaagcaatatggtggacttgagttttctgcctatgcccaatccctagtactgcaaaaattaacaggtgtctctgctgtattatcatcaaccgttggtgttcctaattcactaggtccaggtgaactgcttcaacactatggtactgaagagcagaaaaaccattatttaccccgcttagcagcaggtcaggaaatcccttgttttgccttaactagcccagaagcaggctcagatgccggctcaattccagatttcggtattgtgaaaaaaggtatgtggcaaggcgaagaagtccttggtatggaattaacatggaacaaacgctatatcaccctagcaccagttgctacggtactaggtcttgcctttaaactctcggatcctgacaacttactcggagatcaaaaagaactgggtatcacttgtgcattgatcccaaccgatctagagggcgttgagattggtcgtcgtcacttccctcttaatgtgccattccaaaatggtccaactaaaggtaacaaaatctttgtccctattgattttattatcggtggtcaggaaatggcaggccaaggatggcgtatgctcgtggaatgtctatcggttggtcgcggtattactctaccgtctaactcaacgggtggattaaaaactgcagcaatcgcaacaggagcttatgctcgcattcgtcgccaattcaaaatgccaattggtaaaatggaaggtattgaagagccacttgcacgtattgtgggtaatgcttatgtcttagatgcagccagtaccctaaccgtcgctggtatcgatcttggtgaaaaaccttccgttatctcagcgattgtaaaataccattgtacccatcgaagccaacgcggtgtgattgatgcgatggatatcgtaggtggtaaggggatctgtatgggaccgagcaactttattgctcgtggttatcaaggcgcacctattgctgtcaccgttgaaggggcaaatattctaacacgttcaatgatcatctttggacaaggtgcaatccgttgtcatccttatgtgttagaagagatgaacgccgcttataatgatgataaaaaacaagccttagagagctttgataaagcagtatttgctcatgtgggcttcgtgataagtaacatggcacgctctttctggttaggtattaccgatggctacggttcatccgcaccacgtaaagatgcaaccacccgttattaccaacaacttaaccgttacagtgcaaaccttgctctactggctgatatttccatggcagtgcttggtggttcattaaaacgtaaagagcgtttatcagcccgtttaggtgatgtgcttagccagctttatttatcatcagcgacattaaaacgttatgccgatgatggttatcagcaacaagatcttccattagtacattggggtctacaggattcattataccaagcagaaacagcacttgatgacttcctaagtaacttccctaataagttcattgctggcgcactacgtgttgtactgttcccattaggtcaacgtcgtatcaaaccaagtgataatttagatcatgccgttgctcgtttagcacaaaccccatcagaaactcgagatcgcctaggtcgaggtcaattcttagaagcatctgaagggaatccagtcggtatgatggaagcagcacttaacgatattcttgccgctgagccgatttatgatcgcgtttgtaaagcagcgaacaaaaaatatccgtttgtacagttaggtaatgttgcagataaaggacttgaactcggtgtgattgaacatgcggaagcagagctattgcgccgtgctgaattaggtcgtttacgtacgattaatgttgatgactttgaacctgaacaattagcagcaaagacaaccccagatgctgattgctcgatcaataacgcggcttaa

SEQ ID NO: 35691 - protein, 818 aa, Photobacterium sp. SKA34
MVTLAYVISFIGVMFILAYHRASLKTFTAVIAATLLIGTVFSITGVVSWLIFAAIAIPLNIPTLRKKYLATPALKAFKGVMPEMSRTEKEAIDAGTVWWEADLFGGNPDWKKLHDIPAPTLSAEEQAFLDGPVNELCRMVNDFQITHELADLPPEVWQYLKDHKFFAMIIKKQYGGLEFSAYAQSLVLQKLTGVSAVLSSTVGVPNSLGPGELLQHYGTEEQKNHYLPRLAAGQEIPCFALTSPEAGSDAGSIPDFGIVKKGMWQGEEVLGMELTWNKRYITLAPVATVLGLAFKLSDPDNLLGDQKELGITCALIPTDLEGVEIGRRHFPLNVPFQNGPTKGNKIFVPIDFIIGGQEMAGQGWRMLVECLSVGRGITLPSNSTGGLKTAAIATGAYARIRRQFKMPIGKMEGIEEPLARIVGNAYVLDAASTLTVAGIDLGEKPSVISAIVKYHCTHRSQRGVIDAMDIVGGKGICMGPSNFIARGYQGAPIAVTVEGANILTRSMIIFGQGAIRCHPYVLEEMNAAYNDDKKQALESFDKAVFAHVGFVISNMARSFWLGITDGYGSSAPRKDATTRYYQQLNRYSANLALLADISMAVLGGSLKRKERLSARLGDVLSQLYLSSATLKRYADDGYQQQDLPLVHWGLQDSLYQAETALDDFLSNFPNKFIAGALRVVLFPLGQRRIKPSDNLDHAVARLAQTPSETRDRLGRGQFLEASEGNPVGMMEAALNDILAAEPIYDRVCKAANKKYPFVQLGNVADKGLELGVIEHAEAELLRRAELGRLRTINVDDFEPEQLAAKTTPDADCSINNAA

SEQ ID NO: 35692 - DNA, 2277 bp, Photobacterium sp. SKA34
  CDS (1)..(2277): transl_table=11
atgagcactttatctgtaatgcgaaaacgttatctcagcgatcccgcctttaagatgtttaagaaagtgttgccaccgttatcagaaacagaacgcgaggcaatggaagcggggagtgtatggtgggatggtgagttatttagtggacaacctaactggaatacattgttaacctaccctaagccaaaactttctgatgaagagcaagtgtttatcgacacaaagctagaaacgttattagccttgttaaacgattatcagattgttcaagaagacaaagatttatcgccagaggtgtggcagtacctacgtgatgaaaagtttttctcgttaattattggcaaagaatacggcggtcttgatttttcagctcatgcgaattcaaccatagttgctaaaattgcgactcgtagtttaagtgctgcggtatgtgtcatggtgcctaactccctagggccaggtgaattattgactcattacgggacagaagaacagaagaattattggctaccacgtttagctaacggtaaagatattccatgttttgcattaactgggccagaagcaggctcagatgccggtagtattcctgatgaaggtattgtttgttatggcgagcatgaaggtgaacaagtattaggtttacgcctaacatggaataaacggtatatcaccttagcaccagttgcaacagtattaggtctggctttcaaaatgcaagatcctgatggtctgcttggtgatagaaaagaattaggtatcacctgtgcattaattccagccgatcatcctggcgttgaaattggtgaacgccatgacccattaaatatggcttttatgaatgggcctacacgcggtaatgatgtttttattccaatggattggctaatcggtggtcaagaatatgccggaaaaggttggcgaatgctggtggagtgtttatcagcagggcgtggtatttctcttcctgcattaggcactgctattggacacttaacagcgaaaacaacaggcgcatattcagttgttcgtaagcaatttggtacttcaattggtaattttgaaggtgttgctcaagctttagggcggattggtggtttcacttatatgttggaagctgcgcggacattaaccacgacttcgttagatatgggacaaaccccagggattgttacagccattgccaaataccatatgactgaaatggcacgaacgatccttaatgattcaatggatgtacatgctggtcgtgctattcagctcggtccaatgaactatttaggccatcactactttggtatgccagttgcaatcactgttgaaggcgcgaatattttaactcgaaacttgatgatctttggtcaaggtgcaacacgttgtcacccttatgtactcagtgaaatggaagcggctgccaatccagacgaacagcaaggtgagaaagatttcgataagttgctatcaaaacatataggctttgctatcggtaatgtcagcaaatcattactgaatgctttttcaggctctcgttttaatcgatcaccagttagtggtgaaacagctccttattatcgccagttagcaagaatggcaaaggcattagcggtaagtgctgattttgcgatgttaagccttggtggcgagttaaaacgccgagaattaatctctgcacgtttaggcgatgttttaagccatctttatttagcatcggcagtattaaaacgctatgaagatgaagggcgtcagcagcaagatttatcaatggtgaaatacggtgtagagcattgtttacatcaatgtggtgttgcttttaatgatgtgtttaataatttccctcgtaaaggtgttgggcgtctacttcgaacgattaacttcccgttaggcattcattatcacgcaccatcagatgtaatagctatcgacattgcagaatcattaatgactccaggtgtacatcgtgagcgattaacacatctttgttatgttggtgataaagaggatgatcctgttgcaattatggaacgtgcctttttagctatgcacgagatcaagcccttagagcgcaaaatgatgaaagcaacacgtagaggtgagatcccacgcaaagcatcgttaacaaataagttacaagttgcattagatgtgggagtaatcacagaagctgagaagaaaaaaatagaaaatgctgaacagctaagacaaaaagcggttcaagttgatcatttttgtgcagaccattttaaaaaagctcgcatactaccaggaaaagcagcttag

SEQ ID NO: 35693 - protein, 758 aa, Photobacterium sp. SKA34
MSTLSVMRKRYLSDPAFKMFKKVLPPLSETEREAMEAGSVWWDGELFSGQPNWNTLLTYPKPKLSDEEQVFIDTKLETLLALLNDYQIVQEDKDLSPEVWQYLRDEKFFSLIIGKEYGGLDFSAHANSTIVAKIATRSLSAAVCVMVPNSLGPGELLTHYGTEEQKNYWLPRLANGKDIPCFALTGPEAGSDAGSIPDEGIVCYGEHEGEQVLGLRLTWNKRYITLAPVATVLGLAFKMQDPDGLLGDRKELGITCALIPADHPGVEIGERHDPLNMAFMNGPTRGNDVFIPMDWLIGGQEYAGKGWRMLVECLSAGRGISLPALGTAIGHLTAKTTGAYSVVRKQFGTSIGNFEGVAQALGRIGGFTYMLEAARTLTTTSLDMGQTPGIVTAIAKYHMTEMARTILNDSMDVHAGRAIQLGPMNYLGHHYFGMPVAITVEGANILTRNLMIFGQGATRCHPYVLSEMEAAANPDEQQGEKDFDKLLSKHIGFAIGNVSKSLLNAFSGSRFNRSPVSGETAPYYRQLARMAKALAVSADFAMLSLGGELKRRELISARLGDVLSHLYLASAVLKRYEDEGRQQQDLSMVKYGVEHCLHQCGVAFNDVFNNFPRKGVGRLLRTINFPLGIHYHAPSDVIAIDIAESLMTPGVHRERLTHLCYVGDKEDDPVAIMERAFLAMHEIKPLERKMMKATRRGEIPRKASLTNKLQVALDVGVITEAEKKKIENAEQLRQKAVQVDHFCADHFKKARILPGKAA

SEQ ID NO: 35694 - DNA, 2451 bp, Oceanobacter sp. RED65
  CDS (1)..(2451): transl_table=11
atgatgacacttattattttattagcagccgttgtggccttgctaatcgttatgcgccgtgaaatgggcgccctagctgcgatagtcgtgatggctgtggcaggcgctgcctcgtgggtagttgcatctaaagttctggctattgttctgtttgctttagcagcaatcacagcagtaaccggtttatccctattccgccgactttggctaacaccgatcatttttaatgtcttcaaaaaggttgccccaaaagtctctgaaacagagcaagtggccttggacgctggcaccgtgggttgggatggtgaattgttcaccggtaagcctaactggagcaagctgttagacaacaaatatgatggtctaacggaagaagaacaagcgttcttagataaccagtgtgaagaagtgatatctcgctgcaacgcttgggatgttgctgtagaacgtgccgacctaccaaaagacgtttgggattaccttaagaaagaaggtttcctaggcatgatcattccgaaagaatacggtggcttacatttctctgctaaagcacagtctgccgtactgcaaaagctatctgccaacgaaatgctaatggtaagtgttggtgtacctaactcgttaggacccggtgagcttttggtaaaatacggtacagaagagcaaaagaatcactatctaccacgcctagcagatggtcgcgaaattccttgctttggtctaactggcccacgtgcaggttctgacgctacatcactaccggatacaggtatcgtgtgtaaaggtcagttcaatggcaaagaagtggttggtatcaagcttaacttcgagaaacgctggatcaccctagcgcctatcgcaacggttgtaggcttagcgttccgcatgtttgacccagacaacctattgggtaaaggtaaagaccgcggtatcacttgtgcgttgattcctcgtgaaacagagggcatggaaattggtcgtcgtcactgtccgattggtagcccattcatgaatggtccaattcgcggtaaagatgtgttcatcccgcttgacttcatcattggtggtgaagagatggccggtgaaggctggcgcatgctggttgaatgcctaagtgttggtcgctgtatcactctaccctctggcgcagctggtgcaggtgcctatgcaaccggtactgccggtggttttactcgtatccgtcgtcagttcaacacgcctgttgcggatatggaaggtgttcaagagccattggcgcgtattgcagctcacacctatattgcccaaagctctgttaaccaaaccgctaacatgatcgaccgtggagaaaaacctgcggttccatcagccattcttaagtatcacctaaccgagatttctcgcagcgttcttggtgatgctatggacgttcacggcggtaaagcggtaacgcttggacctcgtaactatctgggcatcgcttactcaggtaaccctgtatctattacagtggaaggtgcgaacatcatgactcgcagcttgatgatcttcggtcaaggtgcaattcgatgccatccatacgttttagaagagctggcggcgaaaaaagcagacgacaagaaagcgttcgataaagccttcttcggacatgctggtttaatcttcggtaatgctgctcgtgcttttacccttggttttggtattggcaaggcaagcgttccgtttgattcagcatccaaaccttacgcgcaggcggttgctcgctttagtgctgcgtttggtctatgtgcagacgctgccatgaccacattaggtgcagaactaaaaatgcgtgaacttatctctgcgcgcttgggtgacattcttgccaatatgtaccttgcctctatggtactgaagaactggcatgaaagtgacaaagtagaaggtgagcgtgagttaatggaatacagccttggcttattactctaccgtgcagaaaccgctttagatgagtttctacaaaacctaccaaaccgtgcagtagcaaaagttctgcgtgtgttaactatgccactgggtcgtcgctgggataagcctcatgatgatgcaattcgcgccatcgctcgtgcaatctctaccgactcagctgttcgcggtaaactattggctggtgccatggtgaacgacagcaaaggcacagcagaaaaccctgttgctcgctataatgcgttgcttaaagactacgaaaaagccgagaagctttatcgtaaagcaaccaaagcctacaacaaaggcgaaattccaatggaagctttgcatccagaacaacgcttcgaagaagcgcttaaggccgaaatcttcactaaagaagaagctgactttatgcgtcaatacgaagcctctgtattggaaatgctaaccgttgatgacttcccatttgacgagtttgcacgcaacaaagaaactctgattaaccacaaccctgcataa

SEQ ID NO: 35695 - protein, 816 aa, Oceanobacter sp. RED65
MMTLIILLAAVVALLIVMRREMGALAAIVVMAVAGAASWVVASKVLAIVLFALAAITAVTGLSLFRRLWLTPIIFNVFKKVAPKVSETEQVALDAGTVGWDGELFTGKPNWSKLLDNKYDGLTEEEQAFLDNQCEEVISRCNAWDVAVERADLPKDVWDYLKKEGFLGMIIPKEYGGLHFSAKAQSAVLQKLSANEMLMVSVGVPNSLGPGELLVKYGTEEQKNHYLPRLADGREIPCFGLTGPRAGSDATSLPDTGIVCKGQFNGKEVVGIKLNFEKRWITLAPIATVVGLAFRMFDPDNLLGKGKDRGITCALIPRETEGMEIGRRHCPIGSPFMNGPIRGKDVFIPLDFIIGGEEMAGEGWRMLVECLSVGRCITLPSGAAGAGAYATGTAGGFTRIRRQFNTPVADMEGVQEPLARIAAHTYIAQSSVNQTANMIDRGEKPAVPSAILKYHLTEISRSVLGDAMDVHGGKAVTLGPRNYLGIAYSGNPVSITVEGANIMTRSLMIFGQGAIRCHPYVLEELAAKKADDKKAFDKAFFGHAGLIFGNAARAFTLGFGIGKASVPFDSASKPYAQAVARFSAAFGLCADAAMTTLGAELKMRELISARLGDILANMYLASMVLKNWHESDKVEGERELMEYSLGLLLYRAETALDEFLQNLPNRAVAKVLRVLTMPLGRRWDKPHDDAIRAIARAISTDSAVRGKLLAGAMVNDSKGTAENPVARYNALLKDYEKAEKLYRKATKAYNKGEIPMEALHPEQRFEEALKAEIFTKEEADFMRQYEASVLEMLTVDDFPFDEFARNKETLINHNPA

SEQ ID NO: 35696 - DNA, 2283 bp, Vibrio sp. Ex25
  CDS (1)..(2283): transl_table=11
atgagctctctacgaagaaaatggattagtgacccagcttttaaagtgttcaaaaaagtattgccacctctctctagcaccgagaaagaggcgatggaagcgggtagtgtgtggtgggatgccgaactattttcaggcaagcctaacttcactacattgcaccattatccaacgccgacactgacagcagaagagcagtcatttatggataatgagcttgaaacccttctagaaatgcttgatgaccagaagattgtcaaagaagacagggatttaccgcctgaagtatgggagtacttacgtaaagagcgatttttctcactgatcatttcaaaagcgtatggtggtcgtgaattttccgctttagcgaactcaaccattgtttctcgtattgcgactcgaagtatcagtaccgcggtatcggtaatggtaccgaactctcttggtccaggtgagcttttatcgcactatggcacgcaagagcaaaaagattactggttgcctcgtcttgctgatggtaccgacattccttgttttgcattaacagggcccgaagcgggatctgacgccggtggtataccagatcaaggcgtagtttgttatggcactcacgaaggcaaagaagtgcttggcgtgcgagttagctggaataaacgctacatcacacttgcgccagtggcgacagtgctcggattagcatttaagctacaggatccagaagggctacttggtgataagaaagaggttggaatcacatgtgcgctgatccccgctgaccatgaaggtgtcgagataggcgagcgccatgatcctctgggttctgcattcatgaatggtccgactcgtggtgaagatgtcttcatccctatggactggttgatcggtggcgctgattacgcaggtaaaggttggcgtatgctggttgagtgtctttctgctggtcgtggtatctctctcccagcgcttggcacagcgattggccaccttactacacgtacaaccggtgcttatgcttacgtacgtaaacagtttggtatgtcgatcggtaagtttgagggtgtcgcagaagctatggggcgtattggtggccttacttatctactagaagcaacacgtacgctgacgacgacttctctcgatatgaaagaaaaacctgggattgtaaccgcgattgccaagtaccacatgacggaaattgcgcgtactattctaaatgattcgtttgatattcatgcaggtcgtgcgattcaagatggcccaatgaactatcttgctaaacactatctcggtatcccagttgcgatcactgttgaaggcgcgaatattctgactcgtaacctgatgatatttggtcaaggtgcgactcgttgtcacccatatgtactgaaagaaatggaagccgcggcgaatccagattctgaacaaggggcgaaagaatttgacaacttgctctttaaacacatcaaacatgcggtaggcaatacatttggtgcatttggcgcggcgctaactggttctcggtttgtaaaagcgcacatgagtggcccaacacagcagtactataaagaaatcacaagattaagccgagcgcttgccgttagtgctgacttcgcgatgttaacactaggcggtgatttgaagcgtaaagaaatgatttccgcacgtctgggtgatggcttaagttatctatatatggcgtctgccgcactgaaaaagtatgaagatgaaggacgtcaacaaggcgatctagattttgtccactacgccgtgcaacattgtttgtataacgcatctaagtcattaaatgaggcttataccaacttccctgtgaaatacgttggcggtgtgctgaaagggttattgttcccacttggtaatcattttaataagccaagcgatgaactgtgtgtgaatctggcggaagcgatgatgacgccaggagcacaacgtgatcgactcacgcatctttgctacatcggaaaatccgacgacgacagcgtaggcttaatggagaatgccttcctcgcaatgtacgaaatcaaaccattagagcgtaagcttatgaaggcggcgaaggatgggaaagtggctcgtaaaggtcttttacacgaccgtttgcagcaagcatttgaagctggcgtgttaactgagcaagaaattgaccaaataatggcggcagacaaattgcgttacaaggcgattcaagttgaccactttagtcatgacttttctgaagtacgaaccgattgcccaaaaaagtcgcatttgaacccggcggcatag

SEQ ID NO: 35697 - protein, 760 aa, Vibrio sp. Ex25
MSSLRRKWISDPAFKVFKKVLPPLSSTEKEAMEAGSVWWDAELFSGKPNFTTLHHYPTPTLTAEEQSFMDNELETLLEMLDDQKIVKEDRDLPPEVWEYLRKERFFSLIISKAYGGREFSALANSTIVSRIATRSISTAVSVMVPNSLGPGELLSHYGTQEQKDYWLPRLADGTDIPCFALTGPEAGSDAGGIPDQGVVCYGTHEGKEVLGVRVSWNKRYITLAPVATVLGLAFKLQDPEGLLGDKKEVGITCALIPADHEGVEIGERHDPLGSAFMNGPTRGEDVFIPMDWLIGGADYAGKGWRMLVECLSAGRGISLPALGTAIGHLTTRTTGAYAYVRKQFGMSIGKFEGVAEAMGRIGGLTYLLEATRTLTTTSLDMKEKPGIVTAIAKYHMTEIARTILNDSFDIHAGRAIQDGPMNYLAKHYLGIPVAITVEGANILTRNLMIFGQGATRCHPYVLKEMEAAANPDSEQGAKEFDNLLFKHIKHAVGNTFGAFGAALTGSRFVKAHMSGPTQQYYKEITRLSRALAVSADFAMLTLGGDLKRKEMISARLGDGLSYLYMASAALKKYEDEGRQQGDLDFVHYAVQHCLYNASKSLNEAYTNFPVKYVGGVLKGLLFPLGNHFNKPSDELCVNLAEAMMTPGAQRDRLTHLCYIGKSDDDSVGLMENAFLAMYEIKPLERKLMKAAKDGKVARKGLLHDRLQQAFEAGVLTEQEIDQIMAADKLRYKAIQVDHFSHDFSEVRTDCPKKSHLNPAA

SEQ ID NO: 35698 - DNA, 2445 bp, Vibrio sp. Ex25
  CDS (1)..(2445): transl_table=11
atggacatcttgctctcaatcatcacgatgacggtcgtgttaggcattacgctctaccaccgcatgtctctcgtgaaatctattagtttactcacagcagctatgttagcgcttacagtaacaggcgcggttggcgttactggttggacgatttacgttcttgctgccgctgtattcgcggttcctggcgtacgtcagtctttgataagtcgcaaagcattagcgcttttcaagaaagtgctgccagctatgtctcaaaccgaaaaagaagcgttagacgcaggtaccgtctggtgggaagccgaactatttaaaggcaaaccagaatggcaaaagctacacgcgattcaagcacctaagttaagtgcggaagaacaagcctttttagacggccctgtgaatgaagtgtgcgccatggtgagtgatttccaagtgacccatgaactcgcggacttaccgccagaagtttggcaatacctgaaagatcacaaattcttcgccatgatcattaagaaaaagtacggtggtcttgagttctcagcatacgctcaatcactagtactacaaaaactaacgggtgtttctggcgttctatcgtctaccgttggtgttcctaactctttgggccctggtgagctactgcaacactacggtactgaagatcagaaaaatcattacttaccgcgcctagctgaaggtaaggaaatcccttgtttcgccttaacgagtccagaagcaggctctgacgctggctctattccagattacggtgtggtttgtaaaggcgaatgggaaggaaaagaagtactgggtatgcgcctgacttggaacaagcgctacatcaccctagcgccagtcgcaacggtactaggcttagcatttaaacttcgcgatcctgaaggtttgctaggcgacaaagaagatcttggcatcacttgtgcgcttatcccaactgatgtcaaaggtgttgagattggtaaccgacacttcccgctcaatgtgccattccaaaatggtccaacgcgcggtaaagacatctttgttcctatcgatttcattatcggtggtgaaaaaatggcgggccaaggttggcgtatgctggttgagtgtctatcggttggtcgtggtatcacgctaccttcaaactcaacaggtggcatcaaaactgcggcaatggcaacgggcgcttactcacgcattcgtcgccagttcaaacaacctatcggtcacatggaaggcgtagaagagccattggcacgtctgggtggtaacgcttacgtaatggacgcggcaagcaacttaaccgtggcaggtatcgacctaggtgaaaaaccttcggttatctcagctatcgtgaagtaccactgtactcatcgcggtcagcaaagcatcatcgacgcaatggacatcgtgggcggtaaagggatctgtatgggaccttctaacttcctagcccgtggttaccaaggtgcaccaatcgcggtaacggttgagggtgcaaacattttaacacgctcaatgatcatctttggtcaaggtgcgattcgctgtcatccatacgttcttgaagaaatgaacgccgcgtactctgatgccagtgactctgtagagaagtttgataaagcgcttgctggtcacgtgagctttaccatgagtaacctcgttcgcagtatctggtttggtttgagcgacggtttaggttcttcatcaccaaccaaagatgcaaccaagcgttactaccaacagttgaaccgctacagtgcaaaccttgccttgctatcggatatctcgatggcagtgctaggtggctctttgaagcgtaaagagcgtctatcagcgcgtcttggtgacattctaagccagctatatttaagctctgcgacgttgaaacgttttgagcaagatggccgcccagtcgaagatttaccattagtacactggggtctacaagacagtttgaaacaagcggaagtggcggtagacgaattcttagcaaacttcccgaacaaagtgattggtcgtgcactgcgcgtgttaatcatgccattcggtcgtgtacgcaaagcgccaagcgataaactagacagcaaagtggcgcgcattctacaaacgcctagtgcaacgcgctcacgcattggtcgcggtcagtaccttgaaccaaccgagcacaacgcagcaggtaagattgagcttgccctgtcagtcattcttcaagctgagccagtgttcgacaaagtatgtaaagctcaaggcaaacgtcgtccattcctacgtttggatatgattgctcaggaagggctagagcaaggcttgatcacgcaagaagaagccgacctactaagagaagctgaacagcatcgtctggatacaatcaacgttgacgactttgagccggaattgctcgcagcaaagccgctataccctcagatggatagcgttgcctaa

SEQ ID NO: 35699 - protein, 814 aa, Vibrio sp. Ex25
MDILLSIITMTVVLGITLYHRMSLVKSISLLTAAMLALTVTGAVGVTGWTIYVLAAAVFAVPGVRQSLISRKALALFKKVLPAMSQTEKEALDAGTVWWEAELFKGKPEWQKLHAIQAPKLSAEEQAFLDGPVNEVCAMVSDFQVTHELADLPPEVWQYLKDHKFFAMIIKKKYGGLEFSAYAQSLVLQKLTGVSGVLSSTVGVPNSLGPGELLQHYGTEDQKNHYLPRLAEGKEIPCFALTSPEAGSDAGSIPDYGVVCKGEWEGKEVLGMRLTWNKRYITLAPVATVLGLAFKLRDPEGLLGDKEDLGITCALIPTDVKGVEIGNRHFPLNVPFQNGPTRGKDIFVPIDFIIGGEKMAGQGWRMLVECLSVGRGITLPSNSTGGIKTAAMATGAYSRIRRQFKQPIGHMEGVEEPLARLGGNAYVMDAASNLTVAGIDLGEKPSVISAIVKYHCTHRGQQSIIDAMDIVGGKGICMGPSNFLARGYQGAPIAVTVEGANILTRSMIIFGQGAIRCHPYVLEEMNAAYSDASDSVEKFDKALAGHVSFTMSNLVRSIWFGLSDGLGSSSPTKDATKRYYQQLNRYSANLALLSDISMAVLGGSLKRKERLSARLGDILSQLYLSSATLKRFEQDGRPVEDLPLVHWGLQDSLKQAEVAVDEFLANFPNKVIGRALRVLIMPFGRVRKAPSDKLDSKVARILQTPSATRSRIGRGQYLEPTEHNAAGKIELALSVILQAEPVFDKVCKAQGKRRPFLRLDMIAQEGLEQGLITQEEADLLREAEQHRLDTINVDDFEPELLAAKPLYPQMDSVA

SEQ ID NO: 35700 - DNA, 2256 bp, Alteromonadales bacterium TW-7
  CDS (1)..(2256): transl_table=11
atgagtttacgtacaaagttaaaaaaagttttaccaagtatttctatcactgagcaagaagcgctagacgcgggtgatgtttggcttgaaggttctatctatcaaggtaagcctgatttcagtgcattacgcgatgtaccagcagctacactaacagctgacgaacaagcattccttgacggccctgtacaagagctactaggcatgattgacgattcagtaattcaaaatggcattcacttaccgaatgacattttagagtttttgaaaaaagaacgtttcttctcgcttatcattcctaagtcatttggtggtttagagtttagcccttacgcaaactcaacaattgttggcacaattgcgactaaaagttctgcagtagcagtaacagtaatggtacctaactcattaggtccgggtgagctacttcttcacttcggtacgcaagagcaacaagcgcattacttaccacgcttagcaaacggcacagacattccatgttttgccctaacaagccctgaagcgggttctgatgcaggcggcattccagacgttggtaaagtaaccaaaggcatgcacaacggcgaagaagtacttggtctagaaattacatgggacaagcgttatatcacacttgcaccaatcgcaacggttcttggtttagcatttaaagtagttgacccagacggtttactaggtggtaaagaaaacctaggtatcacgtgtgccttaattccaaaagagcacccaggtgtagaacttggtaatcgccatgacccaatgggtatccgtttttacaacggtactacacgtggtaacaaagtatttgtaccaatggattttgttattggtggtcagaaaaacatcggccgtggttggcaaatgctggttagctgtttaggtgctggccgtggtatttcactaccagcgttaggtgtaagtacagcgcaagttgcacttaaatcagcatctgaatacgcagcagtacgagagcagtttggcctatcaatcggtcagtttgaaggtattcaagaaaagcttgctgacattgcaggtaaaacatatcttcaagaagcaatgcgtgtacttacaactgaaggtttaggcatgggcttaaaaccatcggtagtaacggcaattgctaaataccacatgactgaacttggtcgcgacgtattagactcggcgatggatattcaagctggtaaagcgattcaaaacggtccacaaaatacactagcaagtggctacgttgcacaacctattgcaattactgtagaaggcgcaaacatccttactcgtaacctgatgatatttggtcaaggtgttatgcgttgtcacccatacttacaatctatggttgaatcaatccacagcgacgacaaaggcgctgatgcagaatttaacggtattttacgtaaaacaattggttacagtacagcaaacagcttacgtgcattccgtttaggtttactaccatttacagctggcgcaagctcagcattaccagaagtacgtgactacgaaaaagcagtacacaaactatctgcaaaacttgcagtatatgctgacttctcgttgttagtacttggcggtaaattaaagcaagctgaaatgctatcagcacgtttaggcgatgtaatgagcttcttgtacgcagctatggcatcaattaaatactacgagcaaaaagtagcgagcagcgagcgcgagcaagcagcaccttactttcattatgcaactcgttttgcactacaaagcgcagaagaagcattgcacaagttcttagataacttccctgcaagtggtactcgtaagtttattcgtttcgttacaatgaactactcaactaaaatgccaaaaatcagcgatgatttaatccgcgaattagctgaacaagcacagcttgatacagcctttaaagcgcaaataacgcatttagttaagcctattgaaggcgacggtcatcatattaacgagcaagcttataaagctaaaattgcatcactagctgaacttgcaaaagttaaaaaagcattacgtgcaagaactattaagccaggtgctcgctttagcattacgcttgaaaacgcacttgctgcaaacgtaatcacagatgctgagtttgctcagttaattgattacaacaagaaacgtgaaaaagcgattcgtgttgatgagttcgattttgatatgaacatattagatgacaacgcacaaccagttaacccacttaaaagtgtggttaaccagtaa

SEQ ID NO: 35701 - protein, 751 aa, Alteromonadales bacterium TW-7
MSLRTKLKKVLPSISITEQEALDAGDVWLEGSIYQGKPDFSALRDVPAATLTADEQAFLDGPVQELLGMIDDSVIQNGIHLPNDILEFLKKERFFSLIIPKSFGGLEFSPYANSTIVGTIATKSSAVAVTVMVPNSLGPGELLLHFGTQEQQAHYLPRLANGTDIPCFALTSPEAGSDAGGIPDVGKVTKGMHNGEEVLGLEITWDKRYITLAPIATVLGLAFKVVDPDGLLGGKENLGITCALIPKEHPGVELGNRHDPMGIRFYNGTTRGNKVFVPMDFVIGGQKNIGRGWQMLVSCLGAGRGISLPALGVSTAQVALKSASEYAAVREQFGLSIGQFEGIQEKLADIAGKTYLQEAMRVLTTEGLGMGLKPSVVTAIAKYHMTELGRDVLDSAMDIQAGKAIQNGPQNTLASGYVAQPIAITVEGANILTRNLMIFGQGVMRCHPYLQSMVESIHSDDKGADAEFNGILRKTIGYSTANSLRAFRLGLLPFTAGASSALPEVRDYEKAVHKLSAKLAVYADFSLLVLGGKLKQAEMLSARLGDVMSFLYAAMASIKYYEQKVASSEREQAAPYFHYATRFALQSAEEALHKFLDNFPASGTRKFIRFVTMNYSTKMPKISDDLIRELAEQAQLDTAFKAQITHLVKPIEGDGHHINEQAYKAKIASLAELAKVKKALRARTIKPGARFSITLENALAANVITDAEFAQLIDYNKKREKAIRVDEFDFDMNILDDNAQPVNPLKSVVNQ

SEQ ID NO: 35702 - DNA, 2277 bp, Alteromonadales bacterium TW-7
  CDS (1)..(2277): transl_table=11
atgtcggtatttatcattttactggttgttatagtggttatttttgccgttaaagatatccgcttaaacctgatcagtagacccacgtttaaaatgtttaaaaaagtacttccaccgctttcgcaaacagagcgagaggctatggaagcaggcgatgtttggtgggatggagaactatttagtggtaaccctgattggaaaaaattacacaattttccaaagccagaattgagcgaaaaagaaaacgcattcatggctaatcaggttgagaccctaatggcgatgctagatgattaccaaatagtgcaaaaagacaaagacttgccaaaagaagtgtgggattacttaaaaaaagaaggtttttttgcattaatcattcctgaaaagtttggtgggcgagagttttcggctattgctaattcaaccattgtttcaaaaatttcgactaagagtttaactgcggcggttaccgtaatggtgccaaatagtttagggccgggtgagctattgctgcattacggtactaaagagcaacaagaccgctggttaccaacgcttgctaatggtgaagatgttccatgttttgcacttacaggcccagaagcaggctctgatgccggtagcattccagactctggcgttgtttgtaaaggagagcacaatggtgaagaagtaattggtctacgtttaaactggtcaaaacgttacattacccttgcacccgttgccacagtattaggccttgcttttaaaatgtatgaccccgatggtttattaggagacgaaaaagagcttggtattacgtgcgcacttattccaaccgatcacccaggagttaaaacaggtgagcgccattacccacttaatatggcatttatgaacggtacaacttatggtgaagacgtgtttattccgcttgactggattattggtgggcaagagtgtgcggggcgtggatggcgcatgctggtggagtgtttaagtgcagggcgtggtatttcgctgccggctttaagtgctgcaaccggtcacctagcggctaaaatgacttcagcatatgccgtagttcgccagcaatttggtgtatctattgggcaatttgaaggtgtgcaagaagcgcttgctcgcattggtggcttaacttacacgctagagtcatgtcggttaatgacggctggcgcaatcgatttaaaacttagcccttcggttgtcaccgctattgccaaataccatatgactgaaatgggtcgtacagtcatgaatgatgcgatggatattcattcaggcaaaggcattcaggtggggccaaataactatttggcacatggttatatgggaataccggtgtctattacggtagaaggcgcaaatattttaactcgaaatttaatgatatttggccaaggagcgacccgttgtcatccctttgttctaaaagaaatggaggccgctgcacttgaagacgacgatgctgctttgaatcaatttgatggtttattaatgaaccatatattatttgctgtaagtaatgccagcatggcatttatacatggtttaacacgtagttactttgcaaaagcgcctgttggcggcgaaaccgcagtttactacaagcacctaagcagaatgagcagaggcttggctatttgtactgacgtagccatgttaatgttaggtggtgagctaaaacgcaaagagatgatatctgcccgattaggtgatgtattgagccagttgtatttagcttctacggttttaaaacgctatgaagacgaaggtcgtcaacaagcggacttaccttttgttaaatatgcgatagaaacatcgttatttgaaattggccaagcgtttgatggttttttcaaaaatttctcaaacccgattattaattttgtgcttaagcgtattgtatttccaattggtaatcattacgaaaaaccaagcgatgaaattgcacaacgtatttgcgagcatatgacacaaccaggtgtgtttagaaatcgcttaactcatttgtgttatgtagatgaaaacgcaggtacaggggtaatggaaaatgcatttttagctatgcacgatatgcaggctcaattcaaagatttaaaacaatggcagcgcaagggtaatattcctgcaacgctcgatattgaaggtgcgattaactttgcattagacaatgatttagtaacgcaaaccgatgccgatgctatgcaccatgctaataagctacgtaagcaagcaatagcggttgataactttcagcaaggcgagttgtag

SEQ ID NO: 35703 - protein, 758 aa, Alteromonadales bacterium TW-7
MSVFIILLVVIVVIFAVKDIRLNLISRPTFKMFKKVLPPLSQTEREAMEAGDVWWDGELFSGNPDWKKLHNFPKPELSEKENAFMANQVETLMAMLDDYQIVQKDKDLPKEVWDYLKKEGFFALIIPEKFGGREFSAIANSTIVSKISTKSLTAAVTVMVPNSLGPGELLLHYGTKEQQDRWLPTLANGEDVPCFALTGPEAGSDAGSIPDSGVVCKGEHNGEEVIGLRLNWSKRYITLAPVATVLGLAFKMYDPDGLLGDEKELGITCALIPTDHPGVKTGERHYPLNMAFMNGTTYGEDVFIPLDWIIGGQECAGRGWRMLVECLSAGRGISLPALSAATGHLAAKMTSAYAVVRQQFGVSIGQFEGVQEALARIGGLTYTLESCRLMTAGAIDLKLSPSVVTAIAKYHMTEMGRTVMNDAMDIHSGKGIQVGPNNYLAHGYMGIPVSITVEGANILTRNLMIFGQGATRCHPFVLKEMEAAALEDDDAALNQFDGLLMNHILFAVSNASMAFIHGLTRSYFAKAPVGGETAVYYKHLSRMSRGLAICTDVAMLMLGGELKRKEMISARLGDVLSQLYLASTVLKRYEDEGRQQADLPFVKYAIETSLFEIGQAFDGFFKNFSNPIINFVLKRIVFPIGNHYEKPSDEIAQRICEHMTQPGVFRNRLTHLCYVDENAGTGVMENAFLAMHDMQAQFKDLKQWQRKGNIPATLDIEGAINFALDNDLVTQTDADAMHHANKLRKQAIAVDNFQQGEL

SEQ ID NO: 35704 - DNA, 2457 bp, Alteromonadales bacterium TW-7
  CDS (1)..(2457): transl_table=11
atgacactcatatttacactcggtttaatcgtgctgctgtgcactgcgatttaccacagagcgagttggaacacagcacttggtgtttctgctgcaacattattaatcggtaccttcgcaggtgcttttggtttaattagctggttgatctttttgatcatcgcagtgcctctttcagttactggtattcgccagcaatacatcatcaaacctatctttacggtattcaaaaaagtaacaccgagcatgtctgacactgaaaagtcagctatcgatgcgggtacaacttggtgggaagctgatttattttgcggtaaccctgattggaaaaagctacaccaataccctgtgcctaaacttactattgaagagcaagcctttatagatggccctgttgaagtagtatgtagcatgctagatgattgggaagcaactcacgagctaactgatttaccgcaagatgtatggcaatacctcaaagacaataaattctttgccatgatcattaaaaaagaatacggcggtttagagttttctgcgtttgctcagtcttgtgtgcttcaaaaactaacgagtaaatcaacattactttcgtcaattgttggtgttccaaactcgttaggtccaggtgaattattacaacactatggtacaaaagagcaaaaagaccattacttaccgcgcttagctagcggccaagaaattccatgttttgcattaacatcaccagaagcaggctctgacgcaagttcaattcctgattacggtgttgtgtgtaaaggacaatggaacggtgaagaagttgtaggtataagcctaacgtggaacaagcgctatatcacacttgcgcctgtggcaacggtacttggtcttgcatttaaattacaagatccagatggcttattaagtgatgtaaaagagcctggtattacctgtgcattgatcccaacagatactcctggagtagaaattggtcgtcgtcacttcccgcttaacgtaccattccagaatggtcctactcgcggtaaagacatttttgtacctcttgattacattattggtgggccagatatggctggccaaggctggcgcatgctagttgagtgtttatcggtaggccgtgcaattacattaccgtctaactctgccggcggcattaaaatgattgcaaccgctacgggtgcatacagccgtattcgtcgtcaattccgtttacctattggtaaaatggaaggtgttgaagaatcaatggctaaacttgccggttacgcatacagctcagatgctgcagtaagtatgtcgactggtgcggttgatttaggtgaaaaaccatctgttgtatcagcgattattaaatatcacttaaccgaacaaatgcgcgatgcaacaatccatgcaatggacgttcttggcggtaaagggatcatgcttggtccaaataactatttaggtcgtggctaccaaggtgcacctattgccataaccgttgaaggtgcaaacatcctgacccgtaatatgatcatatacggccagggtgcgattcgctgtcatccgtttgtactaaccgagctaggtgcgtgcgaaattgaagaccgcgaagaagcgcttaacgtatttgataaagcgctaatgggccatattggctttactatgtcaaacctagtgcgtactaagtggcttgcccttacaggtgctcgctttacaagtgtgccttaccatgacgaaacagctgagttttaccgcatagcgtcgcgctttagtgcttcacttgcgcttatgtctgacataagcatggctgtatttggcggctctcttaaacgtaaagagcgtatttctgcacgtttaggtgacttacttagctacctttacttagtatctgcaacgcttaagcgttacaacgacgaaggccgtaaaaaagaagattttgcgcttgttcaatggagctgtcaggatcacctttaccactgtcaacgtgcgcttgctgacttaattaacaatatgccttctgcaccacttcgtggcgtattaaaagtgttattgttcccgtttggtcgcccggtgcgcaaaccgactgataagttagagcataaactagctcaaatcttacaagtacctagcgaaacacgtaaccgtttagcaagttatgtatacttaacaaatgagcctcttaatcttgtaggtcgtcaggagcaaacgcttaaagacgtactagaagtagagccgttatttgaaagagtatgtaaagagaaaggtgtgaaactaccatttttccaacttgataaagtggcacaaatggggcttgaagcaggtattttaagccaagccgaggccgataagctagctgctgtagagcaagctcgtttagacgtaattaacgtagacgattttgaccctgctgatttgcttgcaggtaaagctgcgcgtgatagcgttattacaaaagtggatgccgcttaa

SEQ ID NO: 35705 - protein, 818 aa, Alteromonadales bacterium TW-7
MTLIFTLGLIVLLCTAIYHRASWNTALGVSAATLLIGTFAGAFGLISWLIFLIIAVPLSVTGIRQQYIIKPIFTVFKKVTPSMSDTEKSAIDAGTTWWEADLFCGNPDWKKLHQYPVPKLTIEEQAFIDGPVEVVCSMLDDWEATHELTDLPQDVWQYLKDNKFFAMIIKKEYGGLEFSAFAQSCVLQKLTSKSTLLSSIVGVPNSLGPGELLQHYGTKEQKDHYLPRLASGQEIPCFALTSPEAGSDASSIPDYGVVCKGQWNGEEVVGISLTWNKRYITLAPVATVLGLAFKLQDPDGLLSDVKEPGITCALIPTDTPGVEIGRRHFPLNVPFQNGPTRGKDIFVPLDYIIGGPDMAGQGWRMLVECLSVGRAITLPSNSAGGIKMIATATGAYSRIRRQFRLPIGKMEGVEESMAKLAGYAYSSDAAVSMSTGAVDLGEKPSVVSAIIKYHLTEQMRDATIHAMDVLGGKGIMLGPNNYLGRGYQGAPIAITVEGANILTRNMIIYGQGAIRCHPFVLTELGACEIEDREEALNVFDKALMGHIGFTMSNLVRTKWLALTGARFTSVPYHDETAEFYRIASRFSASLALMSDISMAVFGGSLKRKERISARLGDLLSYLYLVSATLKRYNDEGRKKEDFALVQWSCQDHLYHCQRALADLINNMPSAPLRGVLKVLLFPFGRPVRKPTDKLEHKLAQILQVPSETRNRLASYVYLTNEPLNLVGRQEQTLKDVLEVEPLFERVCKEKGVKLPFFQLDKVAQMGLEAGILSQAEADKLAAVEQARLDVINVDDFDPADLLAGKAARDSVITKVDAA

SEQ ID NO: 35706 - DNA, 2448 bp, Pseudomonas putida GB-1
  CDS (1)..(2448): transl_table=11
atgttgctgttgtggttggtagtgctggtgatcggcgcggcatacctcacgcatcggcgcctggcgcccttgcagattctgggcatcatggcggcctacgtgctgctgatgggcattttcagcagtgcacccggctggttgctgaccctgatctggggggtactggccttgaaaatcgccctggttgcgctcccggactggcgccgcaaggtgttcaccgggccggttttcaactggttccagcgtaccttgccgcccatgtcgcaaaccgagcgcgaagcgatcgatgccggcacggtgtggtgggacggcgaactgttcagcggccgccccgactggcgtaccttgctggcctacccggcaccgaaactgaccgacgaagaacaggccttcatcgacggccccactgaagcgctgtgcgccatggtcagcgactggcagatcggtcaggacctggacctgccacccgaagcctggggtcacatcaagcagcatggcttcttcgccctgatcatccccaaggaatacggcggcaaaggcttttcggcctacgctcattcccaggtggcgatgaaactggccacccgcagcggcgatctcgcctccacggtgatggtgcccaactcgctcggcccggccgaattgctgctgcattacggcaccgacgaacaacgcaaccattacctgccacgccttgcccgcggcgacgagatcccctgctttgccctgaccggcccgttggccggctccgatgccggcgccatgcccgacaccggcatcatctgcaaaggccagtggaacggcgaagaagtgctgggcctgcggctgaactgggaaaagcgctatatcaccctgggcccggtcgcgaccttgctgggcctggccttcaaagcctacgacccggaccacctgttgggcgacgagcaggagctgggcatcagcctggccttgatccccaccgacacgcccggtgtcgaaatcggcaagcgccacctgccgctgggggccgccttcatgaacggccccaacagcggcaaggacgtgttcgtgccgctggacttcctgatcggtgggcaggccatgctcggcaagggctggatgatgctgatgaactgcctgtcggtaggccgttcgatttccctgcctgcggtcggcaccggcgcggccaagtacaccagcctggtcaccggccagtacgccaatatccgcgaacagttcaacgtgccactggccgctttcgaaggcatccaggaatcgctggcacgcattggcggcaacgcctggctgatggacagcgcccgcctgctgaccgccaaggccgtggacctcggtgaaaagccttcggtgctgtcggcgattctgaagtaccacctcaccgagcgcggccgcgaatgcatccagcacgccatggacgtgcacggcggcaaggccatcatcatggggccgaacaactacctggggcgcaactggcaaggggcaccgatcttcatcacggtcgaaggcgccaacatcctttcgcgcaacctgatgatcttcggccagggcgccatccgctgccatccgttcgtgctcaaggaaatggctttggtcggccgtgaggaccgtgaccaggcgctgcgggagttcgacgagctactgatgaggcacatcatgttcgccgccggcaacgcggccagcacgttggtgttcaacctggggctagggcgcttcgagtcggtaccgggtgatgcattgagccaagggtatttccgcgccctcaaccgccaggctgccgctttcgccctgctggccgacctgtcgatgatgctgctgggtggcgcgctcaagcgccgcgaacgcctgagtgcgcgcctgggcgatgtgctcagctacctgtacctgtccagcgccgcgctcaagcgctaccacgacctgggctcacccgagcacatgcagccactgctgcgctgggccatggaagaaagcctgggccaggcggaaaaggcgctggaccggctgctcgacaacttccccaaccgatttgtcggttgtgttctgcgcgtgctggtgttccccttcggccgccgccataccgggccgagcgatgagctggatgccgaagtggcggcgctgatcggccgcagcaagggcgacccggcgctggaggaattgctcgccggctgcttccgaccccaggccgagggtgacccggtggcagcattgcaacgggcctgcaacctactagacgagactgcgccactgcacaaagtgctgcatcaggcgcttaaggagggcaaggtacagccggcacctgggcagtcggccatcgatgcggcagtccagagtggtgcattacaggctgacgagggtcaacgcttacaggcggcggagcaggcacgccgggcagtgatcgatgtggatgccttcgacaaggcgcaactgcttccggagcagggcaaggtgcgatga

SEQ ID NO: 35707 - protein, 815 aa, Pseudomonas putida GB-1
MLLLWLVVLVIGAAYLTHRRLAPLQILGIMAAYVLLMGIFSSAPGWLLTLIWGVLALKIALVALPDWRRKVFTGPVFNWFQRTLPPMSQTEREAIDAGTVWWDGELFSGRPDWRTLLAYPAPKLTDEEQAFIDGPTEALCAMVSDWQIGQDLDLPPEAWGHIKQHGFFALIIPKEYGGKGFSAYAHSQVAMKLATRSGDLASTVMVPNSLGPAELLLHYGTDEQRNHYLPRLARGDEIPCFALTGPLAGSDAGAMPDTGIICKGQWNGEEVLGLRLNWEKRYITLGPVATLLGLAFKAYDPDHLLGDEQELGISLALIPTDTPGVEIGKRHLPLGAAFMNGPNSGKDVFVPLDFLIGGQAMLGKGWMMLMNCLSVGRSISLPAVGTGAAKYTSLVTGQYANIREQFNVPLAAFEGIQESLARIGGNAWLMDSARLLTAKAVDLGEKPSVLSAILKYHLTERGRECIQHAMDVHGGKAIIMGPNNYLGRNWQGAPIFITVEGANILSRNLMIFGQGAIRCHPFVLKEMALVGREDRDQALREFDELLMRHIMFAAGNAASTLVFNLGLGRFESVPGDALSQGYFRALNRQAAAFALLADLSMMLLGGALKRRERLSARLGDVLSYLYLSSAALKRYHDLGSPEHMQPLLRWAMEESLGQAEKALDRLLDNFPNRFVGCVLRVLVFPFGRRHTGPSDELDAEVAALIGRSKGDPALEELLAGCFRPQAEGDPVAALQRACNLLDETAPLHKVLHQALKEGKVQPAPGQSAIDAAVQSGALQADEGQRLQAAEQARRAVIDVDAFDKAQLLPEQGKVR

SEQ ID NO: 35708 - DNA, 2502 bp, Marinobacter sp. ELB17
  CDS (1)..(2502): transl_table=11
atgagtgttgtgcttctgttattgagcgcgctggtactgatttacctcagtattggcggaaagacagccagcgttgtgctgtgcgttgctacgctgattggcctggcccaggacgactggcatctggtcagctttatagtcggcgggcttgccctggctttggcgttaattctgctgaaccccagcgatctgcgtctcaataggttcagcagaccattgctgaactgggtacgctcacgcttgccacaattgtcagataccgaagccgaagcgctgaagtccggctcggtggactgggacggcgagctgttttccggcaagccacagtggtcaaaactgctgggcgcaaagccggcgcacctgaacagtgaagaacaggcgtttctggatggcccggtagaggaactctgcgccatgctggacgactgggaaatcacccacgagcattacgatttgcccgaaaaagtttgggcgttcatacgcggtaacggctttttcgggctggtcatacccaaaaaagacggcggcatggggttttctaacaccgcgcactcggaaatcgtgatgaaaatatccacccgcagcgtgtccactgcggtcaccgtgatggtgcccaactctcttgggcccggtgagctgttgatgcactatggtaccgatgcccaaaagcagcattatctgccgcgcttggccggcggccaggaaatcccctgttttgctctgacatcgccggtggcaggctcagatgccggcgctattccagacaaaggcattgtgtgcaaaggccagtggaagggcgaagaagtactgggtctgaaagtcacctggaacaagcgctacatcacgctagcgccggtggccaccctgattgggctggccatcaaagtgtatgatccagacgccctgttgggcgacaacgccgacatgggtgttacctgcgtgatggtgccgcgggaaaccgatggcgtacacgccggcgcccgccacttgccgatgaacacggtgttcatgaacggcccgacctggggcaacggcgtatttattcccatggaccaggtgatcggcggccaggacatgctgggcaaaggctggaccatgctgctggaatgcctgtccataggtcgttctatttcgctaccggctttgggcacaggcgccggcaaagttgccagcctggccaccggttcttacgccctgacccgagaacaattcggccgctctatcagccagtttgagggcgtgcaagaagcgctggaacccatcgccggttacacctggatgatggacgctgcgcgcttgctcacggcaggtatgctagaccgcggtgtacgcccggccgtgccttctgcgctgctgaaataccgcaacaccgacctgatgcgcattgtgatcaaccacgccatggacgtcgttgccggccgcggcgttattaccgggccacgcaacttcctggcccgcgcctaccaagctatacccatcggtatcaccgtagaaggcgccaacattcttacccgcagcctgatggtatttggccaaggcgccatccgctgccatccgtttattgttgacgaaatcgctgcggctggcatggaagaccaaaatcaggccgccaaaaagttcgatggcgttttctacagccacctggcacacaccacccgcaacggtttgcgcgcactggtgctgggcctgaccggcggcctggccgaaccggtgccgcgccaaggcaacctgaaaccttactaccgccaactggcgcgcttttcggcggcccttgcgctgatgaccgatgttacgctgctttccgtaggcggcggcctgaaggctcgccagcgcctgtccgggcgcatggccgactgcctggtacagctgtattacgccaccgcagtgatcaaacaatggcacgaagaaggctatccggaagaacagcgccacatggtggaatggtgcctgaaaacctgcctgcgcgatttacaggattccatgcgtgaagccatcatcaacttcccggttccagccctgcgctggcccctgcgattgttggtgttccccttgggcgcgacggggctgaatggccccgacgaccgcctgggcaccaaagtggccgccagcattgtagaggacacaccgctgcgccagcgcattcaccgcggcgcctatatacccacagacagcagcgactctctgggcagggtgttgaacgcctaccgtctggccaacgaaaccaccgacatgcgcgctcgcttgcaccaagctattcgagaccgcgatgaagacgacctggacggcattgccctgctgatgggccacgaacgcaaacagctggtcgactgggcctgcgcccaaggcgtagtgaaagccaatgagtgcgaaaaactggaagaggcactcaccgcgctctacgacgttattcgcgtggatgcgtttgacagcgacggcctgaaagagctgtcaaagtgcgccactggcaaacgcaaagtggtcgaacgccccgcaggacactga

SEQ ID NO: 35709 - protein, 833 aa, Marinobacter sp. ELB17
MSVVLLLLSALVLIYLSIGGKTASVVLCVATLIGLAQDDWHLVSFIVGGLALALALILLNPSDLRLNRFSRPLLNWVRSRLPQLSDTEAEALKSGSVDWDGELFSGKPQWSKLLGAKPAHLNSEEQAFLDGPVEELCAMLDDWEITHEHYDLPEKVWAFIRGNGFFGLVIPKKDGGMGFSNTAHSEIVMKISTRSVSTAVTVMVPNSLGPGELLMHYGTDAQKQHYLPRLAGGQEIPCFALTSPVAGSDAGAIPDKGIVCKGQWKGEEVLGLKVTWNKRYITLAPVATLIGLAIKVYDPDALLGDNADMGVTCVMVPRETDGVHAGARHLPMNTVFMNGPTWGNGVFIPMDQVIGGQDMLGKGWTMLLECLSIGRSISLPALGTGAGKVASLATGSYALTREQFGRSISQFEGVQEALEPIAGYTWMMDAARLLTAGMLDRGVRPAVPSALLKYRNTDLMRIVINHAMDVVAGRGVITGPRNFLARAYQAIPIGITVEGANILTRSLMVFGQGAIRCHPFIVDEIAAAGMEDQNQAAKKFDGVFYSHLAHTTRNGLRALVLGLTGGLAEPVPRQGNLKPYYRQLARFSAALALMTDVTLLSVGGGLKARQRLSGRMADCLVQLYYATAVIKQWHEEGYPEEQRHMVEWCLKTCLRDLQDSMREAIINFPVPALRWPLRLLVFPLGATGLNGPDDRLGTKVAASIVEDTPLRQRIHRGAYIPTDSSDSLGRVLNAYRLANETTDMRARLHQAIRDRDEDDLDGIALLMGHERKQLVDWACAQGVVKANECEKLEEALTALYDVIRVDAFDSDGLKELSKCATGKRKVVERPAGH

SEQ ID NO: 35710 - DNA, 2475 bp, Marinobacter sp. ELB17
  CDS (1)..(2475): transl_table=11
atgacgttcatactctttgtagtggcgatagccagcttattggtggtgatgcgccaggaagccggagccaagactgcggtgggtgttatggtcggagtgggcttggtgtcgctactgtttgcatcgttctggctggctcttttgctgtttatcggcgccggcattacggccgctgccggcttgccgggttttcgtcgcagttggttaacgcccaaagcctttgccctgttcaagaaagttgccccgaaagtgtctgaaacggaaaaagtagcgctggaagcgggcacggtaagttgggacggcgaattgtttactggcaaacccgactggcacaacctgttgataaaccgtaacaccggcctgacggataaagaacaggcgtttttggataatcagtgcaaccaggcgctggccatgtgcaatgcctgggacatagccgtagagcgggccgacctgccggaagagttgtgggacttcctcaagcgcgaaaagttcttcggcatgattatccctgaagaatacggtggtctgggattttctgcgaaagctcagactgccgtgctgcagcgcctggccgttaacgaaatgctgatggtaaccgttggcgtgcccaattcccttgggcccggcgagctgcttataaaatacggcaccgatgaacaaaaagaatattatttgccgcgcctggctgacggccgcgacataccctgttttggcctgaccggcccgcgcgcgggttccgacgccacctcattaccggataccggtattgtgtgtaagcaggaagttaacggcaaagaagtgattggtttgcggctgaatttcgagaaacgctggattaccctggcgccgatcgccacggtggtgggcctggccttccgcatgtttgaccccgatggcttgctcagcgatgttgaagaccgcggcattacctgcgcattgattccccgtgataccgatggtatggaaatcggccgtcgccattgcccaataggaagcccgttcctgaacggcccgattattggcaaagacatgttcattccgctggactacctgatcggtggtgaaaaaatggccggcgagggctggcgcatgctggtggaatgtttgtcggtgggccgctgcattacgctgccgtctggcgctgccggtggggctgctttcgcggtggccacggccggtggttttacccggataaggcgtcagttcaatacgcccatagcagaaatggaaggtgtgcagcagccgctggcgcggattgctgccaaaacgtacattgcccaagcggcggttaaccataccgccaacatgattgaccaaggccagaaaccggcggtgccgtcggcgattctgaagtaccatttgaccgagtatcagcgcgacattctcagcgatgcgatggacgttcacggcggtaaaacggttacccttggcccacgcaattacatgggtatttcattcagtggttcggcggtgtctattaccgttgagggcgctaacataatgacccgcagcctgatgatctttggccaaggcgccattcgctgccacccgtacgtgttaaaagagctggcggcgaaagacaacgacgacatcgatgcctttgacgaagcttttttcggtcacgtcgggctggtatttggcaacgctgcccgtgcctttacccaggccttgggtattggccgcgcagacgtgccgtttgatcacggtgcgcgtaaatacgcccagtctgtggcccgcttcagcgccgcttttgggctgtgttccgacgcggccatgaccaccctgggcagtgagctgaaaatgcgcgaactgacctctgcgcgtttgggtgacatgctgtcgaatctgtatttggcctctatggtgctcaagcattggcacgaaacccagccggtggacggcgagcaagcactcatggcctacagcctggacatgctgctggcgcgtacggaaacggcgttggtggaattccttgataacttgcccaatcgtttagtagccggtgcgctgcgggtagtaaccttacccatcggccggcgctggacaggcccaagtgatgccctgacccacaccgtggcaaaggccatttcaacggattcgccgctgcggaaaaagctgttgtccagcctttgggtgggtgaaggtgaaaacggcgtcgacgccgttgtttccaaccccgtggccagttataacaacttgctaaaagacaacgccaaagctgagacgctctatcgcaaggccagcaaagcctacagcaagggcgaactgccgataaccgctttacacccggaacagcgttttgaagcggctttggaagcgggcgtgttcagtaacgaagacgcaatcttcatgcgcgattatgaagcaaaggtgctggaaatgctgacagtggacgactttgcctttgacgaattcgcccgcaataaaagctcggtgattgaccacaattcgtttgaggcgaagtcctcttga

SEQ ID NO: 35711 - protein, 824 aa, Marinobacter sp. ELB17
MTFILFVVAIASLLVVMRQEAGAKTAVGVMVGVGLVSLLFASFWLALLLFIGAGITAAAGLPGFRRSWLTPKAFALFKKVAPKVSETEKVALEAGTVSWDGELFTGKPDWHNLLINRNTGLTDKEQAFLDNQCNQALAMCNAWDIAVERADLPEELWDFLKREKFFGMIIPEEYGGLGFSAKAQTAVLQRLAVNEMLMVTVGVPNSLGPGELLIKYGTDEQKEYYLPRLADGRDIPCFGLTGPRAGSDATSLPDTGIVCKQEVNGKEVIGLRLNFEKRWITLAPIATVVGLAFRMFDPDGLLSDVEDRGITCALIPRDTDGMEIGRRHCPIGSPFLNGPIIGKDMFIPLDYLIGGEKMAGEGWRMLVECLSVGRCITLPSGAAGGAAFAVATAGGFTRIRRQFNTPIAEMEGVQQPLARIAAKTYIAQAAVNHTANMIDQGQKPAVPSAILKYHLTEYQRDILSDAMDVHGGKTVTLGPRNYMGISFSGSAVSITVEGANIMTRSLMIFGQGAIRCHPYVLKELAAKDNDDIDAFDEAFFGHVGLVFGNAARAFTQALGIGRADVPFDHGARKYAQSVARFSAAFGLCSDAAMTTLGSELKMRELTSARLGDMLSNLYLASMVLKHWHETQPVDGEQALMAYSLDMLLARTETALVEFLDNLPNRLVAGALRVVTLPIGRRWTGPSDALTHTVAKAISTDSPLRKKLLSSLWVGEGENGVDAVVSNPVASYNNLLKDNAKAETLYRKASKAYSKGELPITALHPEQRFEAALEAGVFSNEDAIFMRDYEAKVLEMLTVDDFAFDEFARNKSSVIDHNSFEAKSS

SEQ ID NO: 35712 - DNA, 2340 bp, Oryza sativa subsp
  CDS (1)..(2340)
atggcggtggcccacctgtggacgccgtggctgctgttgccgctggcgatcatcctgctgccgctgaacctgaccagcctgcgccgcaaactgttttccaaaccggtgctgcagcgctttcagcaggtcatgccgccgatgtctcgtacggaaaaagaggcgattgacgcgggcacaacctggtgggaaggcgatctgtttcagggcaaacctgactggcagaaactgcacaactacccgcaaccgcgcctgacggcggaagaacaggcctttattgatggcccggtggaagaagcctgccgcatggcgaatgatttccagatcacccatgaactggcggatatgccgccagagttgtgggcctatctgaaagagcaccgcttcttcgccatgatcattaaaaaagagtacggcggactggcattctccgcctatgcccaggcacgcgtgttgcaaaaactgtcgggcgtatcgggtattctggcgattaccgtgggggtgcctaactcactgggtccgggcgaactgctgcaacattacggaacggaaaaacagaaagaccattatttgccgcgtctggcgcggggcgatgagattccctgtttcgcccttaccagcccggaagcgggttccgatgccggggcaatccccgataccggcgtcgtttgcatgggcgaatggcagggccagcaggtgctgggcatgcgactgacctggaacaagcgctatatcacgttagccccaatcgccaccgtactgggtctggcctttaagctttccgaccccgagcacctgctgggcgagaaagaggaactgggcattacctgtgccctgatcccaaccagcacgccgggcgtggaaatcggtcatcgccacttcccgctcaacgtaccgttccagaatggtccaacccgtgggaaagacatttttgtccccattgatttcatcattggcggcccggaaatggccggtcagggctggcggatgctggtggaatgtctgtccgtcggccgtggcatcacgctgccgtcaaactcaaccggtagcctgaaaacggtggcactggcgaccggcgcctatgcgcacatccgtcgtcagttcaagctgtctatcggtaaaatggaaggtattgaagagccgctggcgcgcatcgcaggtaatgcctatgtaatggacgcggccgctacgctaatcaccaccgggattatgcagggtgaaaaacccgcggtgctgtcagccatcgtcaaatatcactgtacccatcgcgctcaacagtcaattatcgatgcgatggatatcgcgggtggtaagggcatcatgctgggtgacagcaacttcctggcgcgtgcctatcagggtgcgcccatcgctatcaccgtggaaggcgcgaacattctgacccgcagcatgattatctttggtcagggggcaattcgttgccatccttatgtcctgcaggaaatggccgccgccgccagcaacgatgttgccgccttcgataacgcgctgtttagccatattggtcacgttggcagcaacgcgacgcgcagcctgtggctgggcctgctgggcggtcgcaccagcgccgcgccaacccgcgatgtaacgcgtcgatattatcagcacatgaaccgcattagtgccaacctggccttgctgtcagatgtctctatggcggtcttaggcggcagcctgaaacgtcgcgaacggatgtctgctcgcctgggtgatgtgctgagtcagctctacctggcgtctgccactctgaaacgctatgacgatgaaggacgccacgaagccgatttaccgctggtgcactggggcgtgcaggatgcactgaataaagcagagaaagccatggacgatctgctgagtaacttcccgaaccgcctggtggctggcgttattcgactgatggtgtttgccggtggtcagcactgccctgcaccgtccgatcgtcttgatcacaaactggcaaaaatgctgcaggtgccttcggcgacgcgtacgcgtttaggtcgtggtcagtatcttgcgccgagccagcataatcctgcaggtcagttagagcaggcattgcaggacgtgatggcggcggaagtgattcacgaccgcctgtgcaagcagcataaaaaacacttctcattcacccgactggatgcgctggctaaacaggcgttggaacagggctggattgacgacaaagaagctgaagtgctgaaacgcgccgagcagagccgtctgcgttccattaacgtggatgagtttgaggctgatgcgctggccgtgccggcaaagcaggatgtctcaaaacccgcccgccccagtgaggcggcataa

SEQ ID NO: 35713 - protein, 779 aa, Oryza sativa subsp
MAVAHLWTPWLLLPLAIILLPLNLTSLRRKLFSKPVLQRFQQVMPPMSRTEKEAIDAGTTWWEGDLFQGKPDWQKLHNYPQPRLTAEEQAFIDGPVEEACRMANDFQITHELADMPPELWAYLKEHRFFAMIIKKEYGGLAFSAYAQARVLQKLSGVSGILAITVGVPNSLGPGELLQHYGTEKQKDHYLPRLARGDEIPCFALTSPEAGSDAGAIPDTGVVCMGEWQGQQVLGMRLTWNKRYITLAPIATVLGLAFKLSDPEHLLGEKEELGITCALIPTSTPGVEIGHRHFPLNVPFQNGPTRGKDIFVPIDFIIGGPEMAGQGWRMLVECLSVGRGITLPSNSTGSLKTVALATGAYAHIRRQFKLSIGKMEGIEEPLARIAGNAYVMDAAATLITTGIMQGEKPAVLSAIVKYHCTHRAQQSIIDAMDIAGGKGIMLGDSNFLARAYQGAPIAITVEGANILTRSMIIFGQGAIRCHPYVLQEMAAAASNDVAAFDNALFSHIGHVGSNATRSLWLGLLGGRTSAAPTRDVTRRYYQHMNRISANLALLSDVSMAVLGGSLKRRERMSARLGDVLSQLYLASATLKRYDDEGRHEADLPLVHWGVQDALNKAEKAMDDLLSNFPNRLVAGVIRLMVFAGGQHCPAPSDRLDHKLAKMLQVPSATRTRLGRGQYLAPSQHNPAGQLEQALQDVMAAEVIHDRLCKQHKKHFSFTRLDALAKQALEQGWIDDKEAEVLKRAEQSRLRSINVDEFEADALAVPAKQDVSKPARPSEAA

SEQ ID NO: 35714 - DNA, 2445 bp, Escherichia coli
  CDS (1)..(2445): transl_table=11
atgatgattttgagtattctcgctacggttgtcctgctcggcgcgttgttctatcaccgcgtgagcttatttatcagcagtctgattttgctcgcctggacagccgccctcggcgttgctggtctgtggtcggcgtgggtactggtgcctctggccattatcctcgtgccatttaactttgcgcctatgcgtaagtcgatgatttccgcgccggtatttcgcggtttccgtaaggtgatgccgccgatgtcgcgcactgagaaagaagcgattgatgcgggcaccacctggtgggagggcgacttgttccagggcaagccggactggaaaaagctgcataactatccgcagccgcgcctgaccgccgaagagcaagcgtttctcgacggcccggtagaagaagcctgccggatggcgaatgatttccagatcacccatgagctggcggatctgccgccggagttgtgggcgtaccttaaagagcatcgtttcttcgcgatgatcatcaaaaaagagtacggcgggctggagttctcggcttatgcccagtctcgcgtgctgcaaaaactctccggcgtgagcgggatcctggcgattaccgtcggcgtgccaaactcattaggcccgggcgaactgttgcaacattacggcactgacgagcagaaagatcactatctgccgcgtctggcgcgtggtcaggagatcccctgctttgcactgaccagcccggaagcgggttccgatgcgggcgcgattccggacaccgggattgtctgcatgggcgaatggcagggccagcaggtgctggggatgcgtctgacctggaacaaacgctacattacgctggcaccgattgcgaccgtgcttgggctggcgtttaaactctccgacccggaaaaattactcggcggtgcagaagatttaggcattacctgtgcgctgatcccaaccaccacgccgggcgtggaaattggtcgtcgccacttcccgctgaacgtaccgttccagaacggaccgacgcgcggtaaagatgtcttcgtgccgatcgattacatcatcggcgggccgaaaatggccgggcaaggctggcggatgctggtggagtgcctctcggtaggccgcggcatcaccctgccttccaactcaaccggcggcgtgaaatcggtagcgctggcaaccggcgcgtatgctcacattcgccgtcagttcaaaatctctattggtaagatggaagggattgaagagccgctggcgcgtattgccggtaatgcctacgtgatggatgctgcggcatcgctgattacctacggcattatgctcggcgaaaaacctgccgtgctgtcggctatcgttaagtatcactgtacccaccgcgggcagcagtcgattattgatgcgatggatattaccggcggtaaaggcattatgctcgggcaaagcaacttcctggcgcgtgcttaccagggcgcaccgattgccatcaccgttgaaggggctaacattctgacccgcagcatgatgatcttcggacaaggagcgattcgttgccatccgtacgtgctggaagagatggaagcggcgaagaacaatgacgtcaacgcgttcgataaactgttgttcaaacatatcggtcacgtcggtagcaacaaagttcgcagcttctggctgggcctgacgcgcggtttaaccagcagcacgccaaccggcgatgccactaaacgctactatcagcacctgaaccgcctgagcgccaacctcgccctgctttctgatgtctcgatggcagtgctgggcggcagcctgaaacgtcgcgagcgcatctcggcccgtctgggggatattttaagccagctctacctcgcctctgccgtgctgaagcgttatgacgacgaaggccgtaatgaagccgacctgccgctggtgcactggggcgtacaagatgcgctgtatcaggctgaacaggcgatggatgatttactgcaaaacttcccgaaccgcgtggttgccgggctgctgaatgtggtgatcttcccgaccggacgtcattatctggcaccttctgacaagctggatcataaagtggcgaagattttacaagtgccgaacgccacccgttcccgcattggtcgcggtcagtacctgacgccgagcgagcataatccggttggcttgctggaagaggcgctggtggatgtgattgccgccgacccaattcatcagcggatctgtaaagagctgggtaaaaacctgccgtttacccgtctggatgaactggcgcacaacgcgctggtgaaggggctgattgataaagatgaagccgctattctggtgaaagctgaagaaagccgtctgcgcagtattaacgttgatgactttgatccggaagagctggcgacgaagccggtaaagttgccggagaaagtgcggaaagttgaagccgcgtaa

SEQ ID NO: 35715 - protein, 814 aa, Escherichia coli [sequence omitted]

SEQ ID NO: 35716 - DNA, 2445 bp, Salmonella typhimurium
  CDS (1)..(2445): transl_table=11
atgatgattttgagtattatcgctacggttgttctgctcggcgcattgttctatcaccgcgtgagtttatttctcagcagcctgattctgctcgcctggaccgccgcacttggcgtcgctggcctgtggtccatctggctgttggttcctctggccattatcctcgtgccgtttaacctcacaccgatgcgaaaatcaatgatttccgcaccggtgttccgcggcttccgtaaggtcatgccgccgatgtcgcgcactgagaaagaagcgattgatgccggtacaacctggtgggaaggcgatctgttccagggcaagcctgactggaaaaaactgcacaactatccgcaaccgcaactcactgccgaagagcaagcgtttctcgacggtccggtagaagaagcgtgccggatggcgaacgatttccagattacccatgaactggcggatctgccgccggaactgtgggcttatctgaaagagcatcgtttttttgcgatgatcattaaaaaagagtacggcggactggagttctccgcttatgcgcagtcccgtgtactgcaaaaactgtccggcgtctccgggattctggctatcaccgtcggcgttccaaactcactcggccctggcgagttgttgcagcactatggtacggaagagcagaagaatcactatctgccgcgactggcgcgcggccaggagatcccctgctttgcgctgaccagcccggaagcaggttctgatgcaggcgccattccggataccggcgtggtttgcatgggcgaatggcagggccagcaggtgctgggtatgcgcctgacctggaacaagcgttacattacgctggcaccgatagctaccgtgttgggcctggcgtttaagctttccgatccggatagattgttaggcggagaagaagagctgggtattacctgtgccctgatccccacctcaacgccgggtgtggaaattggtcgtcgtcacttcccgcttaacgttccgttccagaatggtccaacccgcggtaacgatattttcgtgcctattgattatattatcggcggccccaaaatggccggacaaggctggcgtatgctggtggaatgtttgtcggtaggacgcggtattaccctgccgtccaactccactggcggggtgaaatccgtcgcgctggcaaccggcgcctatgctcacattcgtcgtcagttcaaaatatctatcggcaagatggaaggtattgaggaaccgctggcgcgtattgcaggtaacgcttatgtgatggatgccgccgcatcgttaatcacctatggcattatgctgggtgaaaaaccggcggtactgtcggctatcgtgaagtaccactgcacccaccgtggccagcagtccattatcgacgcgatggatatcactgggggtaaaggcattatgctgggcgagagcaacttcctggcgcgtgcttaccagggcgcgcctatcgcgatcaccgtggaaggcgcgaatatcctgacccgtagcatgatgatctttggtcagggcgccattcgctgccatccttatgtactggaagagatggccgcagcgcagaataatgatgtgaatgcctttgataagctgttgtttaaacatatcggccatgtcggcagcaataccgtccgcagtttctggcttggcctgacccgcggattaacgagccatacgccaaccggcgacgccacgaagcgttattaccagcatctgaaccgactgagcgcaaacctggcgctgctgtctgacgtgtcaatggcggtactgggcggcagcctgaaacgccgcgagcgtatctccgcgcgtctgggcgatgtgttgagtcagctttatctggcctcagccgtactgaagcgttacgacgacgaaggtcgccacgaagccgacctgccgctggtgcactggggcgtacaggatgcgctgtatcgtgctgaacaagcgatggacgatctgctgcagaacttcccgaaccgcgtcgtggccggattgctcaccgcgatgatcttcccgactggccgtcattatctggcgccgtctgataagctggatcacgccgtggcgaagatcctacaggtgccgaacgccacacgttcacgcattgggcgcggtcagtatctgacgcccgccgaacataatccggtcggtttactggaagaagcgctgcgtgatgtcatcgctgccgaccctatccaccagcgcatctgcaaagaactgggtaaaaatctgccgtttactcgtctggatgaactggcgcgcaatgcgctggcgaaagggcttatagataaagatgaagccgccatcctggcgaaagcggaagagagccgcctgcgcagtatcaacgttgatgattttgaacctgaagcgctggcgaccaaaccggtaaagctgccggagaaagtgcgtaaagtcgaagccgcataa

SEQ ID NO: 35717 - protein, 814 aa, Salmonella typhimurium
MMILSIIATVVLLGALFYHRVSLFLSSLILLAWTAALGVAGLWSIWLLVPLAIILVPFNLTPMRKSMISAPVFRGFRKVMPPMSRTEKEAIDAGTTWWEGDLFQGKPDWKKLHNYPQPQLTAEEQAFLDGPVEEACRMANDFQITHELADLPPELWAYLKEHRFFAMIIKKEYGGLEFSAYAQSRVLQKLSGVSGILAITVGVPNSLGPGELLQHYGTEEQKNHYLPRLARGQEIPCFALTSPEAGSDAGAIPDTGVVCMGEWQGQQVLGMRLTWNKRYITLAPIATVLGLAFKLSDPDRLLGGEEELGITCALIPTSTPGVEIGRRHFPLNVPFQNGPTRGNDIFVPIDYIIGGPKMAGQGWRMLVECLSVGRGITLPSNSTGGVKSVALATGAYAHIRRQFKISIGKMEGIEEPLARIAGNAYVMDAAASLITYGIMLGEKPAVLSAIVKYHCTHRGQQSIIDAMDITGGKGIMLGESNFLARAYQGAPIAITVEGANILTRSMMIFGQGAIRCHPYVLEEMAAAQNNDVNAFDKLLFKHIGHVGSNTVRSFWLGLTRGLTSHTPTGDATKRYYQHLNRLSANLALLSDVSMAVLGGSLKRRERISARLGDVLSQLYLASAVLKRYDDEGRHEADLPLVHWGVQDALYRAEQAMDDLLQNFPNRVVAGLLTAMIFPTGRHYLAPSDKLDHAVAKILQVPNATRSRIGRGQYLTPAEHNPVGLLEEALRDVIAADPIHQRICKELGKNLPFTRLDELARNALAKGLIDKDEAAILAKAEESRLRSINVDDFEPEALATKPVKLPEKVRKVEAA

SEQ ID NO: 35718 - DNA, 2448 bp, Yersinia pestis
  CDS (1)..(2448): transl_table=11
atgatagttcttagcattattgccttactggttcttattagtgtgttgttctatcaccgggtgaacctttatctcagcagtttaattcttctggtttacaccgccgctttgagcgcatcgcagttatggtcattctgggtattattgccactggtgattatgctgttgccactgatcctaacgccgctgcgcaagtcactgttttctgcgccagcattacggattttccgtagcgtcatgcctgctatgtcgcgtacagaaaaagaagcgatcgatgcagggactacctggtgggaaggtgatttgttccgaggggctcctgactggaaaaaattacataactatccaaaaccgcaattaaccgccgaagagcaagcctttatcgatgggccggttgaagaagcctgccgtatggctaatgacttccagataacccatgaactggctgatttgccaccagaattatgggattacctgaaagaaaaacgcttcttcgcgatgatcattaagaaagaatatggtggccttgagttttctgcttatgctcaggcccgcgtgttacagaaactagctggggtctcaggtattctggccatcaccgttggcgtgccaaattcccttggcccaggtgaattactgcaacattacggcactgaagagcaaaaaaatcattatctgccaagattagcccggggtgacgagatcccttgttttgcactaaccagcccggaagctggttctgatgccggtgcgatccctgatgttggtattgtctgtatgggcgagtggcaaggtaaacaggttctcggcatgcgcctaacctggaacaagcgctatattacgctggcccccatcgcgacggttctggggctggccttcaaattatcggaccccgaacacttactgggcgatacggtagacttggggattacctgtgcactgatcccaacccatacaccaggagtagagatcgggcatcgtcacttcccgctcaatataccgttccaaaatggccctacccgtggtaacgatatttttgtccccattgattacatcatcggcggccctcaaatggccggtcaaggctggcggatgctggtggaatgcctgtctgtggggcgtggaatcaccttgccttccaatgccactggtagcctgaaaagtgtggcgatggggatcggtgcttacgcttatattcgccgtcaattcaaaatctccatcggtaagatggaggggattgaagagccactggcgcggatcgccggtaacacttatgtgatggatgcagccgcaaccttaatcaccagcggcattatgatgggcgagaaaccagccgtcttgtctgccattgttaaatatcactgtacacaccgtggtcaacgcgccgtgatggatgccatggatatcgccggtggtaaagggatctgtcttggccccgctaactttgtcgcccgtggttatcagggcgcacccatcggtatcactgtcgaaggcgcaaatattctgacccgtagtatgattatctttggtcagggtgctatccgttgccatccatttgttctcgatgagatggcggctgcgcaatccaatgacgttgccgctttcgataaagccctgtttggtcacttgggccacgtcggtagtagtatggtacgcagcttctggctgggcctgaccaatggccgcaccagtgcaacaccagtcaaagacagcacccggcgttattatcaacagctaaaccgtctgagcgctaacttggccttgctgtctgatgtttcaatgggcgtgctgggtggtagcctaaaacgtcgcgaacgtatctctgcccgtttgggtgatatcctcagccaactgtatttagcatccgccacactgaaacgctatgaagatgaaggccgtcagaaagaggatctgccgttggtacattggggggtacaagatgctctgtatcaggccgaacaagcactggatgacttgctgcgtaacttcccgaatagcgtgattgctggattgatgcgtgtcgtggtcttcccattgggccgtgtacatcgggcaccgtccgatcatctggatcaccagttggcgcaattgctacaagttccatcagccacccgtagccgtatcggccgtggtcagtacctgacgccaagtgaatttaacccggtagggttattggaagcggccttgctggatgtgattgccgcagaaccgattcacaaacgcctgagtaaagaagcgggtaagagcctgccctttactcgcttggatcagttagctaaacacgccttggcagaagggaaaatcagcgccgaagaggccgcgttgctgactaaagcagaaaacagccgcctgcgttctattaatgtggatgagtttgacgccagcgccttggcagcaaacccagtagtcaaaaaaccggctaaacagcagcaaactgaagccgcatga

SEQ ID NO: 35719 - protein, 815 aa, Yersinia pestis
MIVLSIIALLVLISVLFYHRVNLYLSSLILLVYTAALSASQLWSFWVLLPLVIMLLPLILTPLRKSLFSAPALRIFRSVMPAMSRTEKEAIDAGTTWWEGDLFRGAPDWKKLHNYPKPQLTAEEQAFIDGPVEEACRMANDFQITHELADLPPELWDYLKEKRFFAMIIKKEYGGLEFSAYAQARVLQKLAGVSGILAITVGVPNSLGPGELLQHYGTEEQKNHYLPRLARGDEIPCFALTSPEAGSDAGAIPDVGIVCMGEWQGKQVLGMRLTWNKRYITLAPIATVLGLAFKLSDPEHLLGDTVDLGITCALIPTHTPGVEIGHRHFPLNIPFQNGPTRGNDIFVPIDYIIGGPQMAGQGWRMLVECLSVGRGITLPSNATGSLKSVAMGIGAYAYIRRQFKISIGKMEGIEEPLARIAGNTYVMDAAATLITSGIMMGEKPAVLSAIVKYHCTHRGQRAVMDAMDIAGGKGICLGPANFVARGYQGAPIGITVEGANILTRSMIIFGQGAIRCHPFVLDEMAAAQSNDVAAFDKALFGHLGHVGSSMVRSFWLGLTNGRTSATPVKDSTRRYYQQLNRLSANLALLSDVSMGVLGGSLKRRERISARLGDILSQLYLASATLKRYEDEGRQKEDLPLVHWGVQDALYQAEQALDDLLRNFPNSVIAGLMRVVVFPLGRVHRAPSDHLDHQLAQLLQVPSATRSRIGRGQYLTPSEFNPVGLLEAALLDVIAAEPIHKRLSKEAGKSLPFTRLDQLAKHALAEGKISAEEAALLTKAENSRLRSINVDEFDASALAANPVVKKPAKQQQTEAA

SEQ ID NO: 35720 - DNA, 24 bp, Artificial sequence
  primer
atggtcagacctcctacaagtaag

SEQ ID NO: 35721 - DNA, 22 bp, Artificial sequence
  primer
ttacgcggcttcaactttccgc

SEQ ID NO: 35722 - protein, 776 aa, Artificial sequence
  consensus sequence
  Variant (2)..(16): Xaa in position 2 to 16 is any amino acid
  Variant (17)..(19): Xaa in position 17 to 19 is any or no amino acid
  Variant (21)..(22): Xaa in position 21 to 22 is any amino acid
  Variant (24)..(24): Xaa in position 24 is any amino acid
  Variant (27)..(28): Xaa in position 27 to 28 is any amino acid
  Variant (30)..(31): Xaa in position 30 to 31 is any amino acid
  Variant (34)..(35): Xaa in position 34 to 35 is any amino acid
  Variant (38)..(40): Xaa in position 38 to 40 is any amino acid
  Variant (43)..(43): Xaa in position 43 is any amino acid
  Variant (45)..(45): Xaa in position 45 is any amino acid
  Variant (47)..(47): Xaa in position 47 is any amino acid
  Variant (49)..(50): Xaa in position 49 to 50 is any amino acid
  Variant (52)..(57): Xaa in position 52 to 57 is any amino acid
  Variant (58)..(58): Xaa in position 58 is any or no amino acid
  Variant (60)..(62): Xaa in position 60 to 62 is any amino acid
  Variant (65)..(65): Xaa in position 65 is any amino acid
  Variant (67)..(67): Xaa in position 67 is any amino acid
  Variant (69)..(74): Xaa in position 69 to 74 is any amino acid
  Variant (76)..(87): Xaa in position 76 to 87 is any amino acid
  Variant (88)..(88): Xaa in position 88 is any or no amino acid
  Variant (92)..(94): Xaa in position 92 to 94 is any amino acid
  Variant (96)..(102): Xaa in position 96 to 102 is any amino acid
  Variant (104)..(106): Xaa in position 104 to 106 is any amino acid
  Variant (109)..(109): Xaa in position 109 is any amino acid
  Variant (111)..(111): Xaa in position 111 is any amino acid
  Variant (115)..(116): Xaa in position 115 to 116 is any amino acid
  Variant (120)..(120): Xaa in position 120 is any amino acid
  Variant (122)..(122): Xaa in position 122 is any amino acid
  Variant (124)..(127): Xaa in position 124 to 127 is any amino acid
  Variant (129)..(131): Xaa in position 129 to 131 is any amino acid
  Variant (132)..(132): Xaa in position 132 is any or no amino acid
  Variant (134)..(138): Xaa in position 134 to 138 is any amino acid
  Variant (141)..(141): Xaa in position 141 is any amino acid
  Variant (149)..(149): Xaa in position 149 is any amino acid
  Variant (153)..(153): Xaa in position 153 is any amino acid
  Variant (158)..(159): Xaa in position 158 to 159 is any amino acid
  Variant (161)..(164): Xaa in position 161 to 164 is any amino acid
  Variant (170)..(170): Xaa in position 170 is any amino acid
  Variant (172)..(173): Xaa in position 172 to 173 is any amino acid
  Variant (181)..(181): Xaa in position 181 is any amino acid
  Variant (183)..(183): Xaa in position 183 is any amino acid
  Variant (189)..(191): Xaa in position 189 to 191 is any amino acid
  Variant (194)..(194): Xaa in position 194 is any amino acid
  Variant (196)..(196): Xaa in position 196 is any amino acid
  Variant (199)..(199): Xaa in position 199 is any amino acid
  Variant (201)..(203): Xaa in position 201 to 203 is any amino acid
  Variant (205)..(206): Xaa in position 205 to 206 is any amino acid
  Variant (207)..(213): Xaa in position 207 to 213 is any or no amino acid
  Variant (217)..(220): Xaa in position 217 to 220 is any amino acid
  Variant (221)..(221): Xaa in position 221 is any or no amino acid
  Variant (223)..(223): Xaa in position 223 is any amino acid
  Variant (232)..(232): Xaa in position 232 is any amino acid
  Variant (235)..(236): Xaa in position 235 to 236 is any amino acid
  Variant (241)..(243): Xaa in position 241 to 243 is any amino acid
  Variant (246)..(247): Xaa in position 246 to 247 is any amino acid
  Variant (251)..(255): Xaa in position 251 to 255 is any amino acid
  Variant (256)..(257): Xaa in position 256 to 257 is any or no amino acid
  Variant (261)..(261): Xaa in position 261 is any amino acid
  Variant (264)..(264): Xaa in position 264 is any amino acid
  Variant (266)..(269): Xaa in position 266 to 269 is any amino acid
  Variant (272)..(273): Xaa in position 272 to 273 is any amino acid
  Variant (275)..(275): Xaa in position 275 is any amino acid
  Variant (278)..(278): Xaa in position 278 is any amino acid
  Variant (280)..(282): Xaa in position 280 to 282 is any amino acid
  Variant (283)..(283): Xaa in position 283 is any or no amino acid
  Variant (285)..(285): Xaa in position 285 is any amino acid
  Variant (289)..(290): Xaa in position 289 to 290 is any amino acid
  Variant (292)..(292): Xaa in position 292 is any amino acid
  Variant (294)..(294): Xaa in position 294 is any amino acid
  Variant (296)..(296): Xaa in position 296 is any amino acid
  Variant (298)..(298): Xaa in position 298 is any amino acid
  Variant (300)..(301): Xaa in position 300 to 301 is any amino acid
  Variant (302)..(302): Xaa in position 302 is any or no amino acid
  Variant (306)..(309): Xaa in position 306 to 309 is any amino acid
  Variant (311)..(311): Xaa in position 311 is any amino acid
  Variant (314)..(314): Xaa in position 314 is any amino acid
  Variant (317)..(318): Xaa in position 317 to 318 is any amino acid
  Variant (321)..(322): Xaa in position 321 to 322 is any amino acid
  Variant (325)..(325): Xaa in position 325 is any amino acid
  Variant (327)..(327): Xaa in position 327 is any amino acid
  Variant (330)..(343): Xaa in position 330 to 343 is any amino acid
  Variant (345)..(345): Xaa in position 345 is any amino acid
  Variant (347)..(349): Xaa in position 347 to 349 is any amino acid
  Variant (351)..(351): Xaa in position 351 is any amino acid
  Variant (354)..(357): Xaa in position 354 to 357 is any amino acid
  Variant (359)..(360): Xaa in position 359 to 360 is any amino acid
  Variant (363)..(364): Xaa in position 363 to 364 is any amino acid
  Variant (366)..(366): Xaa in position 366 is any amino acid
  Variant (368)..(368): Xaa in position 368 is any amino acid
  Variant (371)..(374): Xaa in position 371 to 374 is any amino acid
  Variant (376)..(378): Xaa in position 376 to 378 is any amino acid
  Variant (380)..(390): Xaa in position 380 to 390 is any amino acid
  Variant (392)..(393): Xaa in position 392 to 393 is any amino acid
  Variant (395)..(395): Xaa in position 395 is any amino acid
  Variant (397)..(398): Xaa in position 397 to 398 is any amino acid
  Variant (401)..(401): Xaa in position 401 is any amino acid
  Variant (405)..(405): Xaa in position 405 is any amino acid
  Variant (407)..(416): Xaa in position 407 to 416 is any amino acid
  Variant (419)..(421): Xaa in position 419 to 421 is any amino acid
  Variant (423)..(424): Xaa in position 423 to 424 is any amino acid
  Variant (426)..(427): Xaa in position 426 to 427 is any amino acid
  Variant (430)..(430): Xaa in position 430 is any amino acid
  Variant (432)..(432): Xaa in position 432 is any amino acid
  Variant (434)..(436): Xaa in position 434 to 436 is any amino acid
  Variant (438)..(440): Xaa in position 438 to 440 is any amino acid
  Variant (442)..(443): Xaa in position 442 to 443 is any amino acid
  Variant (455)..(457): Xaa in position 455 to 457 is any amino acid
  Variant (464)..(464): Xaa in position 464 is any amino acid
  Variant (469)..(472): Xaa in position 469 to 472 is any amino acid
  Variant (474)..(484): Xaa in position 474 to 484 is any amino acid
  Variant (485)..(489): Xaa in position 485 to 489 is any or no amino acid
  Variant (492)..(496): Xaa in position 492 to 496 is any amino acid
  Variant (498)..(503): Xaa in position 498 to 503 is any amino acid
  Variant (505)..(520): Xaa in position 505 to 520 is any amino acid
  Variant (521)..(521): Xaa in position 521 is any or no amino acid
  Variant (523)..(528): Xaa in position 523 to 528 is any amino acid
  Variant (529)..(531): Xaa in position 529 to 531 is any or no amino acid
  Variant (533)..(537): Xaa in position 533 to 537 is any amino acid
  Variant (539)..(539): Xaa in position 539 is any amino acid
  Variant (541)..(543): Xaa in position 541 to 543 is any amino acid
  Variant (545)..(547): Xaa in position 545 to 547 is any amino acid
  Variant (549)..(553): Xaa in position 549 to 553 is any amino acid
  Variant (557)..(557): Xaa in position 557 is any amino acid
  Variant (561)..(561): Xaa in position 561 is any amino acid
  Variant (563)..(564): Xaa in position 563 to 564 is any amino acid
  Variant (571)..(571): Xaa in position 571 is any amino acid
  Variant (574)..(574): Xaa in position 574 is any amino acid
  Variant (577)..(578): Xaa in position 577 to 578 is any amino acid
  Variant (581)..(581): Xaa in position 581 is any amino acid
  Variant (584)..(588): Xaa in position 584 to 588 is any amino acid
  Variant (590)..(605): Xaa in position 590 to 605 is any amino acid
  Variant (606)..(608): Xaa in position 606 to 608 is any or no amino acid
  Variant (610)..(621): Xaa in position 610 to 621 is any amino acid
  Variant (623)..(623): Xaa in position 623 is any amino acid
  Variant (625)..(635): Xaa in position 625 to 635 is any amino acid
  Variant (636)..(638): Xaa in position 636 to 638 is any or no amino acid
  Variant (640)..(640): Xaa in position 640 is any amino acid
  Variant (642)..(646): Xaa in position 642 to 646 is any amino acid
  Variant (647)..(649): Xaa in position 647 to 649 is any or no amino acid
  Variant (651)..(651): Xaa in position 651 is any amino acid
  Variant (653)..(658): Xaa in position 653 to 658 is any amino acid
  Variant (660)..(668): Xaa in position 660 to 668 is any amino acid
  Variant (669)..(671): Xaa in position 669 to 671 is any or no amino acid
  Variant (673)..(673): Xaa in position 673 is any amino acid
  Variant (675)..(690): Xaa in position 675 to 690 is any amino acid
  Variant (691)..(699): Xaa in position 691 to 699 is any or no amino acid
  Variant (701)..(701): Xaa in position 701 is any amino acid
  Variant (703)..(725): Xaa in position 703 to 725 is any amino acid
  Variant (726)..(745): Xaa in position 726 to 745 is any or no amino acid
  Variant (747)..(755): Xaa in position 747 to 755 is any amino acid
  Variant (757)..(772): Xaa in position 757 to 772 is any amino acid
  Variant (775)..(775): Xaa in position 775 is any amino acid
RXXXXXXXXXXXXXXXXXXPXXSXTEXXAXXAGXXWWXXXLFXGXPXWXXLXXXXXXXLXXXEQXFXDXXXXXXCXXXXXXXXXXXXXDLPXXXWXXXXXXXFXXXIIXKXYGGXXFSAXAXSXXXXKXXXXSXXXXXTVXVPNSLGPXELLXHYGTXXQXXXXLPRLAXGXXIPCFALTXPXAGSDAXXXPDXGXVCXGXXXGXXXXXXXXXVLGXXXXXWXKRYITLAPXATXXGLAFXXXDPXXLLGXXXXXXXGITXALXPXXXXGVXXGXRHXPXXXXFXNGPXXGXDXFXPXDXXXIGGXXXXGXGWXMLXXCLXXGRXIXLPXXXXXXXXXXXXXXGXYXXXRXQFXXXXGXXEGXXEXLXRIXXXXYXXXAXXXXXXXXXXXGXXPXVXXAIXKYHXTXXXXXXXXXXMDXXXGXXIXXGPXNXLXXXYXXXPXXITVEGANILTRXXXIFGQGAXRCHPXXXXEXXXXXXXXXXXXXXXXFDXXXXXHXXXXXXNXXXXXXXXXXXXXXXXXPXXXXXXXXXYXXXXXRXSXXXAXXXDXXXXXLGGXLKRXEXXSARLGDXLSXLYXXSAXLKXXXXXGXXXXXXXXXXXXXXXXXXXLXXXXXXXXXXXXNXPXXXXXXXXXXXXXXPXGXXXXXXXXPXDXXXXXXAXXXXXXXXXXXXRXRXXXXXXXXXXXXXXXXXXXXXXXXXEXAXXXXXXXXXXXXXXXXXXXXXXXXXXXXXXXXXXXXXXXXXXXAXXXXXXXXXEXXXXXXXXXXXXXXXXVDXF

SEQ ID NO: 35723 - protein, 56 aa, Artificial sequence
  protein pattern
  Variant (8)..(8): Xaa in position 8 is Ala or Gly
  Variant (12)..(12): Xaa in position 12 is any amino acid
  Variant (14)..(14): Xaa in position 14 is Phe or Tyr
  Variant (17)..(18): Xaa in position 17 to 18 is any amino acid
  Variant (20)..(22): Xaa in position 20 to 22 is any amino acid
  Variant (23)..(23): Xaa in position 23 is Phe, Trp or Tyr
  Variant (26)..(26): Xaa in position 26 is any amino acid
  Variant (28)..(28): Xaa in position 28 is Ala or Ser
  Variant (29)..(29): Xaa in position 29 is any amino acid
  Variant (31)..(31): Xaa in position 31 is any amino acid
  Variant (32)..(32): Xaa in position 32 is Asp or Glu
  Variant (33)..(33): Xaa in position 33 is Ile or Val
  Variant (35)..(35): Xaa in position 35 is Ala or Cys
  Variant (37)..(37): Xaa in position 37 is Ala or Gly
  Variant (40)..(40): Xaa in position 40 is Glu, Gly, Asn or Ser
  Variant (41)..(41): Xaa in position 41 is Ala or Pro
  Variant (42)..(42): Xaa in position 42 is any amino acid
  Variant (48)..(48): Xaa in position 48 is Ala, Gly, Ser or Thr
  Variant (49)..(49): Xaa in position 49 is Ala, Gly or Ser
  Variant (50)..(50): Xaa in position 50 is Ile, Leu or Met
  Variant (51)..(51): Xaa in position 51 is Pro or Thr
  Variant (52)..(52): Xaa in position 52 is Asp or Ser
  Variant (53)..(53): Xaa in position 53 is any amino acid
  Variant (55)..(55): Xaa in position 55 is any amino acid
  Variant (56)..(56): Xaa in position 56 is Ile, Leu or Val
VPNSLGPXELLXHXGTXXQXXXXLPXLXXGXXXPXFXLTXXXAGSDAXXXXXXGXX

SEQ ID NO: 35724 - protein, 58 aa, Artificial sequence
  protein pattern
  Variant (3)..(3): Xaa in position 3 is Ile or Val
  Variant (4)..(4): Xaa in position 4 is any amino acid
  Variant (5)..(5): Xaa in position 5 is Ala, Gly or Ser
  Variant (7)..(7): Xaa in position 7 is any amino acid
  Variant (8)..(8): Xaa in position 8 is Ala or Gly
  Variant (9)..(9): Xaa in position 9 is Ile or Val
  Variant (10)..(11): Xaa in position 10 to 11 is any amino acid
  Variant (13)..(13): Xaa in position 13 is Asp, Glu, Pro or Gln
  Variant (14)..(14): Xaa in position 14 is any amino acid
  Variant (16)..(16): Xaa in position 16 is any amino acid
  Variant (18)..(20): Xaa in position 18 to 20 is any amino acid
  Variant (21)..(21): Xaa in position 21 is His, Trp or Tyr
  Variant (22)..(22): Xaa in position 22 is any amino acid
  Variant (23)..(23): Xaa in position 23 is Ala, Gly, Gln, Ser or Thr
  Variant (24)..(24): Xaa in position 24 is any amino acid
  Variant (26)..(26): Xaa in position 26 is Ile or Val
  Variant (27)..(27): Xaa in position 27 is any amino acid
  Variant (28)..(28): Xaa in position 28 is Ile or Val
  Variant (36)..(36): Xaa in position 36 is Leu, Met or Val
  Variant (37)..(37): Xaa in position 37 is Ser or Thr
  Variant (39)..(39): Xaa in position 39 is Cys, Asn, Ser or Thr
  Variant (40)..(40): Xaa in position 40 is Leu or Met
  Variant (41)..(41): Xaa in position 41 is Ile or Met
  Variant (42)..(42): Xaa in position 42 is Ile, Leu or Val
  Variant (43)..(43): Xaa in position 43 is Phe or Tyr
  Variant (47)..(47): Xaa in position 47 is Ala, Ser or Val
  Variant (48)..(48): Xaa in position 48 is any amino acid
  Variant (50)..(50): Xaa in position 50 is Ala, Cys or Ser
  Variant (53)..(53): Xaa in position 53 is Phe, His, Trp or Tyr
  Variant (54)..(57): Xaa in position 54 to 57 is any amino acid
  Variant (58)..(58): Xaa in position 58 is Ile, Leu, Met or Val
MDXXXGXXXXXGXXNXLXXXXXXXPXXXTVEGANIXXRXXXXXGQGXXRXHPXXXXXX

SEQ ID NO: 35725 - protein, 31 aa, Artificial sequence
  protein pattern
  Variant (2)..(2): Xaa in position 2 is any amino acid
  Variant (3)..(3): Xaa in position 3 is Ile, Leu or Val
  Variant (6)..(10): Xaa in position 6 to 10 is any or no amino acid
  Variant (12)..(12): Xaa in position 12 is any amino acid
  Variant (15)..(15): Xaa in position 15 is any amino acid
  Variant (18)..(18): Xaa in position 18 is Leu, Met or Val
  Variant (19)..(19): Xaa in position 19 is Glu, Gly, Asn, Ser or Thr
  Variant (20)..(20): Xaa in position 20 is Ala, Cys or Ser
  Variant (22)..(22): Xaa in position 22 is Ala, Gly or Ser
  Variant (23)..(23): Xaa in position 23 is Ala, Ile or Val
  Variant (26)..(26): Xaa in position 26 is Ala, Cys, Gly or Ser
  Variant (28)..(28): Xaa in position 28 is Ser or Thr
  Variant (31)..(31): Xaa in position 31 is Ala, Gly or Ser
DXXIGXXXXXGXGWXMLXXXLXXGRXIXLPX

SEQ ID NO: 35726 - protein, 33 aa, Artificial sequence
  protein pattern
  Variant (2)..(4): Xaa in position 2 to 4 is any amino acid
  Variant (5)..(6): Xaa in position 5 to 6 is any or no amino acid
  Variant (9)..(9): Xaa in position 9 is Trp or Tyr
  Variant (13)..(13): Xaa in position 13 is Ala, Cys or Gly
  Variant (15)..(15): Xaa in position 15 is Ile or Val
  Variant (17)..(17): Xaa in position 17 is Ser or Thr
  Variant (18)..(18): Xaa in position 18 is Leu or Val
  Variant (19)..(19): Xaa in position 19 is Ile, Leu, Met or Val
  Variant (20)..(20): Xaa in position 20 is Ala or Gly
  Variant (21)..(21): Xaa in position 21 is Leu or Val
  Variant (23)..(23): Xaa in position 23 is Phe, Ile or Val
  Variant (24)..(26): Xaa in position 24 to 26 is any amino acid
  Variant (29)..(29): Xaa in position 29 is Asp, Glu or Gln
  Variant (30)..(30): Xaa in position 30 is any amino acid
  Variant (31)..(31): Xaa in position 31 is Ile or Leu
  Variant (32)..(32): Xaa in position 32 is Ile, Leu, Met or Val
  Variant (33)..(33): Xaa in position 33 is Gly, Asn or Ser
LXXXXXKRXITLXPXAXXXXXAXXXXDPXXXXX

SEQ ID NO: 35727 - protein, 34 aa, Artificial sequence
  protein pattern
  Variant (2)..(3): Xaa in position 2 to 3 is any or no amino acid
  Variant (5)..(5): Xaa in position 5 is any amino acid
  Variant (6)..(7): Xaa in position 6 to 7 is any or no amino acid
  Variant (10)..(10): Xaa in position 10 is any amino acid
  Variant (11)..(11): Xaa in position 11 is Asp, Glu, Ser or Thr
  Variant (13)..(13): Xaa in position 13 is Ile, Leu or Met
  Variant (14)..(14): Xaa in position 14 is Asp, Glu or Asn
  Variant (17)..(17): Xaa in position 17 is Asp, Asn, Ser or Thr
  Variant (18)..(18): Xaa in position 18 is any amino acid
  Variant (20)..(20): Xaa in position 20 is any amino acid
  Variant (21)..(21): Xaa in position 21 is Asp or Glu
  Variant (22)..(22): Xaa in position 22 is any amino acid
  Variant (23)..(23): Xaa in position 23 is Ala, Asp, Glu or Gln
  Variant (24)..(24): Xaa in position 24 is Ile or Leu
  Variant (26)..(26): Xaa in position 26 is any amino acid
  Variant (28)..(28): Xaa in position 28 is any amino acid
  Variant (30)..(30): Xaa in position 30 is any amino acid
  Variant (31)..(31): Xaa in position 31 is Phe, Trp or Tyr
  Variant (32)..(33): Xaa in position 32 to 33 is any amino acid
  Variant (34)..(34): Xaa in position 34 is Phe or Leu
PXXSXXXTEXXAXXAGXXWXXXXXFXGXPXXXXX

SEQ ID NO: 35728 - protein, 22 aa, Artificial sequence
  protein pattern
  Variant (4)..(4): Xaa in position 4 is any amino acid
  Variant (7)..(7): Xaa in position 7 is Ile or Val
  Variant (9)..(12): Xaa in position 9 to 12 is any amino acid
  Variant (14)..(14): Xaa in position 14 is Ile, Met or Val
  Variant (15)..(16): Xaa in position 15 to 16 is any amino acid
  Variant (18)..(18): Xaa in position 18 is any amino acid
  Variant (21)..(21): Xaa in position 21 is any amino acid
GITXALXPXXXXGXXXGXRHXP

SEQ ID NO: 35729 - protein, 41 aa, Artificial sequence
  protein pattern
  Variant (2)..(2): Xaa in position 2 is any or no amino acid
  Variant (4)..(5): Xaa in position 4 to 5 is any amino acid
  Variant (6)..(6): Xaa in position 6 is any or no amino acid
  Variant (8)..(9): Xaa in position 8 to 9 is any amino acid
  Variant (10)..(10): Xaa in position 10 is Phe, Ile, Leu, Met or Val
  Variant (11)..(11): Xaa in position 11 is Lys or Arg
  Variant (12)..(14): Xaa in position 12 to 14 is any amino acid
  Variant (16)..(16): Xaa in position 16 is any amino acid
  Variant (17)..(17): Xaa in position 17 is Ala, Gly or Ser
  Variant (18)..(18): Xaa in position 18 is Leu or Met
  Variant (21)..(21): Xaa in position 21 is any amino acid
  Variant (22)..(22): Xaa in position 22 is Glu, Lys or Arg
  Variant (23)..(23): Xaa in position 23 is any amino acid
  Variant (24)..(24): Xaa in position 24 is Phe or Tyr
  Variant (25)..(25): Xaa in position 25 is Asp or Gly
  Variant (27)..(28): Xaa in position 27 to 28 is any amino acid
  Variant (29)..(29): Xaa in position 29 is Phe or Tyr
  Variant (30)..(30): Xaa in position 30 is Cys, Ser or Thr
  Variant (31)..(31): Xaa in position 31 is Ala, Pro or Ser
  Variant (32)..(32): Xaa in position 32 is any amino acid
  Variant (33)..(33): Xaa in position 33 is Ala or Gly
  Variant (34)..(36): Xaa in position 34 to 36 is any amino acid
  Variant (37)..(37): Xaa in position 37 is Ile or Val
  Variant (38)..(40): Xaa in position 38 to 40 is any amino acid
  Variant (41)..(41): Xaa in position 41 is Ile or Leu
LXPXXXWXXXXXXXFXXXIIXXXXXGXXXXXXXXXXXXXXX

SEQ ID NO: 35730 - protein, 17 aa, Artificial sequence
  protein pattern
  Variant (2)..(2): Xaa in position 2 is Ala, Gly or Ser
  Variant (3)..(3): Xaa in position 3 is Ile or Val
  Variant (4)..(4): Xaa in position 4 is any amino acid
  Variant (5)..(5): Xaa in position 5 is Gly, Ser or Thr
  Variant (8)..(8): Xaa in position 8 is any amino acid
  Variant (12)..(12): Xaa in position 12 is any amino acid
  Variant (14)..(14): Xaa in position 14 is any amino acid
  Variant (15)..(16): Xaa in position 15 to 16 is any or no amino acid
PXXXXAIXKYHXTXXXR

SEQ ID NO: 35731 - protein, 16 aa, Artificial sequence
  protein pattern
  Variant (2)..(2): Xaa in position 2 is Ser or Thr
  Variant (3)..(4): Xaa in position 3 to 4 is any amino acid
  Variant (7)..(7): Xaa in position 7 is any amino acid
  Variant (9)..(9): Xaa in position 9 is Ile, Leu or Met
  Variant (11)..(15): Xaa in position 11 to 15 is any amino acid
  Variant (16)..(16): Xaa in position 16 is Ala, Leu or Val
LXXXEQXFXDXXXXXX

SEQ ID NO: 35732 - protein, 15 aa, Artificial sequence
  protein pattern
  Variant (2)..(2): Xaa in position 2 is any amino acid
  Variant (3)..(3): Xaa in position 3 is Asn or Thr
  Variant (6)..(7): Xaa in position 6 to 7 is any amino acid
  Variant (8)..(8): Xaa in position 8 is Ala or Gly
  Variant (9)..(10): Xaa in position 9 to 10 is any amino acid
  Variant (11)..(11): Xaa in position 11 is Ile, Leu, Met or Val
  Variant (13)..(13): Xaa in position 13 is Ile, Met or Val
  Variant (15)..(15): Xaa in position 15 is Phe, Ile, Leu or Met
FXXGPXXXXXXFXPX

SEQ ID NO: 35733 - DNA, 3075 bp, Escherichia coli
  CDS (1)..(3075): transl_table=11
atgaccatgattacggattcactggccgtcgttttacaacgtcgtgactgggaaaaccctggcgttacccaacttaatcgccttgcagcacatccccctttcgccagctggcgtaatagcgaagaggcccgcaccgatcgcccttcccaacagttgcgcagcctgaatggcgaatggcgctttgcctggtttccggcaccagaagcggtgccggaaagctggctggagtgcgatcttcctgaggccgatactgtcgtcgtcccctcaaactggcagatgcacggttacgatgcgcccatctacaccaacgtgacctatcccattacggtcaatccgccgtttgttcccacggagaatccgacgggttgttactcgctcacatttaatgttgatgaaagctggctacaggaaggccagacgcgaattatttttgatggcgttaactcggcgtttcatctgtggtgcaacgggcgctgggtcggttacggccaggacagtcgtttgccgtctgaatttgacctgagcgcatttttacgcgccggagaaaaccgcctcgcggtgatggtgctgcgctggagtgacggcagttatctggaagatcaggatatgtggcggatgagcggcattttccgtgacgtctcgttgctgcataaaccgactacacaaatcagcgatttccatgttgccactcgctttaatgatgatttcagccgcgctgtactggaggctgaagttcagatgtgcggcgagttgcgtgactacctacgggtaacagtttctttatggcagggtgaaacgcaggtcgccagcggcaccgcgcctttcggcggtgaaattatcgatgagcgtggtggttatgccgatcgcgtcacactacgtctgaacgtcgaaaacccgaaactgtggagcgccgaaatcccgaatctctatcgtgcggtggttgaactgcacaccgccgacggcacgctgattgaagcagaagcctgcgatgtcggtttccgcgaggtgcggattgaaaatggtctgctgctgctgaacggcaagccgttgctgattcgaggcgttaaccgtcacgagcatcatcctctgcatggtcaggtcatggatgagcagacgatggtgcaggatatcctgctgatgaagcagaacaactttaacgccgtgcgctgttcgcattatccgaaccatccgctgtggtacacgctgtgcgaccgctacggcctgtatgtggtggatgaagccaatattgaaacccacggcatggtgccaatgaatcgtctgaccgatgatccgcgctggctaccggcgatgagcgaacgcgtaacgcgaatggtgcagcgcgatcgtaatcacccgagtgtgatcatctggtcgctggggaatgaatcaggccacggcgctaatcacgacgcgctgtatcgctggatcaaatctgtcgatccttcccgcccggtgcagtatgaaggcggcggagccgacaccacggccaccgatattatttgcccgatgtacgcgcgcgtggatgaagaccagcccttcccggctgtgccgaaatggtccatcaaaaaatggctttcgctacctggagagacgcgcccgctgatcctttgcgaatacgcccacgcgatgggtaacagtcttggcggtttcgctaaatactggcaggcgtttcgtcagtatccccgtttacagggcggcttcgtctgggactgggtggatcagtcgctgattaaatatgatgaaaacggcaacccgtggtcggcttacggcggtgattttggcgatacgccgaacgatcgccagttctgtatgaacggtctggtctttgccgaccgcacgccgcatccagcgctgacggaagcaaaacaccagcagcagtttttccagttccgtttatccgggcaaaccatcgaagtgaccagcgaatacctgttccgtcatagcgataacgagctcctgcactggatggtggcgctggatggtaagccgctggcaagcggtgaagtgcctctggatgtcgctccacaaggtaaacagttgattgaactgcctgaactaccgcagccggagagcgccgggcaactctggctcacagtacgcgtagtgcaaccgaacgcgaccgcatggtcagaagccgggcacatcagcgcctggcagcagtggcgtctggcggaaaacctcagtgtgacgctccccgccgcgtcccacgccatcccgcatctgaccaccagcgaaatggatttttgcatcgagctgggtaataagcgttggcaatttaaccgccagtcaggctttctttcacagatgtggattggcgataaaaaacaactgctgacgccgctgcgcgatcagttcacccgtgcaccgctggataacgacattggcgtaagtgaagcgacccgcattgaccctaacgcctgggtcgaacgctggaaggcggcgggccattaccaggccgaagcagcgttgttgcagtgcacggcagatacacttgctgatgcggtgctgattacgaccgctcacgcgtggcagcatcaggggaaaaccttatttatcagccggaaaacctaccggattgatggtagtggtcaaatggcgattaccgttgatgttgaagtggcgagcgatacaccgcatccggcgcggattggcctgaactgccagctggcgcaggtagcagagcgggtaaactggctcggattagggccgcaagaaaactatcccgaccgccttactgccgcctgttttgaccgctgggatctgccattgtcagacatgtataccccgtacgtcttcccgagcgaaaacggtctgcgctgcgggacgcgcgaattgaattatggcccacaccagtggcgcggcgacttccagttcaacatcagccgctacagtcaacagcaactgatggaaaccagccatcgccatctgctgcacgcggaagaaggcacatggctgaatatcgacggtttccatatggggattggtggcgacgactcctggagcccgtcagtatcggcggaattccagctgagcgccggtcgctaccattaccagttggtctggtgtcaaaaataa

SEQ ID NO: 35734 - protein, 1024 aa, Escherichia coli
MTMITDSLAVVLQRRDWENPGVTQLNRLAAHPPFASWRNSEEARTDRPSQQLRSLNGEWRFAWFPAPEAVPESWLECDLPEADTVVVPSNWQMHGYDAPIYTNVTYPITVNPPFVPTENPTGCYSLTFNVDESWLQEGQTRIIFDGVNSAFHLWCNGRWVGYGQDSRLPSEFDLSAFLRAGENRLAVMVLRWSDGSYLEDQDMWRMSGIFRDVSLLHKPTTQISDFHVATRFNDDFSRAVLEAEVQMCGELRDYLRVTVSLWQGETQVASGTAPFGGEIIDERGGYADRVTLRLNVENPKLWSAEIPNLYRAVVELHTADGTLIEAEACDVGFREVRIENGLLLLNGKPLLIRGVNRHEHHPLHGQVMDEQTMVQDILLMKQNNFNAVRCSHYPNHPLWYTLCDRYGLYVVDEANIETHGMVPMNRLTDDPRWLPAMSERVTRMVQRDRNHPSVIIWSLGNESGHGANHDALYRWIKSVDPSRPVQYEGGGADTTATDIICPMYARVDEDQPFPAVPKWSIKKWLSLPGETRPLILCEYAHAMGNSLGGFAKYWQAFRQYPRLQGGFVWDWVDQSLIKYDENGNPWSAYGGDFGDTPNDRQFCMNGLVFADRTPHPALTEAKHQQQFFQFRLSGQTIEVTSEYLFRHSDNELLHWMVALDGKPLASGEVPLDVAPQGKQLIELPELPQPESAGQLWLTVRVVQPNATAWSEAGHISAWQQWRLAENLSVTLPAASHAIPHLTTSEMDFCIELGNKRWQFNRQSGFLSQMWIGDKKQLLTPLRDQFTRAPLDNDIGVSEATRIDPNAWVERWKAAGHYQAEAALLQCTADTLADAVLITTAHAWQHQGKTLFISRKTYRIDGSGQMAITVDVEVASDTPHPARIGLNCQLAQVAERVNWLGLGPQENYPDRLTAACFDRWDLPLSDMYTPYVFPSENGLRCGTRELNYGPHQWRGDFQFNISRYSQQQLMETSHRHLLHAEEGTWLNIDGFHMGIGGDDSWSPSVSAEFQLSAGRYHYQLVWCQK

SEQ ID NO: 35735 - DNA, 3327 bp, Arabidopsis thaliana
  CDS (1)..(3327)
atggtttcgttagcgacccaaatgattcttccatctgaaaatgggtatagagtttgggaggatcagacccttttcaaatggcgtaagagagatcctcatgtcaccttgcgttgccatgaatccgtccaaggggctttgaggtactggtatcagcggaacaacgtggatctcaccgtatcaaaatctgctgtttggaatgatgatgctgttcaagctgctcttgatagcgctgctttttgggttgacggcttgccctttgttaagtctttatctggttactggaagtttttcttggctcctaaacctgctaatgttcctgacaaattttatgatgctgccttttctgattcagactggaatgctttacaggttccttccaactggcagtgtcatggatttgatcggcctatctatacgaatgtggtgtaccctttcccgaatgatcctccttatgttcctgaggataatcctactggttgctacagaacctacttccagattcccaaagaatggaaggacagaagaatacttcttcactttgaagctgtagactccgcattctttgcttggataaatggcaaccctgttgggtacagtcaagacagcaggttacctgctgaatttgaaatatctgattattgctatccatgggactcgggaaaacaaaatgttcttgctgttcaagtctttagatggagtgatggttcataccttgaagaccaagatcattggtggttgtctggtattcatcgagatgtgcttttgttagcaaagcccaaggtcttcattgctgactactttttcaagtcaaaattggcagatgacttttcatacgcagacatccaggttgaagtgaagattgacaatatgcaggagtcctcaaaggatcttgttctttctaacttcatcatagaggctgccatatttgatacaaaaaattggtacaactctgaaggatttagttgtgaactttctcccaaggtggctaatttgaagcttaatccttctccaagcccaactcttggatttcatggttacttgcttgagggaaaactggattcgccaaatctctggtcagctgaacaaccaaatgtttacatcctcgttttaactctaaaagatacatctgggaaagtccttgattctgaatcaagcattgtgggcattcggcaagtatcaaaggcctttaaacagcttcttgttaatgggcacccagtcgtgataaaaggtgtaaacaggcatgagcaccatccacgtgttgggaagacgaatatagaggcatgcatggtcaaggatttaattatgatgaaagaatataatatcaatgcggtgcgaaacagtcattatcctcaacatccccgctggtatgaattatgtgatttgttcggcatgtacatgatcgatgaagccaatatagagacacatggttttgatctctctgggcatctgaagcaccctgcaaaagagccaagctgggcagctgctatgctggatcgagtagttgggatggttgaaagagacaaaaaccatacatgcataatttcttggtcacttggaaatgaggctggctatgggcccaatcattctgccatggcaggttggattagggaaaaggacccctcacggttggtgcactatgaaggtggtggttccagaacaagttctacagatatagtctgccctatgtacatgcgggtttgggacatcatcaagattgcacttgatcaaaatgaatcacggccgttgatattatgcgagtatcaacatgctatgggtaacagcaacgggaatatagatgagtactgggaggcaattgacaatacctttggcctgcaaggaggtttcatatgggactgggttgaccaggggctattgaaactggggtcagatggcattaagcgttgggcatatggaggggactttggtgaccagcctaatgatttgaacttctgtctcaatgggcttatatggcctgaccgaactcctcatccagcactccatgaggttaagcattgttaccaaccaatcaaggtttcattgacggatggcatgataaaggttgcaaacacttactttttcaacacaacagaagaattggagtttagctggacaattcatggggatggtcttgaacttggatctgggactctctctattcctgtgataaagccacaaaatagttttgagatggagtggaagtcaggtccatggttttctttctggaatgactcaaatgctggagaattgtttctgacaataaatgccaagcttttaaatcttactcgttcgcttgaagccggtcatcttttgtcttcaacgcagattcctttaccagcaaagggacaaataataccgcaggcgataaaaaagacagacactagtatcacttgtgaaactgttggagatttcattaagatcagccagaaagattcatgggagctaatggtaaatgtccgaaaagggactattgaaggttggaagattcaaggagttctccttatgaacgaagctatactgccatgcttttggcgagcacctacagacaatgataaaggtggaggtgactctagttatttttcgaggtggaaagcggcacagttagataatgtggagttccttgttgaaagctgttcagtaaagagcatcactgataaatccgtagagatagagttcatttaccttggttcttcagcttctggctcttcaaagtcagatgccttattcaaagtcaatgtgacatatctgatctatggttccggagatatcatcaccaattggtttgtagaaccaaactctgatcttccaccgctaccacgtgtaggtatagaattccacattgaaaaaacactggaccgtgtagaatggtatggcaaaggtccatttgagtgttacccagaccgaaaagcagcagcccatgtggcgatatatgaacacaatgttggagacatgcatgtcccttatattgttccaggagaaaatggaggtagaacagatgttaggtgggtaacattccgaaacaaagatggtgtaggaatatatgcttcaacatatggtagctcttctctaatgcaaatgaatgctagttattatacaaccggtgagcttcaccgtgcaacgcatgaagaggatcttatcaaaggacaaaacatcgaggtagtgcatctggaccacaaacacatgggtcttgggggagatgatagctggactccatgtgttcacgataagtttctgattccgcctgcacagtattcgttttctctcaggctatgcccaattactgcatccacctcgggtttgaacatctacaaggatcaactcccctgctag

SEQ ID NO: 35736 - protein, 1108 aa, Arabidopsis thaliana
MVSLATQMILPSENGYRVWEDQTLFKWRKRDPHVTLRCHESVQGALRYWYQRNNVDLTVSKSAVWNDDAVQAALDSAAFWVDGLPFVKSLSGYWKFFLAPKPANVPDKFYDAAFSDSDWNALQVPSNWQCHGFDRPIYTNVVYPFPNDPPYVPEDNPTGCYRTYFQIPKEWKDRRILLHFEAVDSAFFAWINGNPVGYSQDSRLPAEFEISDYCYPWDSGKQNVLAVQVFRWSDGSYLEDQDHWWLSGIHRDVLLLAKPKVFIADYFFKSKLADDFSYADIQVEVKIDNMQESSKDLVLSNFIIEAAIFDTKNWYNSEGFSCELSPKVANLKLNPSPSPTLGFHGYLLEGKLDSPNLWSAEQPNVYILVLTLKDTSGKVLDSESSIVGIRQVSKAFKQLLVNGHPVVIKGVNRHEHHPRVGKTNIEACMVKDLIMMKEYNINAVRNSHYPQHPRWYELCDLFGMYMIDEANIETHGFDLSGHLKHPAKEPSWAAAMLDRVVGMVERDKNHTCIISWSLGNEAGYGPNHSAMAGWIREKDPSRLVHYEGGGSRTSSTDIVCPMYMRVWDIIKIALDQNESRPLILCEYQHAMGNSNGNIDEYWEAIDNTFGLQGGFIWDWVDQGLLKLGSDGIKRWAYGGDFGDQPNDLNFCLNGLIWPDRTPHPALHEVKHCYQPIKVSLTDGMIKVANTYFFNTTEELEFSWTIHGDGLELGSGTLSIPVIKPQNSFEMEWKSGPWFSFWNDSNAGELFLTINAKLLNLTRSLEAGHLLSSTQIPLPAKGQIIPQAIKKTDTSITCETVGDFIKISQKDSWELMVNVRKGTIEGWKIQGVLLMNEAILPCFWRAPTDNDKGGGDSSYFSRWKAAQLDNVEFLVESCSVKSITDKSVEIEFIYLGSSASGSSKSDALFKVNVTYLIYGSGDIITNWFVEPNSDLPPLPRVGIEFHIEKTLDRVEWYGKGPFECYPDRKAAAHVAIYEHNVGDMHVPYIVPGENGGRTDVRWVTFRNKDGVGIYASTYGSSSLMQMNASYYTTGELHRATHEEDLIKGQNIEVVHLDHKHMGLGGDDSWTPCVHDKFLIPPAQYSFSLRLCPITASTSGLNIYKDQLPC

SEQ ID NO: 35737 - DNA, 3354 bp, Oryza sativa (japonica cultivar-group)
  CDS (1)..(3354)
atggctgtagcttctgccagtgcactgttttccgccaagaatcttccgcataaaccctgggaggacccgtcattctttaggtggagaaagcgggaggctcatgtgccgttgcgctcacatgacacacctgaaggagccctcaagtattggcatgaacggaggaatgtgaactatcttaattctgactctgctgtttggaatgatgacgcggttcgtggtgccctggaaagtgctgcgttttggtccaagggcttgccatatgtccagactctaagtggatactggaagttccttttggcttcctcgccagaatctgttccagagaaattctatgatgcctacttcaatgattcagattgggaggctttgccagttccctcaaactggcaaatgcatgggtttgaccgtccaatctacacaaatgtcacttatcctttcaccatgaacccgccatttgtgccaaatgataatcctactggctgttataggacggtttttcgcatcccaaaagagtggaaaggtcgaagaatcttgttgcactttgaagctgttgattcagcgttttttgcttgggtaaacggcgttcctgttggatatagccaggacagcaggcttcctgctgagtttgagatcacagatttctgccatccttgtgactcagaaaaggaaaatgttcttgctgttcaagtgatgaggtggagtgacggttcctatcttgaagaccaggaccattggtggctatctggtattcacagggatgttctactagtatcaaagccacagatctttattacagattattttttcaaagcaaccttggatgaaggcttccgtgtagctgatattgaggttgaggtggaaattgactcacaaaagcaggatcgggagcatgtctcaactttgtctattgaagcaacattgtatgacaattatggacctgctgatgttttaacttctgatatgtctgctgctagtgtggccaatttgaagttgaagccagcttcaagaccaaaacactgttatggttttcatggttatgttcttggtggaaaagtagaaaatccaaaactttggtctagtgaacatcccaacttatacactcttgttgttgtccttaaagattccaacgggaagctcattgagtgtgaatcatgccaagtaggaatccgtaatgtcgtcctggcacacaagcagatgcttgtcaatggatgtcctgttgtaataagaggtgtcaacagacatgagcatcatccacgtgttggaaagacaaatttagaagcttgcatgattaaggatctggttttgatgagacaaaacaacattaatgctgttagaaacagccattatccccaacatccaaggtggtatgagctgtgtgacatttttggactttatgtaattgatgaagccaacatcgagacgcatggctttgatgaatctagccatttcaaacatcctacacttgaacccttctgggcaagtgctatgcttgatcgtgttgttggtatggtggagagagacaagaatcatgcatgcattatagtatggtccttgggaaatgaatcttcgtatggaccaaatcactcagccatgtctggctggattcgtggaaaggacccgacaaggcccatccattatgaaggaggtggttctagaacatcctccactgatattgtatgcccaatgtacatgcgtgtctgggatattcttaagatcgcacaagacccttctgaaaataggcccctcattctttgcgaatattcacatgctatgggaaacagtaatggaaatattgatgcatattggatggccatagacaacactgttggactccaaggtggttttatatgggactgggtcgatcagggtttactaaaggaagatgctgatggatctaaaaactgggcatatggtggcgactttggagacactccaaatgacttgaatttttgtcttaatggcattgtatggcctgatcggacaattcacccagctgtgcatgaagttaaatatttataccagcctatcaaaataacaatgatggataacatgcttaagattgaaaacgtacatttttttgagacaacagaagctttggacttcagttggctacttcaaggagatggctgtgctttgggctctggttcacttaatgtcccatccatagcaccacagagtactcatctgatcaatatgaagtcatcaccttggtttactatttggagtacttgtgtcgtaaaagaaatatttttgtccattaacgtgaaattgaggtaccaaacacaatgggccaaagatggccatatcttggcttcagcacaaatttgtttacctccgaaaaaaggctttgtccctcatgcgatagcactgcccaggagctctttggtttcggaacgtgttggtgatcatgtactcatcagcaaaagtaatgcctggcaaatcaaagtaaacagtatttcaggaacaatcgatagttggaaggtcaacaacattgagcttatgagcaagggaatacacccatgcttttggcgaacaccaactgacaacgacaagggaggcttctacaccaagccctatgtttcaagatggagagaagcttctctcgacaacatctcgttctacagcagccagttttctctgaaggaattgccagaccaaaccgtcgagatctccaccatctactacggtcttcctgggaatcaaccaaagcctgatgaaacctctctctcagacgaatccgagtccgtcctcttccgggtgcagatgcgcggccggatctacgactccggcgacgtgatcctggactacgaggtgagccccaagaacgacctgcctcctcttcctcgcgtcggcgtcgtgttcaacgccgacaagtccctgagccgtgcaaaatggtacgggagggggccattcgagtgctacccggaccggaaggccgccgcgcacgtcggcgtgtacgagagcggcgtcgacgagctgcacgtgccgtacattgtccccggcgagtgcggcggccgggctgacgtccggtgggtggcgctccaggacgccgacgggttcggcctcttcgcgtcggcctacggcgagtcgccgccgatgcaggtgagcgccagctactatggcgccgcggagctcgaccgcgcgacgcataaccacaagctcgtcaagggagacgacatcgaggtgcatcttgatcacaagcacatggggctgggaggggacgacagctggtcgccgtgcgtgcacgagcagtacttgctgccgccggcgagatacgccttctcggtgaggctgtgcccgttgctgccgtcgtcgtcgtgccatgacatctaccactctcagctaccctgttga

SEQ ID NO: 35738 - protein, 1117 aa, Oryza sativa (japonica cultivar-group)
MAVASASALFSAKNLPHKPWEDPSFFRWRKREAHVPLRSHDTPEGALKYWHERRNVNYLNSDSAVWNDDAVRGALESAAFWSKGLPYVQTLSGYWKFLLASSPESVPEKFYDAYFNDSDWEALPVPSNWQMHGFDRPIYTNVTYPFTMNPPFVPNDNPTGCYRTVFRIPKEWKGRRILLHFEAVDSAFFAWVNGVPVGYSQDSRLPAEFEITDFCHPCDSEKENVLAVQVMRWSDGSYLEDQDHWWLSGIHRDVLLVSKPQIFITDYFFKATLDEGFRVADIEVEVEIDSQKQDREHVSTLSIEATLYDNYGPADVLTSDMSAASVANLKLKPASRPKHCYGFHGYVLGGKVENPKLWSSEHPNLYTLVVVLKDSNGKLIECESCQVGIRNVVLAHKQMLVNGCPVVIRGVNRHEHHPRVGKTNLEACMIKDLVLMRQNNINAVRNSHYPQHPRWYELCDIFGLYVIDEANIETHGFDESSHFKHPTLEPFWASAMLDRVVGMVERDKNHACIIVWSLGNESSYGPNHSAMSGWIRGKDPTRPIHYEGGGSRTSSTDIVCPMYMRVWDILKIAQDPSENRPLILCEYSHAMGNSNGNIDAYWMAIDNTVGLQGGFIWDWVDQGLLKEDADGSKNWAYGGDFGDTPNDLNFCLNGIVWPDRTIHPAVHEVKYLYQPIKITMMDNMLKIENVHFFETTEALDFSWLLQGDGCALGSGSLNVPSIAPQSTHLINMKSSPWFTIWSTCVVKEIFLSINVKLRYQTQWAKDGHILASAQICLPPKKGFVPHAIALPRSSLVSERVGDHVLISKSNAWQIKVNSISGTIDSWKVNNIELMSKGIHPCFWRTPTDNDKGGFYTKPYVSRWREASLDNISFYSSQFSLKELPDQTVEISTIYYGLPGNQPKPDETSLSDESESVLFRVQMRGRIYDSGDVILDYEVSPKNDLPPLPRVGVVFNADKSLSRAKWYGRGPFECYPDRKAAAHVGVYESGVDELHVPYIVPGECGGRADVRWVALQDADGFGLFASAYGESPPMQVSASYYGAAELDRATHNHKLVKGDDIEVHLDHKHMGLGGDDSWSPCVHEQYLLPPARYAFSVRLCPLLPSSSCHDIYHSQLPC

SEQ ID NO: 35739 - DNA, 3264 bp, Thermotoga maritima MSB8
  CDS (1)..(3264): transl_table=11
gtgaagaatatgccctacgaatgggaaaacccacagcttgtgagtgaaggaacggagaagtcacacgcttccttcataccctatctggacccgttcagcggggaatgggagtaccctgaggaattcatctctttgaacgggaactggaggtttctcttcgcgaaaaatcccttcgaggtgccggaggatttcttttcggagaaattcgacgactcgaactgggatgagatagaagttccaagcaactgggaaatgaaaggatatggaaagcccatctacacgaacgtggtttatccatttgaaccgaaccctccttttgttccaaaagacgacaatccgaccggggtgtacagaaggtggatcgagatacctgaggattggtttaaaaaggagatctttctgcattttgaaggtgttcgatccttcttctatttgtgggtgaacgggaagaagatcggtttcagcaaagacagctgcacgcccgctgaattcagactcaccgatgttctaagaccagggaagaatctgatcaccgttgaggttctgaagtggagcgatggaagctatctcgaagatcaggacatgtggtggtttgcggggatatacagggacgtttatctgtacgcgctgccgaagtttcacatcagggacgtgttcgtgagaacggatctggatgaaaattacagaaacggaaagatctttctggacgtagagatgagaaatctcggtgaggaagaagaaaaagaccttgaagtaacactcatcacaccggatggagacgaaaaaacactcgtgaaagagacagtaaagccggaggacagagtcctttcctttgcctttgacgtgaaagatccgaagaagtggtccgcggagacacctcacctgtacgttctgaagctgaaactgggagaggacgaaaagaaagtcaacttcggattcaggaagatagagataaaagacggaacgcttcttttcaacgggaaacctctctacataaagggagtgaacagacacgagttcgatcccgacaggggtcatgcggtgacagtggagagaatgattcaggacataaagctcatgaagcagcacaacataaacacggttcgcacatcacactatccgaaccagacgaagtggtacgatctgtgtgactactttggactctacgtgatagacgaggcaaacatcgaatcccacggtatagactgggatcctgaagtgacccttgcgaacagatgggaatgggagaaggcacatttcgacagaatcaaaaggatggtcgagcgcgacaagaatcatcccagtatcatcttctggtctctcgggaacgaagcgggagatggagtgaatttcgaaaaagccgctctctggataaagaaaagagacaacacgcgacttatccattacgagggaacaacaaggaggggagaatcgtactacgtcgatgttttctctctcatgtatccgaagatggacattcttcttgagtacgcttcaaagaagagggaaaagcccttcatcatgtgtgagtatgcccacgcgatgggaaacagtgtgggaaatctgaaggactactgggacgtgatagaaaagtatccgtaccttcatggaggttgcatctgggactgggtggatcagggaataagaaagaaagacgagaacggaagagaattctgggcgtacggtggtgacttcggtgacacaccgaatgacggaaacttctgtataaacggtgtggtactgcccgatagaacacctgagccggaactttacgaggtgaagaaggtctatcagaacgtcaaaataagacaggtatcgaaagacacttatgaggtggaaaacaggtatctattcacgaaccttgagatgttcgatggcgcctggaaaatcagaaaagacggagaagtcatcgaagaaaaaaccttcaagatcttcgctgaacctggagaaaagcgtctcttgaagataccactcccagaaatggacgattctgagtatttcctcgagatcagtttctccctttctgaggataccccctgggcagaaaaaggccacgttgtggcgtgggagcagttccttctgaaagcaccggcatttgagaaaaaatccatttcagatggagtgtcactcagggaggatgggaaacatctcaccgttgaagcaaaagacacggtgtacgtcttctcaaaactcacaggccttctggagcagatccttcacagaagaaaaaagatcctgaaaagtcccgttgttcccaacttctggagggttccaaccgacaacgacatcggaaacagaatgccacagaggctcgccatctggaagagggcatcgaaagagagaaaactcttcaaaatgcactggaaaaaggaagaaaatcgtgtttctgtccatagtgtttttcagcttccgggaaacagctgggtgtacacaacatacaccgttttcggaaatggagacgtcctagtggacctttctctgattcccgctgaggatgtaccggagattccaaggattggctttcagttcacggttcctgaagagttcggcaccgtggagtggtacggaaggggaccgcacgagacttactgggacagaaaagaaagtggtcttttcgcaaggtacagaaaagctgtcggtgagatgatgcacaggtacgtcaggccccaggaaacggggaacagatcggacgtgagatggttcgcgctttccgatggtgaaacaaaactctttgtgtcgggcatgccgcagatagacttcagcgtctggcctttttccatggaggatctcgagagggttcagcacataagtgaactcccggagagggacttcgtcaccgtgaacgtggacttcagacagatgggccttggaggagacgacagctggggtgcgatgcctcatctggagtacaggcttctaccaaagccgtatcgcttttctttcagaatgaggattagcgaagagattccatcctggagggttcttgcggcgatccctgaaacgctccatgttgagatgtcctcagaagacgtgatacgcgaaggagacaccctgagagtgaaattttcccttctgaacgacactccactgagcaaggaaaaacaggtggttctctttgttgatggaaacgaatactcggtgaggcgagtggtgattccacccttcaagaaggaagagctggtgttcaaagtagaaggattgaagaagggtgaacatctgatacatactaatctgaacacgagaaaaactatctacgtgaggtga

SEQ ID NO: 35740 - protein, 1087 aa, Thermotoga maritima MSB8
MKNMPYEWENPQLVSEGTEKSHASFIPYLDPFSGEWEYPEEFISLNGNWRFLFAKNPFEVPEDFFSEKFDDSNWDEIEVPSNWEMKGYGKPIYTNVVYPFEPNPPFVPKDDNPTGVYRRWIEIPEDWFKKEIFLHFEGVRSFFYLWVNGKKIGFSKDSCTPAEFRLTDVLRPGKNLITVEVLKWSDGSYLEDQDMWWFAGIYRDVYLYALPKFHIRDVFVRTDLDENYRNGKIFLDVEMRNLGEEEEKDLEVTLITPDGDEKTLVKETVKPEDRVLSFAFDVKDPKKWSAETPHLYVLKLKLGEDEKKVNFGFRKIEIKDGTLLFNGKPLYIKGVNRHEFDPDRGHAVTVERMIQDIKLMKQHNINTVRTSHYPNQTKWYDLCDYFGLYVIDEANIESHGIDWDPEVTLANRWEWEKAHFDRIKRMVERDKNHPSIIFWSLGNEAGDGVNFEKAALWIKKRDNTRLIHYEGTTRRGESYYVDVFSLMYPKMDILLEYASKKREKPFIMCEYAHAMGNSVGNLKDYWDVIEKYPYLHGGCIWDWVDQGIRKKDENGREFWAYGGDFGDTPNDGNFCINGVVLPDRTPEPELYEVKKVYQNVKIRQVSKDTYEVENRYLFTNLEMFDGAWKIRKDGEVIEEKTFKIFAEPGEKRLLKIPLPEMDDSEYFLEISFSLSEDTPWAEKGHVVAWEQFLLKAPAFEKKSISDGVSLREDGKHLTVEAKDTVYVFSKLTGLLEQILHRRKKILKSPVVPNFWRVPTDNDIGNRMPQRLAIWKRASKERKLFKMHWKKEENRVSVHSVFQLPGNSWVYTTYTVFGNGDVLVDLSLIPAEDVPEIPRIGFQFTVPEEFGTVEWYGRGPHETYWDRKESGLFARYRKAVGEMMHRYVRPQETGNRSDVRWFALSDGETKLFVSGMPQIDFSVWPFSMEDLERVQHISELPERDFVTVNVDFRQMGLGGDDSWGAMPHLEYRLLPKPYRFSFRMRISEEIPSWRVLAAIPETLHVEMSSEDVIREGDTLRVKFSLLNDTPLSKEKQVVLFVDGNEYSVRRVVIPPFKKEELVFKVEGLKKGEHLIHTNLNTRKTIYVR

SEQ ID NO: 35741 - DNA, 3075 bp, Escherichia coli O157:H7 EDL933
  CDS (1)..(3075): transl_table=11
atgactatgattacagattcactggccgtcgttttacaacgtcgtgactgggaaaaccctggcgttacccaacttaatcgccttgcagcacatccccctttcgccagctggcgtaatagcgaagaggcccgcaccaatcgcccttcccagcagttgcgcagcctgaatggtgagtggcaatttgtctggtttccggcaccagaagcggttccggaaagctggctggagtgcgatcttcctgacgccgatactgtcgtcgtcccctcaaactggcagatgcacggttacgacgcgcccatctacaccaacgtgacatatcccattacggtcaatccgccatttgttcccacggagaatccgacgggttgttactcgctcacatttaatgttgatgaaagctggctacaggaaggccagacgcgaattatttttgatggcgttaactcggcgtttcatctgtggtgcaacgggcgctgggtcggttacggccaggacagtcgtttgctgtctgaatttgacctgagcgcatttttacgcgccggagaaaaccgcctcgcggtgatggtgctgcgctggagtgacggcagttatctggaagatcaggatatgtggcggatgagcggcattttccgtgacgtctcgttgctgcacaaaccgaccacacaaatcagcgatttccatgttgccactctctttaatgatgattttagccgcgcggtactggaggcagaagttcagatgtacggcgagctgcgcgatgagctgcgggtgacggtttctttgtggcagggtgaaacgcaggtcgccagcggcaccgcgcctttcggcggtgaaattatcgatgagcgtggcggttatgccgatcgcgtcacactaggtctgaacgtcgaaaacccgaaactgtggagcgccgaaatcccgaatatctatcgtgcggtggttgaactgcacaccgccgacggcacgctgattgaagcagaagcctgcgatgtcggtttccgcgaggtgcggattgaaaatggtctgctgctgctgaacggcaagccgttgctgattcgcggcgttaaccgtcacgagcatcatcctctgcatggtcaggtcatggatgagcagacgatggtgcaggatatcctgctaatgaagcagaacaactttaacgccgtgcgctgttcgcattatccgaaccatccgctgtggtacaccctgtgcgaccgctacggcctgtatgtggtggatgaagccaatattgaaacccacggcatggtgccaatgaatcgtctgaccgatgatccgcgctggttaccggccatgagcgaacgagtaacacgaatggtacagcgcgatcgtaatcacccgagtgtgatcatctggtcgctggggaatgagtcaggccacggcgctaatcacgacgcactctatcgctggattaaatctgtcgatccatcccgcccggtgcagtatgaaggcggcggagccgacacctccgcaaccgatattatttgcccgatgtacgcgcgcgtggatgaagaccagcccttcccggctgtgccgaaatggtccatcaaaaaatggctttcgctgcctggagaaatgcgcccactgatcctttgcgaatacgcccacgcgatgggtaacagtcttggcggcttcgctaaatactggcaggcgtttcgtcagtacccccgtttacagggcggcttcgtctgggacttggtggatcagtcgctgattaaatatgatgaaaatggcaatccgtggtcggcttacggcggtgattttggcgatacgccgaatgatcgccagttctgcatgaacggtctggtctttgccgaccgcacgccgcatccggcgctgacggaagcaaaacaccagcagcagtttttccagttccgtttatccgggcgaaccatcgaagtgaccagcgaatacctgttccgtcatagcgataacgagctcctgcactggacggtggcgctggatggtaagccgctggcaagcggtgaagtgcctctggatgtcgctccgcaaggtaaacaggtaattgaattgcctgaactaccgcgactggagagcaccgggcaactctggctaacggtacacgtagtgcaaccgaacgcgaccgcatggtcagaagccggacacatcagcgcctggcagcagtggcgtctggcggaaaacctcagcgtgacactcccctccgcgccccacgccatcccgcaactgaccaccagcgaaacggatttttgcatcgagctggataataagcgttggcaatttaaccgccagtcaggctttctttcacagatgtggattggcgataaaaaacaactgctgacgccgctgcgcgatcagttcacccgcgcaccgctggataacgacattggcgtaagtgaagcgacccgcattgaccctaacgcctgggtcgaacgctggaaggctgcgggccattaccaggcagaagcggcgttgttgcagtgcacggcagatacacttgccgacgcggtgctgattaccactgtccacgcatggcagcatcagggaaaaaccttatttattagccggaaaacctaccggattgatggtagtggtcaaatggcgattaccgttgatgttgaagtagcgagcgatacaccgcatccggcacggattggcctgacctgccagctggcgcaggtagcagagcgggtaaactggctcggattagggccgcaagaaaactatcccgaccgccttactgccgcctgttttgaccgctgggatctgccattgtcagacatgtataccccgtacgtcttcccgagcgaaaacggtctgcgctgcgggacgcgcgaattgaattatggcccacaccagtggcgcggcgacttccagttcaacatcagccgctacagccaacaacaactgatggaaaccagccatcgccatctgctgcacgcggaagaaggaacatggctgaatatcgacggtttccatatggggattggtggcgacgactcctggagcccgtcagtatcggcggaattccagctgagcgccggtcgctaccattaccagttggtctggtgtcaaaaataa

SEQ ID NO: 35742 - protein, 1024 aa, Escherichia coli O157:H7 EDL933
MTMITDSLAVVLQRRDWENPGVTQLNRLAAHPPFASWRNSEEARTNRPSQQLRSLNGEWQFVWFPAPEAVPESWLECDLPDADTVVVPSNWQMHGYDAPIYTNVTYPITVNPPFVPTENPTGCYSLTFNVDESWLQEGQTRIIFDGVNSAFHLWCNGRWVGYGQDSRLLSEFDLSAFLRAGENRLAVMVLRWSDGSYLEDQDMWRMSGIFRDVSLLHKPTTQISDFHVATLFNDDFSRAVLEAEVQMYGELRDELRVTVSLWQGETQVASGTAPFGGEIIDERGGYADRVTLGLNVENPKLWSAEIPNIYRAVVELHTADGTLIEAEACDVGFREVRIENGLLLLNGKPLLIRGVNRHEHHPLHGQVMDEQTMVQDILLMKQNNFNAVRCSHYPNHPLWYTLCDRYGLYVVDEANIETHGMVPMNRLTDDPRWLPAMSERVTRMVQRDRNHPSVIIWSLGNESGHGANHDALYRWIKSVDPSRPVQYEGGGADTSATDIICPMYARVDEDQPFPAVPKWSIKKWLSLPGEMRPLILCEYAHAMGNSLGGFAKYWQAFRQYPRLQGGFVWDLVDQSLIKYDENGNPWSAYGGDFGDTPNDRQFCMNGLVFADRTPHPALTEAKHQQQFFQFRLSGRTIEVTSEYLFRHSDNELLHWTVALDGKPLASGEVPLDVAPQGKQVIELPELPRLESTGQLWLTVHVVQPNATAWSEAGHISAWQQWRLAENLSVTLPSAPHAIPQLTTSETDFCIELDNKRWQFNRQSGFLSQMWIGDKKQLLTPLRDQFTRAPLDNDIGVSEATRIDPNAWVERWKAAGHYQAEAALLQCTADTLADAVLITTVHAWQHQGKTLFISRKTYRIDGSGQMAITVDVEVASDTPHPARIGLTCQLAQVAERVNWLGLGPQENYPDRLTAACFDRWDLPLSDMYTPYVFPSENGLRCGTRELNYGPHQWRGDFQFNISRYSQQQLMETSHRHLLHAEEGTWLNIDGFHMGIGGDDSWSPSVSAEFQLSAGRYHYQLVWCQK

SEQ ID NO: 35743 - DNA, 3129 bp, Escherichia coli O157:H7 EDL933
  CDS (1)..(3129): transl_table=11
  misc_feature (228)..(228): y is t or c
  misc_feature (2739)..(2739): y is t or c
atgaatggttccgatttctctctaccgggaggccctatgaatcgctgggaaaacattcagctcacccacgaaaaccgacttgcgccgcgtgcgtactttttttcatatgattctgttgcgcaagcgcgtacctttgcccgcgaaacgagcagcctgtttctgcccttaagcggtcagtggaatttccacttttttgaccatccgctgcaagtgccagaagccttcacytctgagttaatggctgactgggggcatattaccgtccccgccatgtggcaaatggaaggtcacggcaaactgcaatataccgacgaaggttttccgttccccatcgatgtgccgtttgttcccagcgataacccaaccggtgcctatcaacgtattttcaccctcagtgacggctggcagggtaaacagacgctgattaaatttgacggcgtcgaaacctattttgaagtctacgttaacggtcagtatgtgggtttcagcaagggcagtcgcctgaccgcagagtttgacatcagcgcgatggttaaaaccggcgacaacctgttgtgtgtgcgcgtgatgcagtgggcggactctacctacgtggaagaccaggatatgtggtggtcagcggggatcttccgcgatgtttatctggtcggaaaacacctaacgcatattaacgatttcactgtgcgtaccgactttgacgaagcctattgcgatgccacgctttcctgcgaagtggtgctggaaaatctcgccgcctcccctgtcgtcacgacgctggaatataccctgtttgatggcgaacgcgtggtgcacagcagcgccattgatcatttggcaattgaaaaactgaccagcgccagctttgcttttactgtcgaacagccgcagcaatggtcagcagaatccccttatctttaccatctggtcatgacgctgaaagacgccaacggcaacgttctggaagtggtgccacaacgcgttggcttccgtgatatcaaagtgcgcgacggtctgttctggatcaataaccgttatgtgatgctgcacggcgtcaaccgtcacgacaacgatcatcgcaaaggccgcgccgttggaatggatcgcgtcgagaaagatctccagttgatgaagcagcacaacatcaactccgtgcgtaccgctcactacccgaacgatccgcgtttttacgaactgtgtgatatctacggcctgtttgtgatggcggaaaccgacgtcgaatcgcacggctttgctaatgtcggcgatatcagccgtattaccgacgatccgcagtgggaaaaagtctacgtcgagcgcattgttcgccatattcacgcgcagaaaaaccatccgtcgatcatcatctggtcgctgggcaatgaatccggctatggctgtaacatccgcgcgatgtaccacgcagcgaaggcgctggatgacacgcgactggtgcattacgaagaagatcgcgatgctgaagtggtcgatattatttccaccatgtacacccgcgtgccgctgatgaatgagtttggtgaatacccgcatccgaagccgcgcatcatctgtgaatatgctcatgcgatggggaacggaccgggcgggctgacggagtaccagaacgtcttctataagcacgattgtattcagggacattatgtttgggagtggtgcgaccacgggatccaggcgcaggatgacaacggcaatgtctggtataaattcggcggcgactacggcgactatcccaacaactataacttctgtcttgatggtttgatctattccgatcagacgccgggaccaggcctgaaagagtacaaacaggttatcgcgccggtaaaaatccacgcgctggatctgactcgcggcgagctgaaagtcgaaaataaactgtggtttaccacgctggatgactacaccctgcacgcagaggtgcgcgccgaaggtgaaacgctcgcgacgcaacagattaaactgcgcgacgttgcgccgaacagcgaagcccccttgcagatcacgctgccgcagctggacgcccgcgaagcgttcctcaacattacggtgaccaaagattcccgcacccgctacagcgaagccgggcattctatcgccacttatcagttcccgctgaaggaaaacaccgcgcagcctgtacctttcgcaccgaataacgcccgtccgctgacgctggaagacgatcgtttgagctgtactgttcgcggctacaactttgcgatcaccttctcaaaaacgagtggtaaaccgacatcctggcaggtaaatggcgaatcgctgctgacccgcgagccaaagatcaacttcttcaagccaatgatcgacaaccacaagcaggagtacgaagggttgtggcagccgaatcatttgcagatcatgcaggaacatctgcgcgactttgccgtagaacagagcgatggtgaagtgttgatcatcagccgcacggttatagcaccgccggtgtttgacttcgggatgcgctgtacctacatctggcgcatcgctgcagatggccaggttaacgtggcgctttccggcgagcgttacggcgactatccgcacatcattccgtgcatcggtttcaccatggggattaacggcgaatacgatcaggtggcgtattacggtcgtggaccgggcgaaaactacgccgacagccagcaggctaacatcatcgatatctggcgcagcaccgtcgatgccatattcgagaactatccyttcccgcagaacaacggcaaccgtcagcatgtccgctggacggcactgactaaccgccacggcaacggtctgctggtggttccgcagcgcccaattaacttcagcgcctggcactatacccaggaaaacatccacgctgcccagcactgtaacgagctgcagcgcagtgatgacatcaccctgaatctcgaccaccagctgcttggcctcggctccaattcctggggcagcgaggtgctggactcctggcgcgtctggttccgtgacttcagctacggctttacgttgctgccggtttctggcggagaagctaccgcgcaaagcctggcgtcgtatgagttcggcgcagggttcttttccacaaatttgcacagcgagaataagcaatga

SEQ ID NO: 35744 - protein, 1042 aa, Escherichia coli O157:H7 EDL933
MNGSDFSLPGGPMNRWENIQLTHENRLAPRAYFFSYDSVAQARTFARETSSLFLPLSGQWNFHFFDHPLQVPEAFTSELMADWGHITVPAMWQMEGHGKLQYTDEGFPFPIDVPFVPSDNPTGAYQRIFTLSDGWQGKQTLIKFDGVETYFEVYVNGQYVGFSKGSRLTAEFDISAMVKTGDNLLCVRVMQWADSTYVEDQDMWWSAGIFRDVYLVGKHLTHINDFTVRTDFDEAYCDATLSCEVVLENLAASPVVTTLEYTLFDGERVVHSSAIDHLAIEKLTSASFAFTVEQPQQWSAESPYLYHLVMTLKDANGNVLEVVPQRVGFRDIKVRDGLFWINNRYVMLHGVNRHDNDHRKGRAVGMDRVEKDLQLMKQHNINSVRTAHYPNDPRFYELCDIYGLFVMAETDVESHGFANVGDISRITDDPQWEKVYVERIVRHIHAQKNHPSIIIWSLGNESGYGCNIRAMYHAAKALDDTRLVHYEEDRDAEVVDIISTMYTRVPLMNEFGEYPHPKPRIICEYAHAMGNGPGGLTEYQNVFYKHDCIQGHYVWEWCDHGIQAQDDNGNVWYKFGGDYGDYPNNYNFCLDGLIYSDQTPGPGLKEYKQVIAPVKIHALDLTRGELKVENKLWFTTLDDYTLHAEVRAEGETLATQQIKLRDVAPNSEAPLQITLPQLDAREAFLNITVTKDSRTRYSEAGHSIATYQFPLKENTAQPVPFAPNNARPLTLEDDRLSCTVRGYNFAITFSKTSGKPTSWQVNGESLLTREPKINFFKPMIDNHKQEYEGLWQPNHLQIMQEHLRDFAVEQSDGEVLIISRTVIAPPVFDFGMRCTYIWRIAADGQVNVALSGERYGDYPHIIPCIGFTMGINGEYDQVAYYGRGPGENYADSQQANIIDIWRSTVDAIFENYPFPQNNGNRQHVRWTALTNRHGNGLLVVPQRPINFSAWHYTQENIHAAQHCNELQRSDDITLNLDHQLLGLGSNSWGSEVLDSWRVWFRDFSYGFTLLPVSGGEATAQSLASYEFGAGFFSTNLHSENKQ

SEQ ID NO: 35745 - DNA, 2988 bp, Streptomyces coelicolor A3(2)
  CDS (1)..(2988): transl_table=11
gtgctccccatcatcggtgctctccgcccgtgggcggaccctacgatgacatccctgctccgactcccgatgcgcgcgcgtcccgccgccgagggggaccgccggctgtcgctggacggcacctggtccttccggctgttcccctctcccgaccaggtgcctgccgatgccgtgagaggagagcgggcgcccgggcaatggcaatcggtcgacgtgcccggtagctggccggtccaggtggccgacgacattccgcactacacgaacatccagatgccgttcgccgagcctccgccgcggctcccgtcgcgcaaccccacaggtgtgtaccgcacgggcttcgacgtcccgtcccactgggagggccaacggctgctgctgcacgtgggtggcgctgacagtgtgcatgccgtctacctcaacggcgtgttcgtcggatacggcaccgacgcccgtctcgggagcgagtacgacgtgaccgaagcggcccgcgtggggaggaaccagcttgccgtggtcgtcgtgaggtactcggcgcacagcttcctcgaggaccaggacggatggtggctcgccggtctccaccgcggtgtgcgtgtcgaggcccgcccgcctgtcggactcgtcgacctggatgcccgggcggacctcgatccccgctctggtgaaggatcgctcgatgtccgcgccacggtcgacttcggcgagagcacggcggcggagggatatcgcgtccgggtttcgctgtcgggccgcgacggtgcgggagtggcggggcctcaggacgctccggttccccatgcggtcaacaacacctacgagttctccgggcacatcgcccggctgcaccgggacgggcttcggatcctcccctggtcggcggagacgccgacgctctacgaagtcgcagcggagctcatcgacccggccggagacgtggtcgacgcgacccgggtacgcgtgggtttccgacgcgtcgagatcgacgggccggacttcctcgtgaacggccgacgtgtatggatcttcggggtcaaccggcacgaccaccaccccgacaccggtgccgcggtcaccgcggaggacatgcgtgccgacctggcggccatgcgccggatgaacatcaatgccatccgcacatcccactatccgaacgatcccgccttctacgacctctgcgacgaactgggcttctacgtcgtcgacgaggccaacatcgagtcgcacgcgttcaactggtacctctgcggcgacccgcggtaccgcgcgacctggctggagcgcggggcccgcatggtggcgcgtgaccgcaaccatccctgcgtggtccagtggagtctgggcaacgagagcgggtacggcgtcaaccacgacgctctcgcggggtggatccgccgcgccgaccgctcgcgtccgctccactacgaggacgccatccggaactccgggtggaccgacgggggccgtcacgccacggacgtcgtctgcccgatgtatcccggcatcgaggagatccgggcctacggggagcaggtggccgccggggcggcggaccgccccttgatcatgtgcgagtactcgcacgccatgggtaacagcaacggctcactggccgactactgggacgtcatcacctccacgcccggactccagggcggcttcatctgggagtggaaggaccacggcctgcgacagcggctccccgacggaaccacccgcctcgcgtacggtgggcagttcggcgacgcgccccacgacgcgaacttcgtcgcggacggcctggtttccgccgatgtcgagcctcaccccggaacggccgaagtcgcctgggtgtaccggcctgtgaccactgagtacgtggacggcgggttgtacgtgaccaaccgacgtcgtttcgccggcacgggagacctcgcggcaggctgggaactccttctggacggcgctccgtcggcctccggcacgctcgacgtccccgacatcgcgcccggtgggagcgtggccgtgccgctgcccgcggacgcggcgcgcgcgggcgccgcgcaagccctgctgaccattacgtggcggacccgaacagagtcgtggttcgcaccggcggggcatcccgtcgcgtgggaccagctcgctctgcgggacggaagaaccgcccccggcccgccggtgaacggggctgtcgcggtgccgggcgagacggcggacgacccggtgcccaacgtgtggcgcgctgcgacggacaacgatgggctcaagctgatggagcacatcgtccgtgtgagagagatgggatcacgcacccttatccgctggagggacgccggtctggacacgcggcccgcgcacgagatcgtggaccacaccgtctccgtgtccaggagcgagagcggtgcggattaccgtcaccggttcgaggtgcccgacgaggcggcggacctgccgcgtgtcggcgtgctgttccgagtggacccccgattcgaccggttcgtctggttcgggcggggcccgcacgagaactacccggaccggaaccggtcggcgatgttgggccgctggtcgtcgcatgtggaaccctctccctacctcgtgccgcaggaattcgggctgcgcaccgggacactctggcttgagctgatcgacgacgatcgcggcgaccgccttcggctgacctcgctcggtggtgacttctgctggtcggcgacgcggtatgcgcctcaggcgctgttcgccgccgggaacgccagtgatctgcgcgaggacggccgactggtcgtgtgcctggatgcggcgcacaggggggtcgggaccggggcatgcgggcccgacgtcctcccggagtaccggatcggaccgggacgatacgagctggcctaccggatggaactggtccccgcggtgcagggggtggcgggggcgccgccgcacccccaggactcatcgcgtgccgcatcgggtggcggtagtcagtgcaaggaccgtcatgtagggtga

SEQ ID NO: 35746 - protein, 995 aa, Streptomyces coelicolor A3(2)
MLPIIGALRPWADPTMTSLLRLPMRARPAAEGDRRLSLDGTWSFRLFPSPDQVPADAVRGERAPGQWQSVDVPGSWPVQVADDIPHYTNIQMPFAEPPPRLPSRNPTGVYRTGFDVPSHWEGQRLLLHVGGADSVHAVYLNGVFVGYGTDARLGSEYDVTEAARVGRNQLAVVVVRYSAHSFLEDQDGWWLAGLHRGVRVEARPPVGLVDLDARADLDPRSGEGSLDVRATVDFGESTAAEGYRVRVSLSGRDGAGVAGPQDAPVPHAVNNTYEFSGHIARLHRDGLRILPWSAETPTLYEVAAELIDPAGDVVDATRVRVGFRRVEIDGPDFLVNGRRVWIFGVNRHDHHPDTGAAVTAEDMRADLAAMRRMNINAIRTSHYPNDPAFYDLCDELGFYVVDEANIESHAFNWYLCGDPRYRATWLERGARMVARDRNHPCVVQWSLGNESGYGVNHDALAGWIRRADRSRPLHYEDAIRNSGWTDGGRHATDVVCPMYPGIEEIRAYGEQVAAGAADRPLIMCEYSHAMGNSNGSLADYWDVITSTPGLQGGFIWEWKDHGLRQRLPDGTTRLAYGGQFGDAPHDANFVADGLVSADVEPHPGTAEVAWVYRPVTTEYVDGGLYVTNRRRFAGTGDLAAGWELLLDGAPSASGTLDVPDIAPGGSVAVPLPADAARAGAAQALLTITWRTRTESWFAPAGHPVAWDQLALRDGRTAPGPPVNGAVAVPGETADDPVPNVWRAATDNDGLKLMEHIVRVREMGSRTLIRWRDAGLDTRPAHEIVDHTVSVSRSESGADYRHRFEVPDEAADLPRVGVLFRVDPRFDRFVWFGRGPHENYPDRNRSAMLGRWSSHVEPSPYLVPQEFGLRTGTLWLELIDDDRGDRLRLTSLGGDFCWSATRYAPQALFAAGNASDLREDGRLVVCLDAAHRGVGTGACGPDVLPEYRIGPGRYELAYRMELVPAVQGVAGAPPHPQDSSRAASGGGSQCKDRHVG

SEQ ID NO: 35747 - DNA, 3183 bp, Yersinia pestis KIM
  CDS (1)..(3183): transl_table=11
atgacgtcacaggaaaaggtaccactccaggtgcaactgagtcttccccagattttgtcccgccgagattgggaaaacccgcagatcacacagtatcatcgcctggaggcccacccgccttttcacagttggcgtgatgtagaatctgcccagaaggatcgtccttcaccacagcaacaaacactcaatgggctatggtcattcagctatttcacacaacctgaagcggtacccgagcactgggtgaggtgcgatttagccgaggcaaagccgctccctgtaccggctaactggcaacttcatggttatgacgcaccaatttacaccaatatacaataccctattcccgtcaacccaccacgggtcccggatctaaatccaacgggttgctattcccgtgatttcacgttagagccaagctggttggcatcgggtaagactcgcattatttttgacggtgtcagttctgcattttatctgtggtgtaatgggcaatgggtaggttattcacaagacagccgcctacctgctgagttcgatctcaccccctatttgcaggctggcagtaaccgtatcgcagttttagttctgcgctggagtgatgggagttatcttgaagatcaagatatgtggcgtatgagcggaatttttcgtgatgtgaaattgttgcataaacccgagattcacttacgggatatccacatcatgacgcatctatcccctgaattcacctctgcaaatttagaggtaatggcggccgtcaatatcccctctctacagctcaatgatccgcaggtgaccggatcctatcagctccgtgtacaactttggttagccgataaattggtcgccagtttacaacagcctttaggcacccaagccattgatgaacgaggtccttatactgatcgtacccagctagtattgcgaatagatcagcctctgctctggagtgccgagcagccgacgctataccgagccgtggtttccttgctcaatcatcagcaagaattgattgaggccgaagcctatgacgtgggtttcaggcaagtggcaatccatcaaggcttgcttaaaatcaatggcaaagcggtgctgatcagaggggtgaatcgacatgaacatcacccgcaaacaggtcaggccattgatgaagagagtctgttgcaagacattttattaatgaaacagcataattttaatgctgtgcgctgctcccactatcccaatcatcctttatggtaccgcctttgtgaccgctatggtttgtatgtggttgatgaagcgaatattgagacacacggtatgcagcccatgagcaggctgtccgatgacccaagctggttttcagctttcagtgaacgggtgacgcggatggttcagcgagatcgcaaccatccatgcattattatctggtcactgggcaatgaatcaggccatggcgcaacccatgatgccctctatcgttggataaaaaccaatgaccccacccgccctgtgcaatatgaagggggcggtgccaacaccttagcgaccgacattctgtgtccgatgtatgcccgtgttgatgaagaccagccctttcctgccgtccccaagtggtcaatcaaaaaatggattggcttaccgaatgaatctcgccccttgatcctatgtgaatacgcccatgcgatgggcaatagcttcggtggatttgcccgctattggcaggcatttcgtcagtacccgcgcttacagggcgggtttatttgggactgggtagaccaaagtctgactcatcataatgaccatggtcagccttattgggcgtatgggggtgattttggtgatactcccaatgaccgccagttctgcatgaacggattagtcttccctgaccgcagcccgcacccgagcctttatgaagcgcagtgcgcacagcaattcttccaattttcgttgctgagtacgaccccgttggtgatcaacattaccagtgaatatttgttccgagagagtgataacgaacaattatattggcggataatgttagagggagaatccgtgttggagggtagccaacccctgaatttgtcgcctgaaagctcacagtgctacaggttggcagagaaattacccacgcttaataaacctgggcagctatggctgaatgttgagataaggcaaccaaaagaaaccccgtggtcccctgctcaacatcgcagtgcctggcatcaatggcgcttaccacaaccactcttttcgccgtccagtgatctgaccaatgctacagcgcattatgcccctcaactgcaacataaccttcaactacaacatgaccttcaactgcagcaagatgaacagcatattaaggtgacttatcagcaacaatgctggcaattcagtcgtcaaacggggcggttggcgcaatggtgggtggcggataaaccgatgctactgcgcccactacaagatcaatttgtgcgtgcgccgctggataacgatatcggtatcagcgaagctacgcatattgaccccaatgcttgggttgagcgctggaagaaagccggaatgtatcaactccagcaacgctgcctctctctacacgtagatcatttatcccattcagtacaaatcagtgccgaatacggttatgaattcgagcaagagcccttgctacacagccattgggtataccgttttgaccgacatggccgtatgaccattgatgttaacgtccgtatcgctacctcactccctgcgccagccagaattggcatgtgttgccaactggctgatatctcacctacggttgaatggctagggttggggccacatgaaaactaccctgatcggcagcttgcagcacaatatgggcactggtccctgccattagagcagatgcacaccgcgtatattttccccagtgagaatggcttgcgctgcaatacccatacgctgaattatggccgctggacgttaacgggcgatttccactttggtataagtcgctacagcacccagcaactgatggtgacctcccatcaacatctattggaacccgaagagggcacctggctcaatattgatggtttccatatgggggtgggcggtgatgattcatggagcccgagtgttcacattgatgacatactcacccgtgaaacctatcagtaccaaatctgttggcaatacaaggtgtaa

SEQ ID NO: 35748 - protein, 1060 aa, Yersinia pestis KIM
MTSQEKVPLQVQLSLPQILSRRDWENPQITQYHRLEAHPPFHSWRDVESAQKDRPSPQQQTLNGLWSFSYFTQPEAVPEHWVRCDLAEAKPLPVPANWQLHGYDAPIYTNIQYPIPVNPPRVPDLNPTGCYSRDFTLEPSWLASGKTRIIFDGVSSAFYLWCNGQWVGYSQDSRLPAEFDLTPYLQAGSNRIAVLVLRWSDGSYLEDQDMWRMSGIFRDVKLLHKPEIHLRDIHIMTHLSPEFTSANLEVMAAVNIPSLQLNDPQVTGSYQLRVQLWLADKLVASLQQPLGTQAIDERGPYTDRTQLVLRIDQPLLWSAEQPTLYRAVVSLLNHQQELIEAEAYDVGFRQVAIHQGLLKINGKAVLIRGVNRHEHHPQTGQAIDEESLLQDILLMKQHNFNAVRCSHYPNHPLWYRLCDRYGLYVVDEANIETHGMQPMSRLSDDPSWFSAFSERVTRMVQRDRNHPCIIIWSLGNESGHGATHDALYRWIKTNDPTRPVQYEGGGANTLATDILCPMYARVDEDQPFPAVPKWSIKKWIGLPNESRPLILCEYAHAMGNSFGGFARYWQAFRQYPRLQGGFIWDWVDQSLTHHNDHGQPYWAYGGDFGDTPNDRQFCMNGLVFPDRSPHPSLYEAQCAQQFFQFSLLSTTPLVINITSEYLFRESDNEQLYWRIMLEGESVLEGSQPLNLSPESSQCYRLAEKLPTLNKPGQLWLNVEIRQPKETPWSPAQHRSAWHQWRLPQPLFSPSSDLTNATAHYAPQLQHNLQLQHDLQLQQDEQHIKVTYQQQCWQFSRQTGRLAQWWVADKPMLLRPLQDQFVRAPLDNDIGISEATHIDPNAWVERWKKAGMYQLQQRCLSLHVDHLSHSVQISAEYGYEFEQEPLLHSHWVYRFDRHGRMTIDVNVRIATSLPAPARIGMCCQLADISPTVEWLGLGPHENYPDRQLAAQYGHWSLPLEQMHTAYIFPSENGLRCNTHTLNYGRWTLTGDFHFGISRYSTQQLMVTSHQHLLEPEEGTWLNIDGFHMGVGGDDSWSPSVHIDDILTRETYQYQICWQYKV

SEQ ID NO: 35749 - DNA, 3324 bp, Arabidopsis thaliana
  CDS (1)..(3324)
atggtttcgttagcgacccaaatgattcttccatctgaaaatgggtatagagtttgggaggatcagacccttttcaaatggcgtaagagagatcctcatgtcaccttgcgttgccatgaatccgtccaaggggctttgaggtactggtatcagcggaacaacgtggatctcaccgtatcaaaatctgctgtttggaatgatgatgctgttcaagctgctcttgatagcgctgctttttgggttgacggcttgccctttgttaagtctttatctggttactggaagtttttcttggctcctaaacctgctaatgttcctgacaaattttatgatgctgccttttctgattcagactggaatgctttacaggttccttccaactggcagtgtcatggatttgatcggcctatctatacgaatgtggtgtaccctttcccgaatgatcctccttatgttcctgaggataatcctactggttgctacagaacctacttccagattcccaaagaatggaaggacagaagaatacttcttcactttgaagctgtagactccgcattctttgcttggataaatggcaaccctgttgggtacagtcaagacagcaggttacctgctgaatttgaaatatctgattattgctatccatgggactcgggaaaacaaaatgttcttgctgttcaagtctttagatggagtgatggttcataccttgaagaccaagatcattggtggttgtctggtattcatcgagatgtgcttttgttagcaaagcccaaggtcttcattgctgactactttttcaagtcaaaattggcagatgacttttcatacgcagacatccaggttgaagtgaagattgacaatatgcaggagtcctcaaaggatcttgttctttctaacttcatcatagaggctgccatatttgatacaaaaaattggtacaactctgaaggatttagttgtgaactttctcccaaggtggctaatttgaagcttaatccttctccaagcccaactcttggatttcatggttacttgcttgagggaaaactggattcgccaaatctctggtcagctgaacaaccaaatgtttacatcctcgttttaactctaaaagatacatctgggaaagtccttgattctgaatcaagcattgtgggcattcggcaagtatcaaaggcctttaaacagcttcttgttaatgggcacccagtcgtgataaaaggtgtaaacaggcatgagcaccatccacgtgttgggaagacgaatatagaggcatgcatggtcaaggatttaattatgatgaaagaatataatatcaatgcggtgcgaaacagtcattatcctcaacatccccgctggtatgaattatgtgatttgttcggcatgtacatgatcgatgaagccaatatagagacacatggttttgatctctctgggcatctgaagcaccctgcaaaagagccaagctgggcagctgctatgctggatcgagtagttgggatggttgaaagagacaaaaaccatacatgcataatttcttggtcacttggaaatgaggctggctatgggcccaatcattctgccatggcaggttggattagggaaaaggacccctcacggttggtgcactatgaaggtggtggttccagaacaagttctacagatatagtctgccctatgtacatgcgggtttgggacatcatcaagattgcacttgatcaaaatgaatcacggccgttgatattatgcgagtatcaacatgctatgggtaacagcaacgggaatatagatgagtactgggaggcaattgacaatacctttggcctgcaaggaggtttcatatgggactgggttgaccaggggctattgaaactggggtcagatggcattaagcgttgggcatatggaggggactttggtgaccagcctaatgatttgaacttctgtctcaatgggcttatatggcctgaccgaactcctcatccagcactccatgaggttaagcattgttaccaaccaatcaaggtttcattgacggatggcatgataaaggttgcaaacacttactttttcaacacaacagaagaattggagtttagctggacaattcatggggatggtcttgaacttggatctgggactctctctattcctgtgataaagccacaaaatagttttgagatggagtggaagtcaggtccatggttttctttctggaatgactcaaatgctggagaattgtttctgacaataaatgccaagcttttaaatcttactcgttcgcttgaagccggtcatcttttgtcttcaacgcagattcctttaccagcaaagggacaaataataccgcaggcgataaaaaagacagacactagtatcacttgtgaaactgttggagatttcattaagatcagccagaaagattcatgggagctaatggtaaatgtccgaaaagggactattgaaggttggaagattcaaggagttctccttatgaacgaagctatactgccatgcttttggcgagcacctacagacaatgataaaggtggaggtgactctagttatttttcgaggtggaaagcggcacagttagataatgtggagttccttgttgaaagctgttcagtaaagagcatcactgataaatccgtagagatagagttcatttaccttggttcttcagcttctggctcttcaaagtcagatgccttattcaaagtcaatgtgacatatctgatctatggttccggagatatcatcaccaattggtttgtagaaccaaactctgatcttccaccgctaccacgtgtaggtatagaattccacattgaaaaaacactggaccgtgtagaatggtatggcaaaggtccatttgagtgttacccagaccgaaaagcagcagcccatgtggcgatatatgaacacaatgttggagacatgcatgtcccttatattgttccaggagaaaatggaggtagaacagatgttaggtgggtaacattccgaaacaaagatggtgtaggaatatatgcttcaacatatggtagctcttctctaatgcaaatgaatgctagttattatacaaccggtgagcttcaccgtgcaacgcatgaagaggatcttatcaaaggacaaaacatcgaggtgcatctggaccacaaacacatgggtcttgggggagatgatagctggactccatgtgttcacgataagtttctgattccgcctgcacagtattcgttttctctcaggctatgcccaattactgcatccacctcgggtttgaacatctacaaggatcaactcccctgctag

SEQ ID NO: 35750 - protein, 1107 aa, Arabidopsis thaliana
MVSLATQMILPSENGYRVWEDQTLFKWRKRDPHVTLRCHESVQGALRYWYQRNNVDLTVSKSAVWNDDAVQAALDSAAFWVDGLPFVKSLSGYWKFFLAPKPANVPDKFYDAAFSDSDWNALQVPSNWQCHGFDRPIYTNVVYPFPNDPPYVPEDNPTGCYRTYFQIPKEWKDRRILLHFEAVDSAFFAWINGNPVGYSQDSRLPAEFEISDYCYPWDSGKQNVLAVQVFRWSDGSYLEDQDHWWLSGIHRDVLLLAKPKVFIADYFFKSKLADDFSYADIQVEVKIDNMQESSKDLVLSNFIIEAAIFDTKNWYNSEGFSCELSPKVANLKLNPSPSPTLGFHGYLLEGKLDSPNLWSAEQPNVYILVLTLKDTSGKVLDSESSIVGIRQVSKAFKQLLVNGHPVVIKGVNRHEHHPRVGKTNIEACMVKDLIMMKEYNINAVRNSHYPQHPRWYELCDLFGMYMIDEANIETHGFDLSGHLKHPAKEPSWAAAMLDRVVGMVERDKNHTCIISWSLGNEAGYGPNHSAMAGWIREKDPSRLVHYEGGGSRTSSTDIVCPMYMRVWDIIKIALDQNESRPLILCEYQHAMGNSNGNIDEYWEAIDNTFGLQGGFIWDWVDQGLLKLGSDGIKRWAYGGDFGDQPNDLNFCLNGLIWPDRTPHPALHEVKHCYQPIKVSLTDGMIKVANTYFFNTTEELEFSWTIHGDGLELGSGTLSIPVIKPQNSFEMEWKSGPWFSFWNDSNAGELFLTINAKLLNLTRSLEAGHLLSSTQIPLPAKGQIIPQAIKKTDTSITCETVGDFIKISQKDSWELMVNVRKGTIEGWKIQGVLLMNEAILPCFWRAPTDNDKGGGDSSYFSRWKAAQLDNVEFLVESCSVKSITDKSVEIEFIYLGSSASGSSKSDALFKVNVTYLIYGSGDIITNWFVEPNSDLPPLPRVGIEFHIEKTLDRVEWYGKGPFECYPDRKAAAHVAIYEHNVGDMHVPYIVPGENGGRTDVRWVTFRNKDGVGIYASTYGSSSLMQMNASYYTTGELHRATHEEDLIKGQNIEVHLDHKHMGLGGDDSWTPCVHDKFLIPPAQYSFSLRLCPITASTSGLNIYKDQLPC

SEQ ID NO: 35751 - DNA, 3087 bp, Shigella flexneri 2a str. 301
  CDS (1)..(3087): transl_table=11
atgaatcgctgggaaaacattcagctcacccacgaaaaccgacttgcgccgcgtgcgtactttttttcatatgattctgttgcgcaagcgcgtacctttgcccgcgaaaccagcagcctgtttctgcccttaagcagtcagtggaatttccacttttttgaccatccgctgcaagtaccagaagccttcacctctgagttaatggctgactgggggcatattaccgtccccgccatgtggcaaatggaaggtcacggcaaactgcaatataccgacgaaggttttccgttccccatcgatgtgccgtttgtccccagcgataacccaaccggtgcctatcaacgtattttcaccctcagcgacggctggcagggtaaacagacgctgattaaatttgacggcgtcgaaacctattttgaagtctacgttaacggtcagtatgtgggtttcagcaagggcagtcgcctgaccgcagagtttgacatcagcgcgatggttaaaaccggcgacaacctgttgtgtgtgcgcgtgatgcagtgggcggactctacctacgtggaagaccaggatatgtggtggtcggcggggatcttccgcgatgtttatctggtcggaaaacacctaacgcatattaacgatttcactgtgcgtaccgactttgacgaagcctattgcgatgccacgctttcctgcgaagtggtgctggaaaatctcgccgcctcccctgtcgtcacgacgctggaatataccctgtttgatggcgaacgcgtggtgcacagcagcgccattgatcatttggcaattgaaaaactgaccagcgccagctttgcttttactgtcgaacagccgcagcaatggtcagcagaatccccttatctttaccatctggtcatgacgctgaaagacgccaacggcaacgttctggaagtggtgccacaacgcgttggcttccgtgatatcaaagtgcgcgacggtctgttctggatcaataaccgttatgtgatgctgcacggcgtcaaccgtcacgacaacgatcatcgcaaaggccgcgccgttggaatggatcgcgtcgagaaagatctccagttgatgaagcagcacaatatcaactccgtgcgtaccgctcactacccgaacgatccgcgtttttacgaactgtgtgatatctacggcctgtttgtgatggcggaaaccgacgtcgaatcgcacggctttgctaatgtcggcgatatcagccgtattaccgacgatccgcagtgggaaaaagtctacgtcgagcgcattgttcgccatatccacgcacagaaaaaccatccgtcgatcatcatctggtcgctgggcaatgaatccggctatggctgtaacatccgcgcgatgtaccatgcggcgaaagcgctggatgacacgcgactggttcattacgaagaagatcgcgatgctgaagtggtcgatattatttccaccatgtacacccgcgtgccgctgatgaatgagtttggtgaatacccgcatccgaagccgcgcatcatctgtgaatatgctcatgcgatggggaacggaccgggcgggctgacggagtaccagaacgtcttctataagcacgattgcattcagggtcattatgtctgggagtggtgcgaccacgggatccaggcacaggacgaccacggcaatgtctggtataaattcggcggcgactacggcgactatcccaacaactataacttctgtcttgatggtttgatctattccgatcagacgccgggatcgggcctgaaagagtacaaacaggttatcgcgccggtaaaaatccacgcgctgactcgcggcgagttgaaagtcgaaaataaactgtggtttaccacgcttgatgactacaccctgcacgcagaggtgcgcgccgaaggtgaaacgctcgcgacgcagcagattaaactgcgcgacgttgcgccgaacagcgaagcccccttgcagatcacgctgccgcagctggacgcccgcgaagcgttcctcaacattacggtgaccaaagattcccgcacccgctacagcgaagccgggcattctatcgccacttatcagttcccgctgaaggaaaacaccgcgcagccagtgcctttcgcaccaaataatgcgcgtccgctgacgctggaagacgatcgtttgagctgcaccgttcgcggctacaacttcgcgatcaccttctcaaaaatgagtggcaaaccgacatcctggcaggtaaatggcgagtcgctgctgacccgcgagccaaagatcaacttcttcaagccgatgatcgacaaccacaagcaggagtacgaagggttgtggcagccgaatcatttgcagatcatgcaggaacatctgcgcgactttgccgtagaacagagcgatggtgaagtgttgatcatcagccgcacagttattgcaccgccggtgtttgacttcgggatgcgctgtacctacatctggcgcatcgctgccgatggccaggttaacgtggcgctttccggcgagcgttacggcgactatccgcacatcattccgtgcatcggtttcaccatggggattaacggcgaatacgatcaggtggcgtattacggtcgtggaccgggcgaaaactacgccgacagccagcaggctaacatcatcgatatctggcgcagcaccgtcgatgccatgttcgagaactatcccttcccgcagaacaacggcaaccgtcagcatgtccgctggacggcactgactaaccgccacggcaacggtctgctggtggttccgcagcgcccaattaacttcagcgcctggcactatacccaggaaaacatccacgctgcccagcactgtaacgagctgcagcgcagtgatgacatcaccctgaacctcgaccaccagctacttggcctcggctccaactcctggggcagcgaggtgctggactcctggcgcgtctggttccgtgacttcagctacggctttacgttgctgccggtttctggcggagaagctaccgcgcaaagcctggcgtcgtatgagttcggcgcagggttcttttccacgaatttgcacagcgagaataagcaatga

SEQ ID NO: 35752 - protein, 1028 aa, Shigella flexneri 2a str. 301
MNRWENIQLTHENRLAPRAYFFSYDSVAQARTFARETSSLFLPLSSQWNFHFFDHPLQVPEAFTSELMADWGHITVPAMWQMEGHGKLQYTDEGFPFPIDVPFVPSDNPTGAYQRIFTLSDGWQGKQTLIKFDGVETYFEVYVNGQYVGFSKGSRLTAEFDISAMVKTGDNLLCVRVMQWADSTYVEDQDMWWSAGIFRDVYLVGKHLTHINDFTVRTDFDEAYCDATLSCEVVLENLAASPVVTTLEYTLFDGERVVHSSAIDHLAIEKLTSASFAFTVEQPQQWSAESPYLYHLVMTLKDANGNVLEVVPQRVGFRDIKVRDGLFWINNRYVMLHGVNRHDNDHRKGRAVGMDRVEKDLQLMKQHNINSVRTAHYPNDPRFYELCDIYGLFVMAETDVESHGFANVGDISRITDDPQWEKVYVERIVRHIHAQKNHPSIIIWSLGNESGYGCNIRAMYHAAKALDDTRLVHYEEDRDAEVVDIISTMYTRVPLMNEFGEYPHPKPRIICEYAHAMGNGPGGLTEYQNVFYKHDCIQGHYVWEWCDHGIQAQDDHGNVWYKFGGDYGDYPNNYNFCLDGLIYSDQTPGSGLKEYKQVIAPVKIHALTRGELKVENKLWFTTLDDYTLHAEVRAEGETLATQQIKLRDVAPNSEAPLQITLPQLDAREAFLNITVTKDSRTRYSEAGHSIATYQFPLKENTAQPVPFAPNNARPLTLEDDRLSCTVRGYNFAITFSKMSGKPTSWQVNGESLLTREPKINFFKPMIDNHKQEYEGLWQPNHLQIMQEHLRDFAVEQSDGEVLIISRTVIAPPVFDFGMRCTYIWRIAADGQVNVALSGERYGDYPHIIPCIGFTMGINGEYDQVAYYGRGPGENYADSQQANIIDIWRSTVDAMFENYPFPQNNGNRQHVRWTALTNRHGNGLLVVPQRPINFSAWHYTQENIHAAQHCNELQRSDDITLNLDHQLLGLGSNSWGSEVLDSWRVWFRDFSYGFTLLPVSGGEATAQSLASYEFGAGFFSTNLHSENKQ

SEQ ID NO: 35753 - DNA, 3270 bp, Escherichia coli CFT073
  CDS (1)..(3270): transl_table=11
ttgcacgctgtccagcaatcgtttttgccggacagtgctgccgtttattttcgtgatccagttaaagtaaatgcatttactcgctactttttagtaaaatttttactaaactccccagcaattacacaaactaccatcaccatgaatggttccgatttctctctaccgggaggccctatgaatcgctgggaaaacattcagctcacccacgaaaaccgacttgcgccgcgtgcgtactttttttcatatgattctgttgcgcaggctcgtacttttgcccgtgaaaccagcagcctgtttctgcccttaagcggtcagtggaatttccacttttttgaccatccgctgcaagtgccagaagccttcacctctgagttaatggctgactgggggcatattaccgtccccgccatgtggcaaatggaaggtcacggcaaactgcaatataccgacgaaggttttccgttccccatcgatgtgccgtttgtccccagcgataacccaaccggtgcctatcaacgtattttcaccctcagcgacggctggcagggtaaacagacgctgattaaatttgacggcgtcgaaacctattttgaagtctacgttaacggtcagtatgtggggttcagcaagggcagtcgcctgaccgcagagtttgacatcagcgcgatggttaaaaccggcgacaacctgttgtgtgtgcgcgtgatgcaatgggcggactctacctacgtggaagaccaggatatgtggtggtcggcggggatcttccgcgatgtttatctgatcggaaaacaactcacgcacattaacgatttcaccgtgcgcaccgactttgacgaagcctattgcgatgccacactttcctgcgaagtggtgctggaaaatctcgccgcctcccctgtcgtcacgacgctggaatataccctgtttgatggcgaacacgtggtgcacagcagcgccattgatcatttggcaattgaaaaactgaccagcgcccgctttgcttttactgtcgaacagccgcagcaatggtcagcagaatccccttatctttaccatctggtcatgacgctgaaagacgccgacggcaacgttctggaagtggtgccacaacgcgttggcttccgtgatatcaaagtgcgcgacggtctgttctggatcaataaccgttatgtgatgctgcacggcgtcaaccgccacgacaacgatcatcgcaaaggccgcgccgttgggatggatcgcgtcgagaaagatctccagttgatgaagcagcacaacatcaactccgtgcgtaccgctcactacccgaacgatccacgtttttacgaactgtgcgatatctacggcctgtttgtgatggcggaaaccgacgtcgaatcgcacggctttgctaatgtcggcgatatcagccgtattaccgacgatccgcagtgggaaaacgtctacgtcgagcgcattgttcgccatattcacgcgcagaaaaaccatccgtcgatcatcatctggtcgctgggcaatgaatccggctatggctgtaacatccgcgcgatgtaccatgcggcgaaggcgctggatgacacgcgactggtgcattacgaagaagatcgcgatgctgaagtggtcgatattatttccaccatgtacacccgcgtgccgctgatgaatgagtttggtgaatacccgcatccgaagccgcgcatcatctgtgaatatgctcatgcgatggggaacggaccgggcgggctgacggagtaccagaacgtcttctataagcacgattgcattcagggacattatgtctgggaatggtgcgaccacgggatccaggcgcaggatgacaacggcaacgtctggtacaaattcggcggcgactacggcgactatcccaacaactataacttctgtcttgatggtttgatctattccgatcagacgccgggaccaggcctgaaagagtacaaacaggttattgcgccggtaaaaatccacgcgctggatctgactcgcggcgagttgaaagtcgaaaataaactgtggtttaccacgctagatgactacaccctgcacgcagaggtgcgcgccgaaggtgaaacgctcgcgacgcaacagattaaactgcgcgacgttgcgccgaacagcgaagcccccttacagatcacgctgccgcagctggacgcccgcgaagcgttcctcaacattacggtgaccaaagattcccgcacccgctacagcgaagccgggcattctatcgccacttatcagttcccgctgaaggaaaacaccgcgcagcctgtacctttcgcaccgaataacgcccgtccgctgacgctggaagacgatcgtttgagctgtactgttcgcggctacaactttgcgatcaccttctcaaaaacgagtggtaaaccgacatcctggcaagtgaatggcgagtcgctgctgacccgcgagccaaagatcaacttcttcaagccgatgatcgacaaccataagcaggagtacgaagggctgtggcagccaaatcatttgcagatcatgcaggagcatctgcgcgattttgtcgttgagcaaagtgatgatgaagtgttgctagtcagccgcacggttattgccccaccggtgtttgacttcgggatgcgctgcacctacatctggcgcatcgctgccgatggccaggttaacgtggcgctttccggcgaacgttatggcgactatccgcacatcattccgtgcatcggtttcaccatgggaattaacggcgaatacgaccaggtggcgtattacggacgtggaccgggcgaaaactacgccgacagccagcaggctaacatcatcgatatctggcgcagcaccgtcgatgccatgttcgagaactatcccttcccgcagaacaacggtaaccgtcagcatgtccgctggacggcactgactaaccgccacggcaacggtctgctggtggttccgcagcgaccaattaacttcagcgcctggcactatacccaggaaaacatccacgctgcccagcactgtaacgagctgcagcgcagtgatgacatcactctgaatctcgaccaccagctgcttggcctcggctccaactcctggggcagcgaggtgctggactcctggcgcgtctggttccgtgacttcagctacggctttacgttgctgccggtttctggcggagaagctaccgcgcaaagcctggcgtcgtatgagttcggcgcagggttcttttccacgaatttgcacagcgagaataagcaatga

SEQ ID NO: 35754 - protein, 1089 aa, Escherichia coli CFT073
MHAVQQSFLPDSAAVYFRDPVKVNAFTRYFLVKFLLNSPAITQTTITMNGSDFSLPGGPMNRWENIQLTHENRLAPRAYFFSYDSVAQARTFARETSSLFLPLSGQWNFHFFDHPLQVPEAFTSELMADWGHITVPAMWQMEGHGKLQYTDEGFPFPIDVPFVPSDNPTGAYQRIFTLSDGWQGKQTLIKFDGVETYFEVYVNGQYVGFSKGSRLTAEFDISAMVKTGDNLLCVRVMQWADSTYVEDQDMWWSAGIFRDVYLIGKQLTHINDFTVRTDFDEAYCDATLSCEVVLENLAASPVVTTLEYTLFDGEHVVHSSAIDHLAIEKLTSARFAFTVEQPQQWSAESPYLYHLVMTLKDADGNVLEVVPQRVGFRDIKVRDGLFWINNRYVMLHGVNRHDNDHRKGRAVGMDRVEKDLQLMKQHNINSVRTAHYPNDPRFYELCDIYGLFVMAETDVESHGFANVGDISRITDDPQWENVYVERIVRHIHAQKNHPSIIIWSLGNESGYGCNIRAMYHAAKALDDTRLVHYEEDRDAEVVDIISTMYTRVPLMNEFGEYPHPKPRIICEYAHAMGNGPGGLTEYQNVFYKHDCIQGHYVWEWCDHGIQAQDDNGNVWYKFGGDYGDYPNNYNFCLDGLIYSDQTPGPGLKEYKQVIAPVKIHALDLTRGELKVENKLWFTTLDDYTLHAEVRAEGETLATQQIKLRDVAPNSEAPLQITLPQLDAREAFLNITVTKDSRTRYSEAGHSIATYQFPLKENTAQPVPFAPNNARPLTLEDDRLSCTVRGYNFAITFSKTSGKPTSWQVNGESLLTREPKINFFKPMIDNHKQEYEGLWQPNHLQIMQEHLRDFVVEQSDDEVLLVSRTVIAPPVFDFGMRCTYIWRIAADGQVNVALSGERYGDYPHIIPCIGFTMGINGEYDQVAYYGRGPGENYADSQQANIIDIWRSTVDAMFENYPFPQNNGNRQHVRWTALTNRHGNGLLVVPQRPINFSAWHYTQENIHAAQHCNELQRSDDITLNLDHQLLGLGSNSWGSEVLDSWRVWFRDFSYGFTLLPVSGGEATAQSLASYEFGAGFFSTNLHSENKQ

SEQ ID NO: 35755 - DNA, 2994 bp, Vibrio vulnificus CMCP6
  CDS (1)..(2994): transl_table=11
atggcccatgctcgcgatggtattcacgcccagcgtcaatcgctaaatggacaatggaaattcaaactgtttgatgcgccagagcaggtggatggccagttcacgcaggccgatttcaatgacgcggaatgggatgagatccccgtgccgtctaactggcaactgcaaggttacgacaaacccatttacgccaatattaaatacccatttgacgtaaacccgccgtttgtaccaagtgataacccaaccggttgctaccgcactagggtatcgttgtcgccagaagatttgctcaacacccaacgcatcatcttcgacggtgtgaattcggcgttccatctttggtgtaacggcacttgggttggctacagtcaagacagccgtttgcctgccgagtttgatctcacatcgcatctcgtggcgggggaaaatacgctcgcggtcatggtgatgcgttggtgtgatggcagctatctagaagaccaagacatgtggtggctaagcggtatcttccgtgacgtgacattgctgtcgaaaccacaacactgcattgaagatgtgttcatcacgccggagctcgacgcctgctatcgcgacggctcgctctccatcgtcaccaccattgcagcgccagaaacctatcaagtacaggttcaattgtttgagggtacacaagcggtcactgagccaaacatcgctcgcccacacaaccgtcgcatcgacgagcggggcacttggaatgatgatgtggtattccaaaccctacacctacgcgagccaaagaaatggacggcggaaacaccgaacctctaccgcttagttgtttcactgttggatgaaaatggcacgcatctcgagagcgaagcgtaccctgtgggctttcgtaaagtggaaatcagcgagggtcaattgaagctcaacggcaagccgctgctgatccgcggggtcaatcgccacgagcatcatcctgagctgggccatgtgatgacagaagaggatatgatccgcgacatctgcctgatgaaacaatacaacttcaacgcagtgcgcaccgctcactatccgaaccatccgcgttggtacgaactgtgtgaccaatacggcttgtacgtgtgtgatgaagcaaacattgaaacccacggcatgcagccaatgagccgcttatcgagcgatccgcaatgggcgcacgcgtacatgagtcgctacacccaaatggtcctgcgcgataagaaccatccatcaatcatcatctggtctttaggtaatgaatcgggccacggcagcaaccacaatgcgatgtacgcttggtcgaaaaactttgatccgtcacgccctgtgcaatacgaaggcggcggttcaaacaccacggcaaccgacattattgcgccgatgtacgctcgcgtgaatacccttgttgccgatgaagcggtgccaaaatggccaatcaaaaaatggatttctctccccaacgaaacgcgcccattgatcttgtgcgaatacgcccatgccatgggcaatagcctaggcagttttgatgaatactgggcggcctttcgcgagttcccacgcctacaaggcggctttatttgggattgggtcgaccaaggcttgagccaatgggatgaaaacggccagcacttctgggcttacggcggcgattttggcgatgaaatcaatgaccgccagttctgcatcaacggtttgatcttccccgatcgcaccgtgcatccaacgttgcaagaagcaaaatactgccagcgcatgatcaccgtctcgctgcaagagcaaacccaaaaagcgtgcacactgttggtgaccaacgagaacctgttccgtaccactgataacgagcaattgaactggtcactgttggaaaatggccaagtcatccaaacgggttcacaggtgcttagcgtagaggctgacagccaaacacgccttgaaattgcgctgaatttcacgccaaaagcgcaggcgcaatactacttaaataccgacatctgccttattgaagcgacgtcatgggctcccgctggccatgtggtggcgacagagcaaatggcgctgcgcaatcacgctggccttgccatgccaactttgcgcacacagcctgcacccaagctgaccgaaaacggccacgccattgtggtcagcagtctggatgaaaagcatcaatggcgctgggatagccaaagcggtttgctgatggaatggaacgtggatggcaaagcgcaaatgctggccgcgccgcaagacaacttcttccgcgccccgctggataacgacatcggcatcagtgaagtggataacgttgatcccaatgcttgggtgtgccgctgggagatggcgggcattggtcagtgggagcgtcattgcgtccagtgcgagagcgaaacgctcgctcacgccgtggtcgtgaccaccacgtttgcctaccactttggcggcgacgtgcaagccattacccagtggacgcacacactcagcaacgatggcgagatgctattggatgtcgacgtcacattggcagatgctctgccgccgatgccgcgtattggcttggagttgcaactgccgcttcaccaagccgacacgccgatcacatggcaaggcttaggcccatttgaaaactacccagatcgcttagccgcagcacgttttggcttacatactcaaacactggcgcagatgcacacaccgtacatcttcccaaccgacagcggcctgcgttgtggcacgcagtggctgcaagtgaacgagttggccatctcgggtgatttccagttcagtgttagccaatacgctcagcaacaattggcagaagcgaaacatacccatgatttgctagcgcaagagcggatttacctgcgtctagaccaccagcacatgggggttggcggtgacgattcttggagcccaagtgtgcacaaagaattccaattaacggagaaacactaccgctaccagttgcgatttagcccggcttcacgctag

SEQ ID NO: 35756 - protein, 997 aa, Vibrio vulnificus CMCP6
MAHARDGIHAQRQSLNGQWKFKLFDAPEQVDGQFTQADFNDAEWDEIPVPSNWQLQGYDKPIYANIKYPFDVNPPFVPSDNPTGCYRTRVSLSPEDLLNTQRIIFDGVNSAFHLWCNGTWVGYSQDSRLPAEFDLTSHLVAGENTLAVMVMRWCDGSYLEDQDMWWLSGIFRDVTLLSKPQHCIEDVFITPELDACYRDGSLSIVTTIAAPETYQVQVQLFEGTQAVTEPNIARPHNRRIDERGTWNDDVVFQTLHLREPKKWTAETPNLYRLVVSLLDENGTHLESEAYPVGFRKVEISEGQLKLNGKPLLIRGVNRHEHHPELGHVMTEEDMIRDICLMKQYNFNAVRTAHYPNHPRWYELCDQYGLYVCDEANIETHGMQPMSRLSSDPQWAHAYMSRYTQMVLRDKNHPSIIIWSLGNESGHGSNHNAMYAWSKNFDPSRPVQYEGGGSNTTATDIIAPMYARVNTLVADEAVPKWPIKKWISLPNETRPLILCEYAHAMGNSLGSFDEYWAAFREFPRLQGGFIWDWVDQGLSQWDENGQHFWAYGGDFGDEINDRQFCINGLIFPDRTVHPTLQEAKYCQRMITVSLQEQTQKACTLLVTNENLFRTTDNEQLNWSLLENGQVIQTGSQVLSVEADSQTRLEIALNFTPKAQAQYYLNTDICLIEATSWAPAGHVVATEQMALRNHAGLAMPTLRTQPAPKLTENGHAIVVSSLDEKHQWRWDSQSGLLMEWNVDGKAQMLAAPQDNFFRAPLDNDIGISEVDNVDPNAWVCRWEMAGIGQWERHCVQCESETLAHAVVVTTTFAYHFGGDVQAITQWTHTLSNDGEMLLDVDVTLADALPPMPRIGLELQLPLHQADTPITWQGLGPFENYPDRLAAARFGLHTQTLAQMHTPYIFPTDSGLRCGTQWLQVNELAISGDFQFSVSQYAQQQLAEAKHTHDLLAQERIYLRLDHQHMGVGGDDSWSPSVHKEFQLTEKHYRYQLRFSPASR

SEQ ID NO: 35757 - DNA, 3279 bp, Bacteroides thetaiotaomicron VPI-5482
  CDS (1)..(3279): transl_table=11
atgaaaatatatacattactgcttggcgcattggtcgcttgcccgatgcaggcacaaacaatgcatgactgggagaatcatcatgttctccagattaatcgtaaaccggcacgggctgcttttactcctttctccgtacagaaaggagactgctcgatgtctttggacggaacatggaagttccgatggactcctgttccgggcgaaagaatcatagatttctatcagactgattttaatgataaagactggaaggactttcctgttcctgccaattgggaagtcaatggatatggcacgcctatttatgtatctgcaggttatccgtttaagatagatcctccgcgagtaatgggagagccgaaagctgactatacgacctataaagaacgaaacccggtcgggcagtatcggcgcacattcgttttgcctgtgggatgggaagcggacggacagacttttttgcgctttgaaggagtgatgagtgctttctatgtttggataaatggcgaacgggtagggtatagccaaggtagtatggagccaagtgaatttaacatcaccgactatctgaagactggtgagaatcagatagcattggaagtgtaccgttatagtgacgggtcttatctcgaagatcaggacttctggcgttttggcggcattcatcgtagtattcatctgatacatacacctgatgttcgtatgcgtgattatacaatacgcactcttcctgcatctgccggcaattataaggactttattttgcagatcgatccgcaatttagtgtatacagaggtatgaccggaaaaggatataccctgcaagctgtgttgaaagacgcaagtggaaaggagataataaagttacagggagaggtggaagaaatactggatctggagcataaagcaagccggatgaatgagtggtatccgcagcgtggaccacgtaagacaggacgtctgtcagccatgataaaatcaccggaaagatggacagcggagacaccctatctttataaattacaccttactttgcagaatgcggaaggaaaagtgatagaacaggcggagcagtcggtcggtttccgtactgtagaaatcaataaaggacaattactgattaacggtaatccggttcgcttcagaggtgtgaatcgtcatgaacacgatccacggacggcacgcgtaatgagtgaagaaagaatgcttcaggatatactgctgatgaaacaggcaaatatcaatgccgttcgtaccagccattatcccaatgtgagccgctggtatgaactctgtgatagtttagggctttatgtgatggatgaagcggatatcgaagagcatggtctgcgcgggacactggcaagtactcccgattggtatgctgcattcatggatcgtgcggtccgcatggcagaacgtgataagaactatccaagtatcgtgatgtggagtatgggaaatgaaagcggctacggaccgaactttgcagctatttctgcatggttacacgattttgatcctacacgccccgttcattatgaaggtgcgcagggagtagatggcaatcctgatccgaagacggtcgatgtgatcagccgtttctatacccgtgtgaaacaagaatatctgaatccgggcattgcagaaggagaagacaaagaacgtgcggaaaatgcacgttgggaacgactgttggaaatagcggaacgtaccaatgatgaccgtccggtaatgacaagcgaatatgcccattcgatgggaaatgcgttgggcaactttaaagaatattgggatgaaatatatagcaatccccgtatgctgggcggtttcatatgggactgggtagatcagggaatttataaagaattgcctgatggccgcattatggtggcgtatggcggagacttcggtgataagccgaatctgaaagctttctgctttaatggtctattgatgagtgatcgtgagacgactccgaagtattgggaagtaaagaaagtatatgcaccggttcagttggccgtcaacaatggacaattgatcgttacaaacaggaatcatcatatagacttatctcagtatcgctgcttatggacattgacaatagatggtaaacagaaagaacagggagaaatcacattaccgaaagtcgctccgggtgagagtgaaacaattactttaccagctttccgttccttatcggacaagaaggctttaaacagaaaaggcaacaacagcaactcaacgaatacgctttctgattgtctgctaaaagtaagcatcgtattgaaatctgatgctctttgggcgaaagccggtcatgaagttacttgggaacaattctgcttacagcaaggagaattgttgtctgccgatctgatcaataaaggagcgctgcaagtaaaagaggatgataaatctttatcagttagcggacgcggtttctcggttcagtgggaaaagaaagcagtcggaagtataacttcccttatgtacaatggcaaagaaatattgactcagaatcattttccggttcagcctgtcacgcaagcattccgtgcaccgacagacaatgacaagagtttcggaaactggctggcaaaagactggcaactgcatggcatggaccatcctctgattagtctggagtctttcgatcatgaagtacgtgcagatggggcagtcatagtacgtatccggacgactaatttatataaagaaggtaacgtgacaacgacatccgtctataccatttcttccgatggagtcattgatctgaaaacaactttcttaccgcaaggagtacttccggaattgcctcgtttggggcttgcattctgtctggctcctgcctataatacctttacatggtatggcagaggaccgcaggataattatcccgatcgcaagacatctgctgcaacaggactctggaaaggaacggtagcagaacagtatatacattatcctcgtccgcaggatagtggaaataaggaagaagtacaattttttacgctgacagacaaacagaataaaggtatccgtgtagacgcggtagaagatgtattttctgcctctgctttgcattatactgcacaggatttatataaagaaactcatgactgcaatctgaagccacgtcccgaaattattctcagtatggacgcggccgtgctcggattagggaatagcagctgcggaccgggcgtactgaagaagtatgctattgagaaaaaagaacatacgctgcatatacgcatcagcaagcagtaa

SEQ ID NO: 35758 - protein, 1092 aa, Bacteroides thetaiotaomicron VPI-5482
MKIYTLLLGALVACPMQAQTMHDWENHHVLQINRKPARAAFTPFSVQKGDCSMSLDGTWKFRWTPVPGERIIDFYQTDFNDKDWKDFPVPANWEVNGYGTPIYVSAGYPFKIDPPRVMGEPKADYTTYKERNPVGQYRRTFVLPVGWEADGQTFLRFEGVMSAFYVWINGERVGYSQGSMEPSEFNITDYLKTGENQIALEVYRYSDGSYLEDQDFWRFGGIHRSIHLIHTPDVRMRDYTIRTLPASAGNYKDFILQIDPQFSVYRGMTGKGYTLQAVLKDASGKEIIKLQGEVEEILDLEHKASRMNEWYPQRGPRKTGRLSAMIKSPERWTAETPYLYKLHLTLQNAEGKVIEQAEQSVGFRTVEINKGQLLINGNPVRFRGVNRHEHDPRTARVMSEERMLQDILLMKQANINAVRTSHYPNVSRWYELCDSLGLYVMDEADIEEHGLRGTLASTPDWYAAFMDRAVRMAERDKNYPSIVMWSMGNESGYGPNFAAISAWLHDFDPTRPVHYEGAQGVDGNPDPKTVDVISRFYTRVKQEYLNPGIAEGEDKERAENARWERLLEIAERTNDDRPVMTSEYAHSMGNALGNFKEYWDEIYSNPRMLGGFIWDWVDQGIYKELPDGRIMVAYGGDFGDKPNLKAFCFNGLLMSDRETTPKYWEVKKVYAPVQLAVNNGQLIVTNRNHHIDLSQYRCLWTLTIDGKQKEQGEITLPKVAPGESETITLPAFRSLSDKKALNRKGNNSNSTNTLSDCLLKVSIVLKSDALWAKAGHEVTWEQFCLQQGELLSADLINKGALQVKEDDKSLSVSGRGFSVQWEKKAVGSITSLMYNGKEILTQNHFPVQPVTQAFRAPTDNDKSFGNWLAKDWQLHGMDHPLISLESFDHEVRADGAVIVRIRTTNLYKEGNVTTTSVYTISSDGVIDLKTTFLPQGVLPELPRLGLAFCLAPAYNTFTWYGRGPQDNYPDRKTSAATGLWKGTVAEQYIHYPRPQDSGNKEEVQFFTLTDKQNKGIRVDAVEDVFSASALHYTAQDLYKETHDCNLKPRPEIILSMDAAVLGLGNSSCGPGVLKKYAIEKKEHTLHIRISKQ

SEQ ID NO: 35759 - DNA, 3069 bp, Bacteroides thetaiotaomicron VPI-5482
  CDS (1)..(3069): transl_table=11
atgaaattaaagaaacgaacgtttttaatcttgatggcagcactgactgctaccttcgcttcggctcagaaacagcctttgccggagtggcagagccagtatgcggtaggactgaataaactcgctcctcatacctatgtatggccttacgccgacgcttccgatattggaaagccgggaggatatgaacagtctccttattatatgagtctgaacgggaagtggaaatttaactgggtgaagaacccggacaaccgtccgaaggacttttaccagccctcttattataccggagggtgggcggatattaatgttcccggcaactgggaacggcaaggctacggaacagctatctatgtcaacgaaacttatgagtttgacgacaagatgttcaacttcaagaagaatccgccattggttccatttgctgagaatgaagtaggttcttatcgtcgcacgtttaaggtgcctgccgactggaaaggacgtcgggtagtgctctgctgcgaaggagtgatctctttctattatgtatgggtgaacggaaagttgcttggctataatcagggatcgaagacggctgccgaatgggacattaccgatgtactgagtgaaggagagaatgtggtagctctggaagtatatcgctggagttcgggtgcttatctggaatgtcaggatatgtggcgtctgagtggcatcgaacgggatgtttatctgtatagcactcccaaacagtatattgctgactataaagtaagtgcttcccttgataaagagaaatacaaagaaggtatcttcaatctggaagtgacggtggaaggcccttctgctactgccagctctatcgcttatacactgaaggatgcttccggaaaggcagtattgcaggatgccattaacatcaagtcccgtggactgagtaactttatcgctttcgatgagaagaagattgcagaagtaaaagcatggaatgcggagcatcctaacctttataccttggtactcgaattaaaagatgcgcaaggaaaagtaaccgaactgaccggttgtgaagtcggtttccgtacttcggaaatcaaggacggacgtttctgtattaacggtgttccggtgctggtgaaagggacgaaccgtcacgaacattcgcaactgggacgtaccgtaagcaaagaactgatggaacaggatatccgcctgatgaaacagcataatatcaacatggtgcgtaactcacattatccgactcatccgtactggtatcagctttgcgaccgctacgggctgtatatgattgatgaggcgaatatcgaatcgcatggcatgggatacgggcctgcctcccttgccaaagacagtacttggctgaccgctcacatggaccgtacacaccgtatgtacgaacgttccaagaatcatccggctatcgtgatctggtcacagggcaatgaagccggcaacggcatcaacttcgaacgtacttacgactggctgaaatcggtagagaaaggccgtcccgtgcaatatgaacgtgctgaactgaattacaacacggacatctattgccgtatgtaccgcagtgtggacgaaattaaggcatacgtgggtaagaaggatatttaccgtcctttcattctttgcgaatatctgcacgctatgggtaacagttgcggtggaatgaaagaatactgggaagtctttgaaaatgagccgatggcacaagggggctgcatttgggactgggtggatcagaacttccgtgaaatagacaaagacggaaaatggtactggacttatggaggcgattacggaccggaaggaatccccagcttcggtaatttctgtggcaacggtctggtgaatgctgttcgtgaaccgcatccgcatctactcgaagtgaagaaaatatatcagaacatcaaagcgactttgtcagaccggaagaatctgaaagtctgcataaagaactggtatgacttttctaatctgaatgaatatatcctgcgttggaatgtgaaaggggaggatggaaccgtacttgccgaaggcacgaaggaagtagactgcgagccgcacgctacggtagatgtcactttgggtgccgtcaaacttccgaataccgttcgggaagcctatctgaacctaagctggagccgtaaagaggccactccgctagtggataccgactgggaagtggcatacgaccagtttgtacttgccggtaataagaatacgacggcttatcgtccgcagaaggcgggagaaacagcttttgttgtggacaagaataccggggcactttcttccctgactttggatggaaaggaattgctggctgcaccaatcactttgagcctgttccgtccggctacggataatgataaccgggataggaacggagcccgtctgtggcgcaaggcaggtttgaacaatctgacacagaaagtggtgtcactgaaagaagaaaagacatcggcaacggtccgtgctgagattcttaatgggaaaggacagaaagtaggaatggcggattttgtttatgcactcgacaagaacggggcattgaaggttcgcaccaccttccagccggatacggcgattgtgaagtcgatggctcgtctggggctgaccttccgcatggcagatgcttataatcaagtatcttatctgggacgtggcgatcatgaaacgtatatcgaccgcaaccagtccggtaggataggactgtatgatacgacggtagaacggatgttccactattacgctaccccacaatctacagctaaccggacagatgtacgctgggcgaaactgacggatcaggcaggcgaaggtgtctttatggaatcgaatcgtcctttccagtttagtatcattcctttctcggatgtattattagagaaggcgcaccacattaatgaactggagcgtgacggaatgataactatacatctggatgccgaacaggcaggagtaggtacggctacctgcggaccgggtgtattgccgcaatatctggtaccggtgaaaaagcagagttttgaatttacgctttatccggtaaaatag

SEQ ID NO: 35760 - protein, 1022 aa, Bacteroides thetaiotaomicron VPI-5482
MKLKKRTFLILMAALTATFASAQKQPLPEWQSQYAVGLNKLAPHTYVWPYADASDIGKPGGYEQSPYYMSLNGKWKFNWVKNPDNRPKDFYQPSYYTGGWADINVPGNWERQGYGTAIYVNETYEFDDKMFNFKKNPPLVPFAENEVGSYRRTFKVPADWKGRRVVLCCEGVISFYYVWVNGKLLGYNQGSKTAAEWDITDVLSEGENVVALEVYRWSSGAYLECQDMWRLSGIERDVYLYSTPKQYIADYKVSASLDKEKYKEGIFNLEVTVEGPSATASSIAYTLKDASGKAVLQDAINIKSRGLSNFIAFDEKKIAEVKAWNAEHPNLYTLVLELKDAQGKVTELTGCEVGFRTSEIKDGRFCINGVPVLVKGTNRHEHSQLGRTVSKELMEQDIRLMKQHNINMVRNSHYPTHPYWYQLCDRYGLYMIDEANIESHGMGYGPASLAKDSTWLTAHMDRTHRMYERSKNHPAIVIWSQGNEAGNGINFERTYDWLKSVEKGRPVQYERAELNYNTDIYCRMYRSVDEIKAYVGKKDIYRPFILCEYLHAMGNSCGGMKEYWEVFENEPMAQGGCIWDWVDQNFREIDKDGKWYWTYGGDYGPEGIPSFGNFCGNGLVNAVREPHPHLLEVKKIYQNIKATLSDRKNLKVCIKNWYDFSNLNEYILRWNVKGEDGTVLAEGTKEVDCEPHATVDVTLGAVKLPNTVREAYLNLSWSRKEATPLVDTDWEVAYDQFVLAGNKNTTAYRPQKAGETAFVVDKNTGALSSLTLDGKELLAAPITLSLFRPATDNDNRDRNGARLWRKAGLNNLTQKVVSLKEEKTSATVRAEILNGKGQKVGMADFVYALDKNGALKVRTTFQPDTAIVKSMARLGLTFRMADAYNQVSYLGRGDHETYIDRNQSGRIGLYDTTVERMFHYYATPQSTANRTDVRWAKLTDQAGEGVFMESNRPFQFSIIPFSDVLLEKAHHINELERDGMITIHLDAEQAGVGTATCGPGVLPQYLVPVKKQSFEFTLYPVK

SEQ ID NO: 35761 - DNA, 3075 bp, Bacteroides thetaiotaomicron VPI-5482
  CDS (1)..(3075): transl_table=11
atgataaaaatgaataatttgttgaaaccatttttcttaatgatgctggcggcgcccgctatcatttccactacggcacaacagcaacagcctgaatggcagagccagtatgccgtaggattgaacaagctcgatcctcatacttatgtatggccttatgcagatgcttcggaggtggagaaaggcacattcgagcagtcaccttattatatgagtctgaacgggcagtggaagttccattgggtgaagaatccggacactcgtccaaaagatttttataagccgtcgtactatacaggtggatgggcagatataaaggtgccgggaaactgggaacgtcagggatatggtacggctatttatgtgaatgagacgtacgagtttgatgataagatgtttaatttcaaaaagaatcctcctttggtaccttacaaagagaacgaggtcggttcttatcggcggacttttaaagtgcctgccggatgggaaggacgtcgtgtggtactctgctgtgaaggagtgatatcgttttattatgtatgggtaaacggtgagtttctcggatacaatcaaggttccaagactgctgccgaatgggatatcacggacaagctcaccgacggagaaaatacgattgcgcttgaagtatatcgctggagttcgggagcatatttggaatgtcaggatatgtggcgattgagtggtattgaacgggatgtgtatctttacagcactcccgaacaatatattgccgattacaaggtgacttcccttctcgaaaaagaacattacaaagagggtatcttcgaactggaggtggcagtcggaggaacggcttcgggaacgtcctccattgcttatacattgaaagatgcttcggacaagacagtgctggaaggaagccggaagctggaatcacatggatcgggcaatctgatcgtattcgatgaacagcgccttcctgatgtgagaagatggaatgcggagcatcccgaactttataccttgttgttggagttgaaagatgccggaggaaaggttacggaaataaccggaacaaaagtcgggttcagaacttctgagataaagaacggacgtttctgtataaacggtgtgcctgtattggtgaaaggtgttaaccggcacgaacattcgcaactcggacgtacagtaagcaaagaactgatggaacaggatatcaggttaatgaaacagcataacatcaatacggtacgcaactcgcattatccggcacatccctactggtatcagctttgcgaccgttacggactttatgtgattgatgaggctaatattgaatcgcacggtatgggttatggtcctgcctctcttgcaaaggacagtacgtggcttcctgcccatatagaccgtacacgccgtatgtatgaacgttcgaagaatcatccctctgttgtcatctggtcgctcggtaatgaagccggcaacggaatcaatttcgaacgtacgtatgactggctgaaatcggtggagaaaaaccgtccggtacaatacgaacgtgcggaagaaaactataataccgatatctattgccggatgtatcgcagtgtggatgtgatcagaaattatgtggcacgcaaggatatttatcgtcctttcattctttgcgagtatttgcatgcaatgggcaatagctgcggcggaatgaaagaatactgggaggtcttcgaaaatgagccgatggcacaaggaggttgtatctgggactgggtagatcagtcgttccgtgaagtagacaaggatggtaaatggtattggacatacggaggagattacgggccgaaagatgtgcccagctttggaaacttctgttgcaatgggttggtaaatgctgtccgggaacctcatccgcatttgctggaagtaaagaagatctatcagaatataaagagcacactgattgataaaaagaatctgacggttcgtgtgaagaactggttcgacttctctgatttgaatgaatatatcctgcattggaaggtgacgggagatgatggtactgttttggcagaaggcaacaaggaggtggcatgtgagccgcatgcaacggtggagcttactttaggggcggtgcagcttcccaagactatccgtgaagcttatcttgatttgggctggacacgtaaaaagtccactcctttagtggacaccgcttgggaaattgcttatgaccagtttgtgcttcctgcatccggaaaagtatggaatggaaaaccttctgaagccggaaaaacgacatttgaagtcgatgaaaacacaggcgctttgaagtctctttgtctggacggagaagagttgttggctagtccggtcactataagcctgttccgtccggcaacggataatgataatcgggacagaatgggtgcaaaactatggagaaaagccggattgcatacattgacccaaaaggtggtttctctgaaagaaagtaagacatccgctaccgcacaggtaaatatattgaatgtgactgggaagaaagtaggagatgccacattggaatatacgctgaatcacaatggatctttgaaagtacagactacttttcagccggacacgacatgggtgaaatcaatagcacgactgggattaacgtttgaaatgaacgatacctatggaaatgtgacttatctgggacgtggtgaacacgaaacatacattgacagaaaccagtctggtaaaataggtatctatactacaacgcccgaaaagatgttccattattatgttatcccccagtcgacgggaaaccgcaccgatgtacgttgggtgaagctggcagacgacagcggaaaaggctgctggatagagtctgattctccattccagtttagtgctctccctttctctgatttattattggagaaggcacttcatatcaatgacttggaacgtaatggcaggattaccgtacatttggatgctaagcaggcaggtgtaggtactgctacatgcggaccgggggtgttgccgccgtatctggttccgttgggaaagcaaacatttactttcaccatttatcccgtgaagtaa

SEQ ID NO: 35762 - protein, 1024 aa, Bacteroides thetaiotaomicron VPI-5482
MIKMNNLLKPFFLMMLAAPAIISTTAQQQQPEWQSQYAVGLNKLDPHTYVWPYADASEVEKGTFEQSPYYMSLNGQWKFHWVKNPDTRPKDFYKPSYYTGGWADIKVPGNWERQGYGTAIYVNETYEFDDKMFNFKKNPPLVPYKENEVGSYRRTFKVPAGWEGRRVVLCCEGVISFYYVWVNGEFLGYNQGSKTAAEWDITDKLTDGENTIALEVYRWSSGAYLECQDMWRLSGIERDVYLYSTPEQYIADYKVTSLLEKEHYKEGIFELEVAVGGTASGTSSIAYTLKDASDKTVLEGSRKLESHGSGNLIVFDEQRLPDVRRWNAEHPELYTLLLELKDAGGKVTEITGTKVGFRTSEIKNGRFCINGVPVLVKGVNRHEHSQLGRTVSKELMEQDIRLMKQHNINTVRNSHYPAHPYWYQLCDRYGLYVIDEANIESHGMGYGPASLAKDSTWLPAHIDRTRRMYERSKNHPSVVIWSLGNEAGNGINFERTYDWLKSVEKNRPVQYERAEENYNTDIYCRMYRSVDVIRNYVARKDIYRPFILCEYLHAMGNSCGGMKEYWEVFENEPMAQGGCIWDWVDQSFREVDKDGKWYWTYGGDYGPKDVPSFGNFCCNGLVNAVREPHPHLLEVKKIYQNIKSTLIDKKNLTVRVKNWFDFSDLNEYILHWKVTGDDGTVLAEGNKEVACEPHATVELTLGAVQLPKTIREAYLDLGWTRKKSTPLVDTAWEIAYDQFVLPASGKVWNGKPSEAGKTTFEVDENTGALKSLCLDGEELLASPVTISLFRPATDNDNRDRMGAKLWRKAGLHTLTQKVVSLKESKTSATAQVNILNVTGKKVGDATLEYTLNHNGSLKVQTTFQPDTTWVKSIARLGLTFEMNDTYGNVTYLGRGEHETYIDRNQSGKIGIYTTTPEKMFHYYVIPQSTGNRTDVRWVKLADDSGKGCWIESDSPFQFSALPFSDLLLEKALHINDLERNGRITVHLDAKQAGVGTATCGPGVLPPYLVPLGKQTFTFTIYPVK

SEQ ID NO: 35763 - DNA, 3078 bp, Enterococcus faecalis V583
  CDS (1)..(3078): transl_table=11
atgaagacttgggaaaattataaagtagatagtattaatcggttgcctggacgagcacacttttcgagctttccttcgaaagaaacagcgttattaaatgaaaataaatatacacaagcatacaaaaatttaaacggatgctggcattttctctttttagaagcgccagaatacagcccagaaaacttttttgcgacggactttgatacaagccaaatggatcaaatcactgttcctggaaattggcaagtccaaggatatggcaaaatgcattactctgatttatggtacaattttcccattaatccgccgtatgtaccaacggaaaacccaacaggtatttacaaacggacatttgctatagatgaaacatttcacgataaaaaaatcattttacgtttttgtggcgtagattcagcttatcatgtttgggtgaacggccatgaagttggctacagtaaaggtgcacgaaatgaagcagaatttgacattacgccttacgctaaaattggtgaaacaaatgatttaacggtgcgagtctatcaatggtcagatggtacgtatttagaggatcaagatatgtggtggttaagtggtatttttcgtgatgttgaattactcggtgtaccagaaaatgggctggaagatttctttattatttccgatttagatgattcgtatcaaaatgggcacttggcaattacgggtaaattttggcaagacaaaggacaacaagttcaattggagttgatggatcagcagggaaaaacggttcttaaagagactgtcgcaggaaatcaaggtacggttgaattttcagcaagtttgccgtctgtcactgcttggtcagctgaaaaaccatacttgtatcaactatttatcactgttttttctgaaggggaagtcgtcgaagttattccgcaaaaagttggtttcagaaatattcatgtatctggtgagactttcttagtcaatggtgtggccattaaactaaaaggaatgaatcgtcatgattataatccgaaaaatggtcgagtggttagtcgtgaagaaattgaaaaagatattcgtttaatgaaacaatttaatattaatgccattcgaaccagtcattatccagcatctgcttatttctatgatttatgcgatgaatatggaatgtatgtgattgatgaaactgatttggaatgtcacggctttgaattaaccggagaatatgattggattagcaacgatccagaatgggaaacggcttatgtttctcggatggtacggatgattcaacgggataaaaatcatccatcaattctcttttggtcgttagggaatgaatctgcgtttggtcataactttattgaaatggcccgtattgcaaaagaaatggatccaacacgtttggttcattatgaaggtgattttgaggcagaggtcacggatgtctattctacaatgtatacgtggttggaacacccaactagagaattactgatgaatacgattattgaaaattcaaaaaaaccgcatattttatgtgaatattgtcatgcgatgggtaatggccctgggaatttaaaagaataccaagagctattttatgctcatgataaattacaaggtggctttatttgggaatggtttgaccatggcattgaatctgtaacagataacggtgaagtttattatcgttatggcggcgatttcggcgatgatccaagtaacaaagatttttgtattgatgggatgttgatgcctgaccgtacgccatctcctagcttgtatgaatacaaaaaagtcattgaacccattacaactagcgctattgacgttctgtcaggtgaattctcattattgagtcggtttgactttgaaaacttggctatctttaagctggtttatacaattactgaagatcaaacagtgattcaatcagggacagtagcagtgccagcaattgctgctagagcagaaggaagactgcacttaccttatcatttagattttcctaaaaaggcaggagccgcctattatttaactctttcatatcaattgaaagaaacgactgcctatgcatctgctggtcatgaattagctaccgcacagtttgaattgccaattgcaacaccagggattgagatcacaccagttggctcgctaatggcaaaggaaattggccctcatttatacattgaaggaccaaacttttcaattaattttgataaagtgaagggcgccttaacgaatgtgacacgagatggtaaaaaattattgcataaagggccgaaatttacattttggcgggcaccaatcagtaatgatatggaaattattgatgaaatgaagaagaaatatttcttacatttagagcatgaaattgtccgttcttttgagtggaaaaaagttgatgattttatccaagtcatcgtaaaaacaattaacggaacgactaacagtgcttggcattatcaatgtacctatcagtatttaattgcaccaaatggcgaaattttcttcgacttaaaaggtagtcctgctggtaaaattgaaaatgcgccagatatgttaccacgtttgggtgtgactctccatttagacaagtctctatcagaagtaaaatatttcggtaaagggccgagagaaaactatgtagattcacaagaagctggtttacttggcgtttatgatgctacagtggcggaaatgttcactaattatgttgttccacaagccaatggtaaccacatggcgactaaatggtccgcattcacggatgatcgcggccaaggggtagtagcaacagcggctgattcatataattttagtgtttcttattttgaagaacaagcgctagatgttgctaagcataccaatgaattacaagaaagtgagtatgttgttttaaatatcgattacaaacaaaacgccctaggtagctactcttgcggccagtggcaattagaaaaataccgaactacgtttgaagaattccaattggcattccgcttaacaccttttaataataaagagattcaagcagcggatgtcgcacatgaacgagtaaaacgaccaacaatttcttaa

SEQ ID NO: 35764 - protein, 1025 aa, Enterococcus faecalis V583
MKTWENYKVDSINRLPGRAHFSSFPSKETALLNENKYTQAYKNLNGCWHFLFLEAPEYSPENFFATDFDTSQMDQITVPGNWQVQGYGKMHYSDLWYNFPINPPYVPTENPTGIYKRTFAIDETFHDKKIILRFCGVDSAYHVWVNGHEVGYSKGARNEAEFDITPYAKIGETNDLTVRVYQWSDGTYLEDQDMWWLSGIFRDVELLGVPENGLEDFFIISDLDDSYQNGHLAITGKFWQDKGQQVQLELMDQQGKTVLKETVAGNQGTVEFSASLPSVTAWSAEKPYLYQLFITVFSEGEVVEVIPQKVGFRNIHVSGETFLVNGVAIKLKGMNRHDYNPKNGRVVSREEIEKDIRLMKQFNINAIRTSHYPASAYFYDLCDEYGMYVIDETDLECHGFELTGEYDWISNDPEWETAYVSRMVRMIQRDKNHPSILFWSLGNESAFGHNFIEMARIAKEMDPTRLVHYEGDFEAEVTDVYSTMYTWLEHPTRELLMNTIIENSKKPHILCEYCHAMGNGPGNLKEYQELFYAHDKLQGGFIWEWFDHGIESVTDNGEVYYRYGGDFGDDPSNKDFCIDGMLMPDRTPSPSLYEYKKVIEPITTSAIDVLSGEFSLLSRFDFENLAIFKLVYTITEDQTVIQSGTVAVPAIAARAEGRLHLPYHLDFPKKAGAAYYLTLSYQLKETTAYASAGHELATAQFELPIATPGIEITPVGSLMAKEIGPHLYIEGPNFSINFDKVKGALTNVTRDGKKLLHKGPKFTFWRAPISNDMEIIDEMKKKYFLHLEHEIVRSFEWKKVDDFIQVIVKTINGTTNSAWHYQCTYQYLIAPNGEIFFDLKGSPAGKIENAPDMLPRLGVTLHLDKSLSEVKYFGKGPRENYVDSQEAGLLGVYDATVAEMFTNYVVPQANGNHMATKWSAFTDDRGQGVVATAADSYNFSVSYFEEQALDVAKHTNELQESEYVVLNIDYKQNALGSYSCGQWQLEKYRTTFEEFQLAFRLTPFNNKEIQAADVAHERVKRPTIS

SEQ ID NO: 35765 - DNA, 2925 bp, Streptomyces avermitilis MA-4680
  CDS (1)..(2925): transl_table=11
atgtcccgcgatccgctgatcgcgctccgcccctgggagtcacccgaggtgacctcctgggggcggctgccgatgaacgccgtcgaccgccgcaccggggcgctcccgctggacggcgagtggcgcttccagctgctgcccacgcccggctcacccgtgaccgaagcgtggtcgtcacagcatgtccccggcgcctggaccgtgcagggcaccgacgacctgccgcagtacaccaacgtcacgatgccctggggagagttcccgcccgcctcgcccgccgcgaacccgacgggcgtgtacgagcgcgaggtggacgtcccggccgagtgggccggacgccgggtcgtgctccgggtgggcgccgcggagagcgtgctgctcgtccacgtgaacgggcggccgacgggcatctccaaggactcgcacctcgcggccgagttcgatctctcggacgtcgtacgtcccggggagcgggccaccgtacggctcaccgtggtgaagtggtcggacgcctcgcacctcgaggaccaggaccactggtggcacggcgggatcacccggtcggtgctgctgtacgcgaccgatccactgcatctcgcggacgtgaccgtgcgggcgcgcccggacggcgggctgcgggtcgactgccgggtgcggcacgccatgggccggctccccgggggctggtacgtcaccggggagctggcgggccacctcctcgcccaggacgccgagttcgaccggctgaacgcgcaggacgagcgggtctccgacttcctcggcgaggcccgcctcaccgcgctcgtgcgcgaggtgcgcccctggaccgccgagacgcccgagctgtacgagctgacggtgcgcctgcaccgcgccgacggctcggtcgccgacaccgcgcacccgcgcgtcggcttccgccaggtcgagatccgcggccgggacctcctggtgaacggcgagcgggtctacatccggggcgtcaaccggcacgacttccatccgctgacgggccggacggtgtcgtacgacgacatgcgcgccgacctcgtcacgctcaagcggttcggcttcaacgcgatccgcaccgcgcactaccccaacgacccggctctgctcgacctcgccgacgagctgggcttctacgtcgtcgacgaggcggacatcgagtcgcacgaccacgcccacgagatcgccgacgacccgcgctacacggcggccttcgtggaccgcgtctcccgcatggtgctgcgcgacaagaaccacccctcggtcatcgtctggtcgctgggcaacgagtccgactacggcgcgaaccacgacgcggcggcgggctgggtccgccgccacgacccgacccgcccgctccagtacgagggcgcggccaagctcggctgggccgatccgacggtcgcctccgacatcgcctgcccgatgtacgcgccggtcgaggactgtgtcgcccacgcgctgtccggcgagcagaccaagccgctcatccagtgcgagtactcccacgccatgggcaacagcaacggcacgctggccgaccactgggccgccatcgagtccaccccgggtcttcagggcggtttcatctgggagttctgggaccacggcattctgcaacgcgtgaacgacggaagaccggccgggcgcgccggcgccgggctgtatgacaacggtgtcgcggcgcagggccaccgctgggcctacggcggcgacttcggcgagacggtccacgacggcgcgttcatcgccgacggggtcgtctttcccgaccgcacgcccaagccggtgatgtacgagcaccgggagatcgcggcgccggtgcggctcgcgtacgacggcggtgacctgcggatctccaaccaccagcacttccggggcctggagtggctggccgcctcgtgggagctgtcgctcgcggagggcggcacgctgaccgcgcccgccgggctgcccgacgtacgggcgggtgagtcggccgtggtgccgatgccgttcgccctgccggaggacggcggcgaggcctggctgacgctgcgggtgacgacggccgacgacgaggcgtgggcgccgcggggcacggaggtatgtgtgccgcgggtgcggctgcgggcggctgccccggtggcttccgcgccgctgacgacgggcgctcccgtccaggtcgacgaggacgggctgctcgtccatccgctgctcacggccgccccggtgctgtcgctgtggcgggcaccgaccgacaacgacgagatcggcggcatggcggcgcgctggcgggcctggggactcgacgcgctcgaacgcaaggtcgtcgatgtacgccgtgcggccggcagcgtcacggtggtcgccgagtacgggaccatggcgggtgccgtgcggcacgagcaggtgttcacgcgcgtcgagggcggggtgcgggtcgaggagacggccgagctgccggccgggctcgacgacgtggcacgcgtgggctcggtgttcgagaccgtcgcggggctcgatgtcctcgagtggtacgggcagggcccctgggagtcctatccggaccggagcgggggcgcccccgtcggccaccactcccgccccgtggacgagctgttcactccgtatctgcgtccgcaggagagcggcgggcggcacggtgtacgccggttcacgctctcggcgccggacgccacgggcttcgcggtcgagctggacgaaccgcgccaggtgaacgtgacccggtaccgggccgcggacctggccgccgccacccaccacgacgagctggtgccgcggcccggctgtgtggtgcacctcgacgtcgcgcaccgcggcctgggtacggcctcctgcggtcccgacacctcacccggccacctcgtcccgaccggcacacatcgctggtcctggacgctgcgcgtgctctga

SEQ ID NO: 35766 - protein, 974 aa, Streptomyces avermitilis MA-4680
MSRDPLIALRPWESPEVTSWGRLPMNAVDRRTGALPLDGEWRFQLLPTPGSPVTEAWSSQHVPGAWTVQGTDDLPQYTNVTMPWGEFPPASPAANPTGVYEREVDVPAEWAGRRVVLRVGAAESVLLVHVNGRPTGISKDSHLAAEFDLSDVVRPGERATVRLTVVKWSDASHLEDQDHWWHGGITRSVLLYATDPLHLADVTVRARPDGGLRVDCRVRHAMGRLPGGWYVTGELAGHLLAQDAEFDRLNAQDERVSDFLGEARLTALVREVRPWTAETPELYELTVRLHRADGSVADTAHPRVGFRQVEIRGRDLLVNGERVYIRGVNRHDFHPLTGRTVSYDDMRADLVTLKRFGFNAIRTAHYPNDPALLDLADELGFYVVDEADIESHDHAHEIADDPRYTAAFVDRVSRMVLRDKNHPSVIVWSLGNESDYGANHDAAAGWVRRHDPTRPLQYEGAAKLGWADPTVASDIACPMYAPVEDCVAHALSGEQTKPLIQCEYSHAMGNSNGTLADHWAAIESTPGLQGGFIWEFWDHGILQRVNDGRPAGRAGAGLYDNGVAAQGHRWAYGGDFGETVHDGAFIADGVVFPDRTPKPVMYEHREIAAPVRLAYDGGDLRISNHQHFRGLEWLAASWELSLAEGGTLTAPAGLPDVRAGESAVVPMPFALPEDGGEAWLTLRVTTADDEAWAPRGTEVCVPRVRLRAAAPVASAPLTTGAPVQVDEDGLLVHPLLTAAPVLSLWRAPTDNDEIGGMAARWRAWGLDALERKVVDVRRAAGSVTVVAEYGTMAGAVRHEQVFTRVEGGVRVEETAELPAGLDDVARVGSVFETVAGLDVLEWYGQGPWESYPDRSGGAPVGHHSRPVDELFTPYLRPQESGGRHGVRRFTLSAPDATGFAVELDEPRQVNVTRYRAADLAAATHHDELVPRPGCVVHLDVAHRGLGTASCGPDTSPGHLVPTGTHRWSWTLRVL

SEQ ID NO: 35767 - DNA, 3048 bp, Streptomyces avermitilis MA-4680
  CDS (1)..(3048): transl_table=11
atgtccttccgcaccaccgcttcgcccacgtccaccgagtacgtcgaggacgtctcgccgggaagcggggcgctgcccccgagggcctggtacgcatcctcggacgccgtgtccctgtcactgaacggcagctgggccttccggctgtcgccgaccgccgacgcccaggacgactccttcgccgcggaggggtacgccatcgaggaggagggggaggggtacgacgccggggactggaccgagatcgaggtccccggccactgggggctgcaaggccacggcgcgccgatctacaccaaccacctctacccgttcccggtcgacccgccgcgcgtgccgaccgagaacccgaccggtgaccatctgcgggtcttcgatctgccggccgactggcccgcactgtcggacggcggctgcgtgctgcgcttcgacggcgtcgagtcctgcgcccgggtgtggctgaacgggacggacatcggggagttcaagggctcgcggctgccgcacgagttcgcggtcggacacctgctgaagccgcgcggcaacgtgctggccgtgcgggtccaccagtggtcggcgggctcgtacctggaggaccaggaccagtggtggctgcccggcatcttccgggacgtcacgctcctgcaccggccggcgggcagcgccctcgacttcttcgtgcacgcctcgtacgagcatgtcgaggggctcggcaccctgcgcgtcgactccgacgtcgacggccgggtcaccgtgcccgagctggacgtcgatgtcgagaccggcgagtcggtgacggtcgccgtcgagccgtggaccgcggagacgccccggctgtacgacggcgtgctggccaccgagggcgaacaggtccccctgcgcattggcttccgaacggtcgtacgccaagacggtctgatcaaggtcaacggcacgcccgtcctcttcaagggcgtcaaccggcacgaatggcaccccgagcgcggccgcgccctcgacctggagaccatgcgccaagacgtgctgctgatgaaacggcacaacatcaacgccgtccgcacctcgcactacccgccgcaccccgccttcctcgacctgtgcgacgagtacggcctgtgggtcatcgacgagtgcgatctggagacccacggcttcaccgagcaggcctggcgcgacaacccggtcgacgacgatcgctggacccccgccctgctcgaccgcgcggcccgcatggtcgagcgggacaagaaccacccctcggtcgtcatctggtccctcggcaacgaagccggcaccggacgcgggctcaccgccatggcggagtggatccgcggccgggacacctcgcgtctgatccactacgagggtgacatcgactgccgtgacacggacgtgtattcacggatgtacgccgcccacgccgaggtcgagcggatcggccggggcctggacgggggcacgcaccggcggcgcgacctccccttcgtcctctgcgagtacgggcatgccatgggcaacggtcccggcggcctcgccgactaccaacggctcttcgagacgtacggccggctccagggcggcttcatctgggagtggatcgaccacggcatcaaggacgagcggtacggcttcgcgtacggcggcgacttcggggaggagctgcacgacgggaacttcgtctgcgacgggctgctgttcccggaccggacgccgtcgcccggcctggtcgagtacaagaaggtgatcgaaccggttcgcatcgagggatgggggtcccccctggccgggcgaagccgagcgcccgggggaggtgcggacggcacggacggcacggacggcacggacggcacggacggcacggacggcacgatccgtgtgacgaacgcgtacgacttcgcggacctttcggcgctggccttcgagtggtcgtaccaggtcgacggagagaccgtcgaggcgggcgcgctgtcggtgcccgcgctcgctcctggcgagtcggcggacgtgaagctgccgacgccgcccgtggacgggcggggggccgagacacagtggacggtacgcgcggtgctgaccgccgagaccgcgtggggcccgaaggggcatcaggtggcctgggcccaattccctctcggcaaggggagttcggagcgtgtcgcccggcccggcggtcgggtcgccccgtcctgcggtccggtgcccggcgagcgccggatcaccctcggcccggccgccttcgacgcccgcacgggtgcgccgcgaacgatcggcggggtcgacgtcaccgggctccgcctggacgtgtggcgcgccccgaccgacaacgacaacggcgcgcactggcagccggacgagcgctacggcccgctctggcgcaggctgggcctgcaccggatgcaacaccgcctggaggcggtggagttggacgacgacgccctgaccgtacggtcccgggtggcgcccgcgggctgggaggtgggcctgcggacggcgtaccggtggacgtccgacgggacgcggctgaggctgacggtgtccgtggcgccggagggcgactggacgctcccgctgcccaggctcggcgtgcggttcgggctgtcctcggcggcggaccgggtgcggtggttcgggggcggccccggcgaggcgtaccccgacaccaggtcggcgtccatgctgggccgttgggagtcggccgtggacgacctccagaccccgtacgtccggccgcaggagaacggggcgcgcgccgacgtccgctgggcggagatcggcgggctgcggatcgagggcgagccggagttctggttcacggcacgccgctggacgaccgagcagctggacgcggccgagcacctcacggacctgacgcccggtgacaccgtgtgggtcaacctcgaccacggccagcagggcatcggctcgcagtcgtgcgggccgggcgcgctgccgcagtaccaccttcgtccgggcccggcggagttctccttcgtcttctcggaggcgtcttctcggaggtccatgtctgaaccgcgctcgcgacgctga

SEQ ID NO: 35768 - protein, 1015 aa, Streptomyces avermitilis MA-4680
MSFRTTASPTSTEYVEDVSPGSGALPPRAWYASSDAVSLSLNGSWAFRLSPTADAQDDSFAAEGYAIEEEGEGYDAGDWTEIEVPGHWGLQGHGAPIYTNHLYPFPVDPPRVPTENPTGDHLRVFDLPADWPALSDGGCVLRFDGVESCARVWLNGTDIGEFKGSRLPHEFAVGHLLKPRGNVLAVRVHQWSAGSYLEDQDQWWLPGIFRDVTLLHRPAGSALDFFVHASYEHVEGLGTLRVDSDVDGRVTVPELDVDVETGESVTVAVEPWTAETPRLYDGVLATEGEQVPLRIGFRTVVRQDGLIKVNGTPVLFKGVNRHEWHPERGRALDLETMRQDVLLMKRHNINAVRTSHYPPHPAFLDLCDEYGLWVIDECDLETHGFTEQAWRDNPVDDDRWTPALLDRAARMVERDKNHPSVVIWSLGNEAGTGRGLTAMAEWIRGRDTSRLIHYEGDIDCRDTDVYSRMYAAHAEVERIGRGLDGGTHRRRDLPFVLCEYGHAMGNGPGGLADYQRLFETYGRLQGGFIWEWIDHGIKDERYGFAYGGDFGEELHDGNFVCDGLLFPDRTPSPGLVEYKKVIEPVRIEGWGSPLAGRSRAPGGGADGTDGTDGTDGTDGTDGTIRVTNAYDFADLSALAFEWSYQVDGETVEAGALSVPALAPGESADVKLPTPPVDGRGAETQWTVRAVLTAETAWGPKGHQVAWAQFPLGKGSSERVARPGGRVAPSCGPVPGERRITLGPAAFDARTGAPRTIGGVDVTGLRLDVWRAPTDNDNGAHWQPDERYGPLWRRLGLHRMQHRLEAVELDDDALTVRSRVAPAGWEVGLRTAYRWTSDGTRLRLTVSVAPEGDWTLPLPRLGVRFGLSSAADRVRWFGGGPGEAYPDTRSASMLGRWESAVDDLQTPYVRPQENGARADVRWAEIGGLRIEGEPEFWFTARRWTTEQLDAAEHLTDLTPGDTVWVNLDHGQQGIGSQSCGPGALPQYHLRPGPAEFSFVFSEASSRRSMSEPRSRR

SEQ ID NO: 35769 - DNA, 3339 bp, Porphyromonas gingivalis W83
  CDS (1)..(3339): transl_table=11
ttgactgccgcaagtgtcgttttcggtgcagaggcacaggtcacagagtcggggcttccatattggaaggatattcgtacggtaagcgtaaacaaagaaccggcgcgttcgtcctttatgacctatgccgaccgaagcgaagctctcaccggcaagtatgagaagagttcgtactaccgtcttctgaacggcacgtggcgattcttttatgccgagagcgaggcacatctgcctgccggcataacggatagctcggcaaatacaaagggatggcacgacatccaagtccccggcaactgggagatacaagggcacggtgtggccatctataccaatcacggatacgagtttcagcctcgcaatccgcagccgcccaaactgccggaagccaaccccgtaggtgtgtatcggcgcgagatagaagtacccacggactggatggagcgcgatatctacctccatatagccggagccaagtccggactctatgtctatatcaacggacacgaagcgggctacagcgaagactccaagaatccggccgaattcctcatcaatccctatgtccatgccggaaaaaacacgctcacgctcaaggtctatcgttggagtaccggctcgtatctggaatgtcaggacttctggcgcatcagtgggatcgaacgcgatgtattcctctttgcacaacccaaggcggcagtgaaggatttcagcatcaaatccacactcgatgatagctaccgcaatggtatattctccctgaaagccgacttacgcaaccgccgtggcgaagcctccgagctatctctgacatacgaattgctcgatgccgaaggaaagaccatcgccaccgaaacccgttcgaccctcatagctgccggcggagagcgtaccctctctttcgaagcacagccgggtacggtacatacatggacgtcggagcatccctatctctataagctcttgatgacggtacgagagaaagggaaagtcaccgaggtaataccgtcccgtgtgggtttccgcaggatcgaaatcaaaccgatagaggaaaaagctgccaacggtatgccctacgtatgcttctttgtcaatggacagcccatcaagctgaaaggggtgaatatgcacgaacataatcccgccaccggtcattacgtgccggaagagctgatgcgtcgggatttggagctgatgaagcagcacaatctgaatgccgtccggctggcacactacccgcaagatcgccgtttctacgagctatgcgacgaatacggactctacgtgtacgacgaggccaatatcgaaagtcacggcatgtactacaacctgcgccgtgggggtaccttgggcaataatccggagtggctgaagcctcatatggatcgtatagcgaatatgttcgaacgcaacaaaaaccatccgtgcgttacgatctggtcgctcggcaatgaagcaggcaacgggtacaacttctatcaggcctatctttggctgaaagaggccgatcgcgatctgatggcgcgcccggtgaactacgaacgtgcccaatgggagtggaatacggatatgtatgtaccccaatatcccgatgcgaaatggttggaaggtatcggacgggccggtagcgaccgccctgtgatcccttcggaatacgctcacgccatgggcaattcgaccggcaacctatgggggcagtggcaggctatctacaagtaccccaacctgcaaggcggcttcatctgggactgggtggatcagggtatcctccgtacagacgataaaggaaagtcctattgggcttatggaggagacttcggagtggatgcaccgagtgacggcaacttcctttgcaacggactggtcaatcccgaccgcacgcctcaccctgccatgcaggaggtgaagtatgtgcatcaaaacgtcggcttcgaagcagtggatgccgccaagggacatttccgtatcacgaatcggttctacttcaccaacctcaagaaataccgcctgcgctatacggtttcggctaatggcaaagcattgcaaagcaaggtcatcggcttagatatcgatcctcagacttcatcggacattattgtacccgtagacgggctgaggccgactgccggtatggaatacttcgttgacttcagcgtacagactctacaggcagagccgctgattcctatagggtatgagattgctcacgatcaattccgacttccgatcgatgcagagagaactgcctaccgtgctacaggccctacattgcacacgagtacggaaggagatgaattgaaggtcgtttcgtcgaaagtcgatttcgttttcaacaaaaagagcggattggttacctcttatcgggtggacggtcgggagtttttcaaagacggattcggcatacagcccaatttctggcgtgcacccaccgataacgactacggcaatggtgctccaagacgcttgcagatatggaaggaatcgagccgtgacttccaagtagtcgaagcaggattgtccaacgaagggaataccgtcctactcaaagctacttatctgcttgccgccggcaacctctaccgcttgacctataaaatatatcccgatggtgtggtgaatgtgaaggtgcaattctcttcgacagatatggagaccgacgaatacgaatggtccgaagctgcccgaaccgctacattctcccccggcagagaagctctgcgcaaggaagcttctatcctcgaagtgcctcgtataggtgtacgcttccgccttcctgcggagatgaatgaggtacgatacttcggaagagggccggatgagaactatatcgaccgcaactacggggcgactgtcggtctgtacaccactgctgccgataagatgtactacaactatgtgcgtccgcaagagaacgggcatcgtaccgatacgcgttggctgatgctgcacggacgaggcttgggcttgggcatagtagccgacgaaacgatcggcttcaatgctcttcgacaagctgtcgaggacttcgactcagaagaagccaagcacagaccctaccagtggaacaactattcacagaccgagatacaaaaccgagatgagagcaaagctcgcaacgtcctccgtcggcagcatcatgtcaatgatgtgcctgtgcgcgacttcgtagaggtgtgcgtggatatgaaacaacaaggagtaggaggatacgatagctggtcggctcttcccgaaccttggcaccgcctaccgtccaatcgggaatacagttggggctttacccttcttccggtacgatcagtcggccaaatggccactgccacccgatacgcctactaa

SEQ ID NO: 35770 - protein, 1112 aa, Porphyromonas gingivalis W83
MTAASVVFGAEAQVTESGLPYWKDIRTVSVNKEPARSSFMTYADRSEALTGKYEKSSYYRLLNGTWRFFYAESEAHLPAGITDSSANTKGWHDIQVPGNWEIQGHGVAIYTNHGYEFQPRNPQPPKLPEANPVGVYRREIEVPTDWMERDIYLHIAGAKSGLYVYINGHEAGYSEDSKNPAEFLINPYVHAGKNTLTLKVYRWSTGSYLECQDFWRISGIERDVFLFAQPKAAVKDFSIKSTLDDSYRNGIFSLKADLRNRRGEASELSLTYELLDAEGKTIATETRSTLIAAGGERTLSFEAQPGTVHTWTSEHPYLYKLLMTVREKGKVTEVIPSRVGFRRIEIKPIEEKAANGMPYVCFFVNGQPIKLKGVNMHEHNPATGHYVPEELMRRDLELMKQHNLNAVRLAHYPQDRRFYELCDEYGLYVYDEANIESHGMYYNLRRGGTLGNNPEWLKPHMDRIANMFERNKNHPCVTIWSLGNEAGNGYNFYQAYLWLKEADRDLMARPVNYERAQWEWNTDMYVPQYPDAKWLEGIGRAGSDRPVIPSEYAHAMGNSTGNLWGQWQAIYKYPNLQGGFIWDWVDQGILRTDDKGKSYWAYGGDFGVDAPSDGNFLCNGLVNPDRTPHPAMQEVKYVHQNVGFEAVDAAKGHFRITNRFYFTNLKKYRLRYTVSANGKALQSKVIGLDIDPQTSSDIIVPVDGLRPTAGMEYFVDFSVQTLQAEPLIPIGYEIAHDQFRLPIDAERTAYRATGPTLHTSTEGDELKVVSSKVDFVFNKKSGLVTSYRVDGREFFKDGFGIQPNFWRAPTDNDYGNGAPRRLQIWKESSRDFQVVEAGLSNEGNTVLLKATYLLAAGNLYRLTYKIYPDGVVNVKVQFSSTDMETDEYEWSEAARTATFSPGREALRKEASILEVPRIGVRFRLPAEMNEVRYFGRGPDENYIDRNYGATVGLYTTAADKMYYNYVRPQENGHRTDTRWLMLHGRGLGLGIVADETIGFNALRQAVEDFDSEEAKHRPYQWNNYSQTEIQNRDESKARNVLRRQHHVNDVPVRDFVEVCVDMKQQGVGGYDSWSALPEPWHRLPSNREYSWGFTLLPVRSVGQMATATRYAY

SEQ ID NO: 35771 - DNA, 3099 bp, Vibrio vulnificus YJ016
  CDS (1)..(3099): transl_table=11
gtgaacaactgggaaaacttcctccatttacatgagaacagaatggcgccgcgtgcgtacttcttctcctatgataccgttcaacaagctcaaacctttcagcgtgagttgagcagccgctttatgctgctaagtggtcaatggcaatttcattacttcagcaacccaatgctggtgcctgatgagttttactcacaaaccatgagcgattgggggcacattaccgtacccaacatgtggcaaatggaaggccacggcgatcttcaatacactgacgaaggtttcccattcccaattgacgtaccttttgtacccaccgacaacccaacgggcgcttatcagcgcactttcactttgggccctcaatgggacgacaaacagaccatcatcaagttcgatggcgtggaaacctacttcgaggtgtacgtcaacggccactatgtcggttttagtaaaggcagccgtcttactgcagagttcgacatttctgcctacgcacaaccaggtgaaaacttgctctctgtacgcgtgatgcaatgggccgattcgacttacattgaagaccaagacatgtggtggacggcggggatcttccgtgatgtttaccttgtcggcaaagagccggttcatgtccaagatctcaccattcgcaccgatttcgccgacgattaccaaagtgcgacgctcagtgctcaggttgaattggaaaatctttctaccgcgattgcgtctggctatacactggaatacgcactgcatgacaaaggcactgtcgtagccagtggtcaatgcgattcactgactatccaaaaccgccattcagccaacttcgccattgatatggtgaacccaacgcattggacagcggaaaatccttacctttaccacttgttcattaccttaaaagatcaccaaggcaaggtcgtggaagtgatcccacaacgcgtgggtttccgtgacatcaaagttcgcgatggcctgttctacatcaacaatcaatacgtgatgctgcacggtgtcaaccgtcatgacaacgaccacctaaaaggtcgtgcagtaggcatggaccgcgtggaaaaagatctgatgttgatgaagcaacacaacatcaactcggttcgcaccgcacactacccgaacgacccacgcttctacgagctgtgtgatatttacggcctgtttgtgatggcagaaaccgatgtggaaacccacggctttgccaacgttggcgacctcagccgcatcaccaacgatccagcatgggaagcggtgtttgttgatcgcgcagtgcgccatgtgcacgcacagaaaaaccacccatcgatcatcatgtggtcactcggcaatgagtctggctacggttgtaatatccgcgccatgtacgccgcaaccaaagcccttgatgacacccgtttggtgcactacgaagaagaccgcgatgccgaagtggtggatgtgatttccactatgtactcgcgtgcacaactgatgaattactttggcgaacacccacacgagaaaccacgcatcatctgcgaatacgcccacgcgatgggtaacgggccgggtggtctcaccgaataccaaaacgtgttttacgcgcacgaccatattcaaggccactacgtgtgggagtggtgtgatcacggcattctagcgcgtgatgaacacggtcaagagttctacaaatacggcggtgattacggcgattacccaaacaactacaacttctgtatggatggtctgatttacccagatcaaaccccaggcccaggcctgaaagaatacaagcaagtgattgcgccagtgaaaatccgcgccgttgagggttgccatgaccgcttcatcgttgagaacaaactgtggttcaccaatctcgatgactacaccatcaccgctgaaattcgcgccgaaggcgacaccttgcgtagcgtgccgtttaaagtcgaagcactggccgcgaacagcgctcgtgaagtgagcattgacttgccagaattggatgagcgcgaagccttcattaacttcaccgtacgtaaagacagccgcaccttgtatagcgaggccaaccacgacattgctgtgtaccagttccaactgaaagaaaacaccgccatgttgcctgcgttagtcaaccacaatgttcaaccattggtgcttgaagaaagccgcctagagcacgtgatcacaggtcataacttcacgctcacgttctcgaaagtaaacggtaaactgacctcatggcgtgtgaatggtgaagagttgattcaatcagagccaagattgaacttcttcaaaccaatgattgataaccacaagcaagagtacgaagggttgtggcaccctgcacatctgcaaatcatgcaagagcacttccgcacgctgagcgtggacgcgagcgaagatgccatcctgatcaccaccaccagcattgttgcaccgcccgtgtttgattttggcatgcgttgtacctaccgctaccaaatcaacgcgcaaggccatttgaatgtggaactgagtggcgagcgctacggcgactaccctcacgtgattccggtcatcggcttggatttgggcatcaacggtcgctttgatcaagtgagctactacggtcgcggccctgaagagaactatcaagacagccgccaagctaacctcattgatgtttaccacaccaacgtggcggacatgttcgagaactacccgttcccgcaaaacaacggcaaccgccagcacgtgcgttgggcatcgctcaccaaccgtcatggcagtggtttgttggtcaagcctcagcaagagcttaacttcagtgcgtggttctacaccaaccaaaacctgcatcaagcacaacatacgattgagctagaaaagagtggctacatcacgcttaaccttgaccatcaagtaatgggcttgggttcaaactcttggggcagtgaagtgctcgactcttaccgcgtgtatatggatgcattccgctacggcctcactctgatgccattgcaagcaggcgattgcagcgcgcaagtcatggcaaaccatgatttcgacaacgcatttttcacttcaaccgataccaaaatcgttaacgaggcgtaa

SEQ ID NO: 35772 - protein, 1032 aa, Vibrio vulnificus YJ016
MNNWENFLHLHENRMAPRAYFFSYDTVQQAQTFQRELSSRFMLLSGQWQFHYFSNPMLVPDEFYSQTMSDWGHITVPNMWQMEGHGDLQYTDEGFPFPIDVPFVPTDNPTGAYQRTFTLGPQWDDKQTIIKFDGVETYFEVYVNGHYVGFSKGSRLTAEFDISAYAQPGENLLSVRVMQWADSTYIEDQDMWWTAGIFRDVYLVGKEPVHVQDLTIRTDFADDYQSATLSAQVELENLSTAIASGYTLEYALHDKGTVVASGQCDSLTIQNRHSANFAIDMVNPTHWTAENPYLYHLFITLKDHQGKVVEVIPQRVGFRDIKVRDGLFYINNQYVMLHGVNRHDNDHLKGRAVGMDRVEKDLMLMKQHNINSVRTAHYPNDPRFYELCDIYGLFVMAETDVETHGFANVGDLSRITNDPAWEAVFVDRAVRHVHAQKNHPSIIMWSLGNESGYGCNIRAMYAATKALDDTRLVHYEEDRDAEVVDVISTMYSRAQLMNYFGEHPHEKPRIICEYAHAMGNGPGGLTEYQNVFYAHDHIQGHYVWEWCDHGILARDEHGQEFYKYGGDYGDYPNNYNFCMDGLIYPDQTPGPGLKEYKQVIAPVKIRAVEGCHDRFIVENKLWFTNLDDYTITAEIRAEGDTLRSVPFKVEALAANSAREVSIDLPELDEREAFINFTVRKDSRTLYSEANHDIAVYQFQLKENTAMLPALVNHNVQPLVLEESRLEHVITGHNFTLTFSKVNGKLTSWRVNGEELIQSEPRLNFFKPMIDNHKQEYEGLWHPAHLQIMQEHFRTLSVDASEDAILITTTSIVAPPVFDFGMRCTYRYQINAQGHLNVELSGERYGDYPHVIPVIGLDLGINGRFDQVSYYGRGPEENYQDSRQANLIDVYHTNVADMFENYPFPQNNGNRQHVRWASLTNRHGSGLLVKPQQELNFSAWFYTNQNLHQAQHTIELEKSGYITLNLDHQVMGLGSNSWGSEVLDSYRVYMDAFRYGLTLMPLQAGDCSAQVMANHDFDNAFFTSTDTKIVNEA

SEQ ID NO: 35773 - DNA, 3096 bp, Vibrio vulnificus YJ016
  CDS (1)..(3096): transl_table=11
atgactgcattttcagaaattctccaacgacgcgactgggaaaacccgcaatccgtgaacattcactgcctaaaggcacatagcccactcgccagttttcgcgatatggcccatgctcgcgatggtattcacgcccagcgtcaatcactaaatggacaatggaaattcaaactgtttgatgcgccagagcaggtggatggtcagttcacgcaggccgatttcaatgacgcggaatgggatgagatccccgtgccgtctaactggcaactgcacggttacgacaaacccatttacgccaatattaaatacccatttgacgtgaacccgccgttcgtgccccgtgaaaacccaaccggttgttaccgcactagggtatcgttgtcgccagaagatttgctcaacacccaacgcatcatcttcgacggtgtgaactcggcgttccatctttggtgtaacggcacttgggttggctacagccaagacagccgtttgcctgccgagtttgatctcacatcgcatctcgtggcaggggaaaatacgctcgcggtcatggtgatgcgttggtgtgatggcagctacctagaagaccaagacatgtggtggctaagcggtatcttccgcgacgtgacgttgctgtcgaaaccacagcactgcattgaagatgtgttcatcacgccggatctcgacgcctgctatcgcgacggttcgctctccatcgtcaccaccattgcagcgccagaaacctatcaagtacaggttcaattgtttgagggtacacaagcggtcactgagccaaacatcgatcgcccacacaaccgtcgcatcgacgagcggggcacttggaatgatgtggtattccaaaccctgcacctacgcgagccaaagaaatggacggcggaaacaccgaacctctaccgcttagtcgtttcactgttggatgaaaacggcacgcatctcgagagcgaagcgtaccctgtgggtttccgtaaagtggaaatcagcgagggtcaattgaagctcaacggcaagccgctgctgatccgcggggtcaatcgccacgagcatcatccagagctgggccatgtgatgacggaagaggatatgatccgcgatatctgcctgatgaaacaatacaacttcaacgcagtgcgcaccgctcactatccgaaccatccgcgttggtacgaactgtgtgaccaatacggcttgtacgtgtgtgatgaagcaaacattgaaacccacggcatgcagccaatgagccgcttatccagcgatccgcaatgggcacacgcgtacatgagtcgctacacccaaatggtcctgcgcgataagaaccatccatcgatcatcatctggtctttaggtaatgaatcgggccacggcagcaaccacaatgcgatgtacgcttggtcgaaaaactttgacccttcccgccctgtgcaatacgaaggcggcggttcaaacaccacggcaaccgacattattgcgccaatgtacgcgcgcgttaataccctaattgccgatgaagcggtgccaaaatggccaatcaaaaaatggatttctctccccaacgaaacgcgaccattgatcttgtgcgaatacgcccatgcgatgggcaatagcctaggcagttttgatgaatactgggcggcatttcgcgagttcccacgcctgcaaggcggctttatttgggattgggtcgaccaaggcttgagccaatgggatgaaaacggccagcacttctgggcttacggcggtgattttggtgatgaaatcaatgaccgccagttctgcatcaacggcttgatcttccccgatcgcaccgtgcatccaacgttgcaagaagccaaatattgccagcgcatgatcaccgtctcgctgcaagagcaaacccaaaaagcgtgcacactgttggtgaccaacgagaacctgttccgtgccactgataacgagcaattgaactggtcactgttggaaaatggccaagtcatccaaacgggctcactggcgcttagcgtagaggctgacagccaaacacggcttgaaattgcgctgaacttcacgccaaaagcgcaggcgcaataccacttaaataccgacatctgccttattgaagcgacgtcatgggctcccgctggccatgtggtggcgacagagcaaatggcgctgcgcaatcacgctggccttgccatcccaaccttgcgcacacagcctgcacccaagctgacccaagacggccacgccattgtggtcagcagtctggatgaaaagcatcaatggcgctgggatagccaaagcggtttgctgatggaatggaacgtggatggcaaagcgcaaatgctggccgcgccgcaagacaacttcttccgcgcgccgctggataacgacatcggcatcagtgaagtggataacgttgatcccaatgcttgggtatgccgttgggaaatggcgggcattggtcagtgggagcgtcattgcgtccattgcgacagcgaaacgctcgctcacaccgtggtcgtgaccaccacgtttgcctaccactttggcggcgatgtgcaagccattacccagtggacgcacacactcagcaacgatggcgagatgctattggatgtcgacgtcacactggcagacactctgccgccgatgccgcgtattggcttggagttgcaactgccgctttaccaagccgacacgccgatcacatggcaaggcttaggcccatttgaaaactacccagatcgcttagccgcagcacgttttggcttacatactcaaacactggcgcagatgcacacaccgtacatcttcccaaccgacagcggcctgcgttgtggcacgcagtggttgcaagtaaacgagttggccatctcgggtgatttccagttcagtgttagccaatacgctcagcaacaattggcagaagcgaaacatacccatgatttgctagcgcaagagcggatttacctgcgtctagaccaccagcacatgggggttggcggtgacgattcttggagcccaagtgtgcacaaagaattccaattaacggagaaacactaccgctaccagttgcgatttaagcctgcttcacgctag

SEQ ID NO: 35774 - protein, 1031 aa, Vibrio vulnificus YJ016
MTAFSEILQRRDWENPQSVNIHCLKAHSPLASFRDMAHARDGIHAQRQSLNGQWKFKLFDAPEQVDGQFTQADFNDAEWDEIPVPSNWQLHGYDKPIYANIKYPFDVNPPFVPRENPTGCYRTRVSLSPEDLLNTQRIIFDGVNSAFHLWCNGTWVGYSQDSRLPAEFDLTSHLVAGENTLAVMVMRWCDGSYLEDQDMWWLSGIFRDVTLLSKPQHCIEDVFITPDLDACYRDGSLSIVTTIAAPETYQVQVQLFEGTQAVTEPNIDRPHNRRIDERGTWNDVVFQTLHLREPKKWTAETPNLYRLVVSLLDENGTHLESEAYPVGFRKVEISEGQLKLNGKPLLIRGVNRHEHHPELGHVMTEEDMIRDICLMKQYNFNAVRTAHYPNHPRWYELCDQYGLYVCDEANIETHGMQPMSRLSSDPQWAHAYMSRYTQMVLRDKNHPSIIIWSLGNESGHGSNHNAMYAWSKNFDPSRPVQYEGGGSNTTATDIIAPMYARVNTLIADEAVPKWPIKKWISLPNETRPLILCEYAHAMGNSLGSFDEYWAAFREFPRLQGGFIWDWVDQGLSQWDENGQHFWAYGGDFGDEINDRQFCINGLIFPDRTVHPTLQEAKYCQRMITVSLQEQTQKACTLLVTNENLFRATDNEQLNWSLLENGQVIQTGSLALSVEADSQTRLEIALNFTPKAQAQYHLNTDICLIEATSWAPAGHVVATEQMALRNHAGLAIPTLRTQPAPKLTQDGHAIVVSSLDEKHQWRWDSQSGLLMEWNVDGKAQMLAAPQDNFFRAPLDNDIGISEVDNVDPNAWVCRWEMAGIGQWERHCVHCDSETLAHTVVVTTTFAYHFGGDVQAITQWTHTLSNDGEMLLDVDVTLADTLPPMPRIGLELQLPLYQADTPITWQGLGPFENYPDRLAAARFGLHTQTLAQMHTPYIFPTDSGLRCGTQWLQVNELAISGDFQFSVSQYAQQQLAEAKHTHDLLAQERIYLRLDHQHMGVGGDDSWSPSVHKEFQLTEKHYRYQLRFKPASR

SEQ ID NO: 35775 - DNA, 3216 bp, Magnaporthe grisea 70-15
  CDS (1)..(3216)
atggcttcacctccgtcgccaagatccacgatccttggaccaagaagccgattggagctacgactcaatttccaagctaacattgagaatactgggcacatctctgggtctcactctgtgccgatgctgccctcgtctggccccccggctgctcttgaaattggcgcttctggcgtttttcctgagaagcagcctgactttaacaacttcgatattatccgccgcaacacccttccgccgcgcagctatttttttctttatgaaaatgagaaagatgctttatcgcacgacacatccaaggccaagtgccaactcttgtccggcaagaaatggaaattcagcttctccaagaaccccttccagggtgaggttgacttctacaaggagtcctttgacgtttccgactgggatgaagttcaagtcccgggtatgtggaatctacaaggctatggaaagggtccgcattacaccaacatggactacccctggaacccaaacccgccctacgttcctctcgatgacaacgaatgcggacgttatgttacgcactttgaagtggctgaagatctcgagggtcatcagatgcgcctgaggtttgaaggttgtgagactggactcactgtatatgtgaacggtcacgatgttggctattctcaggggtcaagaaaccctagtgaatttgatgtttccaaatacatcaagttcggcaagaccaacacactggctgttgaggtgtatcagaggaccaacggtgtctacctggaagatcaggaccattggtggttggctggcattttccgcgatgtttacctgcatgcctggccgaagcctgctcacattgaagacttctttgttcatgctctgcttgatgcaacttaccaagagggcattctcaaggtggatgtccagctcagtgacaaagccaaagttcatctaaagcttctagacgcagatggcaaggagatactcacgtcgtcccagaccggctcgccaaacgttgtctttgaactcgacgtcagtaacccacacaagtggtcagctgaggaaccatatctatacagcctcgtgctgtccgcggatgatcactatatttcacagaagattggattcagaagaaccgagctgattgatggcgtgtactgcatcaatggacaacccatcaagttcagaggcgtcaatcgtcacgaacatcacccggattttggccgggccgtaccttacgactttatgcgtagagatctcctcatgatgaagaaacacaacatcaacgctatacgtacctcccactacatcaacgacccacgaatgtacgacgttgccgacgagctgggcctttggatccttgacgaagccgatcttgaatgtcacggcttcggtacctgcggtggcgatgcctccgcatatgcatcagacaacccggattgggaggaggcgtacgtcgatcgcgcgcgccagatggttcaacgtgacaagaaccacgtctcggttgtcatctggtcgctcggtaacgaatccttctatggtcgcaaccaccaggcaatgtacgactacatcaaatcagtggataagacgcgtcttgtacactacgagggtgattgggaggccaggtcagcagatatattcagctgcatgtaccgaccccaagaccaaatggtttcttggggggaagacaaggcctggtccaaaccactcatcatgtgcgagtacattcacgccatgggcaacggacctggaggtgccagcgagtacgtcgaggccttttacaagtatccgcgactgatgggtgggtttgtctgggaatgggcaaaccacggcctgcgtaccaagacacccgaaggcgaggagtacatgggttatggtggtgactttggggacgagcccaatgactacaactttgtcatggacggcttgatcttctccaatcacacgccaacaccgggtctcaccaactatgccaagatcattgagcccgtccaatgtctacggctgcacggttcaaaggtcactatcatcaaccgatatgacataatcagtcttgaccatctcaaatgcgtctggtctatcatcggggacggccagctgatcgagggtggtgagctgaaaattccaacaggcatcaagcctcataccgaaggaaccattcatttagatagtctgccgccgccacctgttggcgagtcgtatttgcatctagacttctcgttgcgtcatgacaccagctgggccaaagcaggccacattgtggcatttggcgaattccgtctcgcccctcccctgagtcttgctcatagccgctacctggcagttgcgccagaacactgtccaacaatggagcagattacttccaacggcacccccaagctcgtgatacgcagcagttggggtaccgtttgggagtttgaccaaacaatggggacgctgacgtcgtggaaacgacttgcctttccggacaccaacgtactgacagagcccttgaccttttccctgtaccgtgccctgacggacaatgatcgaggcggcagcgccggcggtgactggagaaacagccgcctgcaccaagtcaaggcgcatcctctacaggtcaagtgggagcgccgtccagacggcagcctggagatcaccgcacatcaccgcgtcgcccctcccgcgttgaactggggtctgatgacgaccacctcgtaccgcttcgtgggaggctcagtcagcatcagcgtcagcgccaaaatcaacgggtaccgcaagccacgatggttcgccaagttcggtctcaaactcggcctcgccgacgtggaatctgcgaaatggtttggccgaggacctggagagtcttaccgcgacaagaagctctctcaggcgtggggcaaccacgaagagaagatcgacaagctctttgtcgactacgagttcccgcaagacggtggaagtcgctccgatgtacgatgggttgagttttgtcgcaaggagggcggcaaggtgctacgtgcccgttttggggactttgaaggggctggattccaggcgcttcggtattcgaccgaggacttggatgagtgtactcatccatacgagttgtacaagaggaagagaaaggacacggttgtgagcttggattgggtccatcatggacttgggacaggaagctgtgggccgtccacactggctcagtatgagctcaaagcggaccaggacttcaagtttcacgtgttgttggactaa

SEQ ID NO: 35776 - protein, 1071 aa, Magnaporthe grisea 70-15
MASPPSPRSTILGPRSRLELRLNFQANIENTGHISGSHSVPMLPSSGPPAALEIGASGVFPEKQPDFNNFDIIRRNTLPPRSYFFLYENEKDALSHDTSKAKCQLLSGKKWKFSFSKNPFQGEVDFYKESFDVSDWDEVQVPGMWNLQGYGKGPHYTNMDYPWNPNPPYVPLDDNECGRYVTHFEVAEDLEGHQMRLRFEGCETGLTVYVNGHDVGYSQGSRNPSEFDVSKYIKFGKTNTLAVEVYQRTNGVYLEDQDHWWLAGIFRDVYLHAWPKPAHIEDFFVHALLDATYQEGILKVDVQLSDKAKVHLKLLDADGKEILTSSQTGSPNVVFELDVSNPHKWSAEEPYLYSLVLSADDHYISQKIGFRRTELIDGVYCINGQPIKFRGVNRHEHHPDFGRAVPYDFMRRDLLMMKKHNINAIRTSHYINDPRMYDVADELGLWILDEADLECHGFGTCGGDASAYASDNPDWEEAYVDRARQMVQRDKNHVSVVIWSLGNESFYGRNHQAMYDYIKSVDKTRLVHYEGDWEARSADIFSCMYRPQDQMVSWGEDKAWSKPLIMCEYIHAMGNGPGGASEYVEAFYKYPRLMGGFVWEWANHGLRTKTPEGEEYMGYGGDFGDEPNDYNFVMDGLIFSNHTPTPGLTNYAKIIEPVQCLRLHGSKVTIINRYDIISLDHLKCVWSIIGDGQLIEGGELKIPTGIKPHTEGTIHLDSLPPPPVGESYLHLDFSLRHDTSWAKAGHIVAFGEFRLAPPLSLAHSRYLAVAPEHCPTMEQITSNGTPKLVIRSSWGTVWEFDQTMGTLTSWKRLAFPDTNVLTEPLTFSLYRALTDNDRGGSAGGDWRNSRLHQVKAHPLQVKWERRPDGSLEITAHHRVAPPALNWGLMTTTSYRFVGGSVSISVSAKINGYRKPRWFAKFGLKLGLADVESAKWFGRGPGESYRDKKLSQAWGNHEEKIDKLFVDYEFPQDGGSRSDVRWVEFCRKEGGKVLRARFGDFEGAGFQALRYSTEDLDECTHPYELYKRKRKDTVVSLDWVHHGLGTGSCGPSTLAQYELKADQDFKFHVLLD

SEQ ID NO: 35777 - DNA, 3141 bp, Magnaporthe grisea 70-15
  CDS (1)..(3141)
atggctccgtcgtcaatccccctccaagagtcgaaggaccagcctgactacaacaacgaggcagtcttccgccgcaactgtcttccccacaggacctaccacatccccgagacgtcactctgcctcaatggcgtctgggacttcaactacgtctccacgccgctcgaggctcccgagcccaaggacgaggccgaatgggcccccatcaacgtccccggccactggcagctgcagggctacggccgccctcactacaccaacgtgcagtacccaatccccgtctgcccgccgcacgtgcctacagagaaccctacgggaagctaccgtcggcagttccaagtcccaccctcgtgggatgccagccagcagctagtcctgcggttcgagggtgtcgacagctcctaccacgtctttgtcaacgggatcctggtgggctacgcgcagggcgcgaggaacgctgccgagtacgacgtgactgatcacgtcaaccgtgacgggcccaacgaggttttcgtcagggtttaccagtggtctgatggctcttacattgaggaccaggaccagtggtggctttcaggaatcttccgagatgtacacctgattgccttccccacagactgccgtatccgcgactggttcatcaggaccgatcttgatgacgagtacaagaacgccaagttgctggcgaacgcagaggttatcagcaaatccaagggaacgctgaagcttacgttgcaggagctggccaagaatggtggcgcagtcattggcgagaccgaggtagaggttgaatcagatggcaacagccctgagctcgttatacctgtctcagacccgaagaagtggacggctgagacgccaaacctataccgcatctccctcacactgagctcgggctcggccaaaccctacacagtcacccagaacatcggcttccgcaaagtcgagctcaagaagggccttatgtgcgtcaatggcaagcccgtcaagctgcggggtgccaaccgccacgaccaccacccgaggcttggacgtgccgttccccacgagtacctgcgccgcgacctcctcctcatgaaaacccacaacatcaacgcactccgctgcagccactacccgccgcaccccaagctcttcgatcttgccaacgaactcggtctgtgggttatggatgaggcagatctcgagtgccacggtttctacgacgccattgcccggcctcaggatatccccgaggagcaggattacgaagagcgcaaggcgttggtgttccccaaggccgccaagtacacctctgacaaagagtcctggaaggcagcgtacgtcgaccgcatggagagcatggtcattcgcgaccgcaatcaccctagtatcatcatgtggtcccttggcaacgaggccttctacggccagaaccacgtcgccatgtacgagtacgccaagaaggtcgaccctggccgcctggtgcactacgagggtgacattcatgccaagtcggcagacatgtactcatacatgtacccggctgtggacaggcttatcgagctggccaagactgagggtgtggacaaggacggcaactttgagaagcccattgtgctgtgcgagtacgcccacgccatgggcaacggccccggttggctagaggagtacgaggacgccttcaggacgtacccacgccttcagggaggtttcatctgggagtgggccaaccatggtatctggaaggaggagactggccaggacggcaagaagaaggccttctacggatacggcggtgactttgatgacttccccaacgatggcaacttcgtcatggacggtctctgcttttcggaccacaccccgacgcctggtctgacggaactgaagaaggtcatccagcccgtcaagttcagcttcaaggatggcaagttgggcgtccagaacctttacaactttgtggacctgagccatctggtggcccattacaaggttgaggagattagcaacgagacaaccctggtcgaggctggcgagttcgatatcccggccactggacctggcgagaccactgaggttaccctgcctgaggcagtcaagcacaagggccaaggcgagactgtcctgacggtcacgcttcgtctgcggaccagcacacaatgggccgaggccggccacgagattgcatggcaccaggaggtgctctcgcagtccaagaccgaagcatctactgccagctaccaactggcttccaagatcgacgtcaagacttcgggtgctaagctcacgctttcgggtgctgactggtcttttgagttcgacagggcgcgtggttacctcaagagctgggtctcgggtacaaccaccctgctgtctgcagagtcaaagagcagtgcagcattgatcccaggcttttggcgtccgcccaccgacaacgatcgcccggcctcgttcccttactggaagcgttttggcgtggacgacctgacatcgcagctccggggcttcgaggtggccgatggtgacaacggtagcgtgcgcattaccagcaagaccttcctttccccacctgtcctcgcttggggctgggagtcgacaattacctacgtcatctcggcaatcggcaacctcggagtcgatgtcaagctggtgcctacgggcttcttccccaagcacgtgccgcgcgtcggactggacctgaacgcctcgcgtgcattcgacgatgtccgctggtttggcctgggccccggcgagagctacccggacaagcaggcgtcgcagcgcgtgggtatctggcaccacgcggacgacggtgtcgcggccctccacaccgagtacgagcggccgcaagagggtggaaaccgcatgggaactcgctggctcgagctgctcctcaaggacggccagggccgcggcatccgcgcacgctcaaccgccgacgcgcacttcagctttgcggctcgtcgctacactgaccacaacgtcgaggatgccaagcacccgtgcgacctcgtcgaggtcgacgcaacgttgctgcgcctcgattcaaaggttgcgggcgtcggtaccgccgcttgcggccccggcgtgcgtgaggacctcctcgtcaagactgaggaggtgtcgtttggctttgagattgagagggtgggggcataa

SEQ ID NO: 35778 - protein, 1046 aa, Magnaporthe grisea 70-15
MAPSSIPLQESKDQPDYNNEAVFRRNCLPHRTYHIPETSLCLNGVWDFNYVSTPLEAPEPKDEAEWAPINVPGHWQLQGYGRPHYTNVQYPIPVCPPHVPTENPTGSYRRQFQVPPSWDASQQLVLRFEGVDSSYHVFVNGILVGYAQGARNAAEYDVTDHVNRDGPNEVFVRVYQWSDGSYIEDQDQWWLSGIFRDVHLIAFPTDCRIRDWFIRTDLDDEYKNAKLLANAEVISKSKGTLKLTLQELAKNGGAVIGETEVEVESDGNSPELVIPVSDPKKWTAETPNLYRISLTLSSGSAKPYTVTQNIGFRKVELKKGLMCVNGKPVKLRGANRHDHHPRLGRAVPHEYLRRDLLLMKTHNINALRCSHYPPHPKLFDLANELGLWVMDEADLECHGFYDAIARPQDIPEEQDYEERKALVFPKAAKYTSDKESWKAAYVDRMESMVIRDRNHPSIIMWSLGNEAFYGQNHVAMYEYAKKVDPGRLVHYEGDIHAKSADMYSYMYPAVDRLIELAKTEGVDKDGNFEKPIVLCEYAHAMGNGPGWLEEYEDAFRTYPRLQGGFIWEWANHGIWKEETGQDGKKKAFYGYGGDFDDFPNDGNFVMDGLCFSDHTPTPGLTELKKVIQPVKFSFKDGKLGVQNLYNFVDLSHLVAHYKVEEISNETTLVEAGEFDIPATGPGETTEVTLPEAVKHKGQGETVLTVTLRLRTSTQWAEAGHEIAWHQEVLSQSKTEASTASYQLASKIDVKTSGAKLTLSGADWSFEFDRARGYLKSWVSGTTTLLSAESKSSAALIPGFWRPPTDNDRPASFPYWKRFGVDDLTSQLRGFEVADGDNGSVRITSKTFLSPPVLAWGWESTITYVISAIGNLGVDVKLVPTGFFPKHVPRVGLDLNASRAFDDVRWFGLGPGESYPDKQASQRVGIWHHADDGVAALHTEYERPQEGGNRMGTRWLELLLKDGQGRGIRARSTADAHFSFAARRYTDHNVEDAKHPCDLVEVDATLLRLDSKVAGVGTAACGPGVREDLLVKTEEVSFGFEIERVGA

SEQ ID NO: 35779 - DNA, 3150 bp, Gibberella zeae PH-1
  CDS (1)..(3150)
atgggtggaggtattgcagaacagcccaagggtatttcccttcaggaagacgcctctcgaccagactatatcaacgaggccgtctttagaagaaacactctccctacaagagcataccatattcctgagacgtcaatctcactcaacgggacatgggacttttccctgtcaggaacagccattgaagcccccgagcctagctcaaaagacatcacatatgaaccaatccaagttccaggccactggcagctccaaggccacggaaagccatggtacaccaacgtccagtatcccattcccgtttgcccaccatacgttcccacagagaaccctacgggatcgtaccgacgggacttccatgtcccagcaggatgggacgcaaattcacagctcagactgcgcttcgatggtgtcgacagcgcctatcacgtttttgtaaacggtacacttgttggatatgctcaaggctcgagaaacccctcagagttcgatatctccgctttcgtcaaccgagagggtgcaaacgagctgtttgtgcgtgtttaccagtggtccgacgctacctatatcgaagatcaagaccagtggtggctttccggaatcttccgtgatgtctacctcatctccttcccagctgcgcgaattgatgactttttcgtcaagcctgatcttgacagcagctacaagaacggaacactaaccacctcggtcgacatattcactgacaaggctggtgtccttgaacttacgctatccgagctggctaagaacggtggggctgtgatcagctctacaaagacctctgtcgacgcaaagtcaaacaagatcgatctgaagcttgaagtcgaggatcccaagaaatggactgcagagacaccatacctttactcagctgagctcacactcaagtccgaagactcaaagaccgtcctccactctgtccagcaacgtgtgggattccgaaaggttgagctcaaagacggtcttatgactgtcaacggaaagcgcattcgcctccgaggtgtcaaccgtcacgagcatcaccctcttctcggtagatccgtacctatcgagtttgccaagcgcgatcttctgatcatgaagaagcacaacatcaacgctcttcgttgcgcacatcaaccccatgaccctcgtatcctggatctgtgcgacgagtacggcctttgggtcatggccgaggctgatctcgagtgtcacggtttctacgatgctgttgcgcgacctctagatattcccgagtctatggactatggcgagcggaagaagcttgctttcggaaaggctgcacagttcacctccaacaaccccgactggaaggaggcttatctcgaccgcatcaacgcagtgctcaaccgtgataagaaccatgccagtgttattatctggagtttcggtaacgaggctttctacggagacaaccatagggcgatgttcaagtacgctacggaagctgatccctcgcgattgattcactacgagggagacgagcaggccgagactacacacatgtacagttatatgtaccccacagtcgaacgcctcatcaagtacgccaaggaggaaggtgtcaaggatggcaagttcgagaagcccatcgtgctctgcgagtacggtcacgctatgggtaacggtcccggctggctcgaggactacgagcaagccttccgtgactacccccgtctccaaggtggctttatctgggagtgggccaaccacggtttgtggaaggacgaccacgaaggtgccggctactatgcttacggtggtgactttggtgacactcccaatgacggaacctttgtcatggacggcctgctcaacagtcagcacgagcctacgcctggtcttgttgagttcaagaaggtcattcagcccgttggtttctcgtactctgatggcgaattgaagatcgagaaccgacaggactttgctggtctggagaacttgactgcttcctacaagattgagcagcttggacaagaggcgaccttgattcactctgcatccttcgatgtacccgaaatcctagctggcgagacaaaatctgtctctcttcccgtcgataacaagaagttcaacaaggacagcgaggtctacctgacagtaactctgtccctcaagcactcgacagcttgggctcctgcaggacacgagatcgcttggtcgcaacaccaactccaggctcctcagacttctgccaaggctacctctgtcgcaagcaacactctttcctccaagctagacgtttcccagaagacatccacggtgacaatctctggcaaggactttgagttcaccttcaaccgtgcttacggtacattgaagagctggatctccaacggcaagacagtgcttgactttgaccccaagactaaggccgccatcatcccatcgttctggcgacccaagaccgataatgatgttcctggcgctgttccctactgggagcgattcggcgttgaccaactcgagtctcaacttcgatccttcactgtggatgccagctcagacaaggttgttctgaaatcgaagacgtttattactcccccggtactcttctggggatgggattgcgaaattgagtacacagtgtccctgaatggctcactatctgtcaatgtgacccgtctctctccacaaggctccgttccagatcacgttcccagaatcggtctcaacctgtggggaagtaagacacttgagcatgtcaagtggctcggcctcggacccggagaaagttatcccgacaagaagacttctcaacgcgtaggcatctggaacgtcgagtccatctccgacctccaggtcccatacgacgttccccaagagaacggtaacagagaagacaccagatgggtctcactacgagactccaagtcgcctagtgtcggtcttcgtgcaagtcgcttagacggagcacactttagcttcttggcttccaaccacagagacacaactatccaggacgcaaagcatcctcctgatctgtttgaggaagatgctgtgttcatcaggctggaccacaaggttgctggtgtaggatctggtgcttgtggacctgctgttcgtgaggacttgatggtcaagactgaggagactactttcggtttcttgttggagccgctatga

SEQ ID NO: 35780 - protein, 1049 aa, Gibberella zeae PH-1
MGGGIAEQPKGISLQEDASRPDYINEAVFRRNTLPTRAYHIPETSISLNGTWDFSLSGTAIEAPEPSSKDITYEPIQVPGHWQLQGHGKPWYTNVQYPIPVCPPYVPTENPTGSYRRDFHVPAGWDANSQLRLRFDGVDSAYHVFVNGTLVGYAQGSRNPSEFDISAFVNREGANELFVRVYQWSDATYIEDQDQWWLSGIFRDVYLISFPAARIDDFFVKPDLDSSYKNGTLTTSVDIFTDKAGVLELTLSELAKNGGAVISSTKTSVDAKSNKIDLKLEVEDPKKWTAETPYLYSAELTLKSEDSKTVLHSVQQRVGFRKVELKDGLMTVNGKRIRLRGVNRHEHHPLLGRSVPIEFAKRDLLIMKKHNINALRCAHQPHDPRILDLCDEYGLWVMAEADLECHGFYDAVARPLDIPESMDYGERKKLAFGKAAQFTSNNPDWKEAYLDRINAVLNRDKNHASVIIWSFGNEAFYGDNHRAMFKYATEADPSRLIHYEGDEQAETTHMYSYMYPTVERLIKYAKEEGVKDGKFEKPIVLCEYGHAMGNGPGWLEDYEQAFRDYPRLQGGFIWEWANHGLWKDDHEGAGYYAYGGDFGDTPNDGTFVMDGLLNSQHEPTPGLVEFKKVIQPVGFSYSDGELKIENRQDFAGLENLTASYKIEQLGQEATLIHSASFDVPEILAGETKSVSLPVDNKKFNKDSEVYLTVTLSLKHSTAWAPAGHEIAWSQHQLQAPQTSAKATSVASNTLSSKLDVSQKTSTVTISGKDFEFTFNRAYGTLKSWISNGKTVLDFDPKTKAAIIPSFWRPKTDNDVPGAVPYWERFGVDQLESQLRSFTVDASSDKVVLKSKTFITPPVLFWGWDCEIEYTVSLNGSLSVNVTRLSPQGSVPDHVPRIGLNLWGSKTLEHVKWLGLGPGESYPDKKTSQRVGIWNVESISDLQVPYDVPQENGNREDTRWVSLRDSKSPSVGLRASRLDGAHFSFLASNHRDTTIQDAKHPPDLFEEDAVFIRLDHKVAGVGSGACGPAVREDLMVKTEETTFGFLLEPL

SEQ ID NO: 35781 - DNA, 2985 bp, Gibberella zeae PH-1
  CDS (1)..(2985)
atggattcatctgtggaaaagcccgactatgagaatctggaggtgatccaaagaaaccgcctccccgccagagcatactggctacctccagcccatctcatcctcaacggacaatgggactttcaatacgcaccttcacctttggaagcctcagaatatcctcctaaagacgaaaagtctgacgaagcatgggctcccattaccgtcccgggtcattggcaactccagggttacggtcgtccacactacaccaacgtgcaatttcccttcccctcagcgccacctttcatcccaaccgaaaaccctacgggtatctaccgacgcagtttcaaggttcctgatgagtgggacagcaactcccaactcagacttcgatttgatggtgtcgacagtgcctatcatgtttggttgaatggggagtttgtcggttactcacaaggaagtcgcaacgcggctgagtttgatgtgacgagtgttgtcaagaaggatgaggagaatgacttggtagtcagggtttaccaatggtgtgaggcgtcttatatcgaagatcaggatcaatggtggctctccgacacaggtatcttccgtgatgtgactctactttcatttcctgaagccagaattgaggactattttgtcaagacgaatcttgatgcgcagtaccaggatgccgctcttgcggttgacataactttgcaccatgctgaaaatgaccctctcgagttatcgcttgtccttcgcgacggtgataagcaagttgcctcaacagaaaaggtcttggatgataaggatgccacattcaaattcgaggttcctgttgccaatccaaagaagtggactgctgaaagcccatatctctaccaactcgagattgccctcaaggcgcccgatgcaaaggtgatccagaagatcacacaaaacgttggtttccgcaaagtcgaacttaaaaacagtctcatcactgtcaacggcacgccgattctcctccgaggcgcaaacagacatgaccaccatcctcttcacggaagagctgttccatacgactttctcaagcaggatttgctgctgatgaagcaacataacatcaatgcgttaagaacaagtcactatcctggtcagccttggctgtacgacctagcagatgaactgggcttctgggtcatggacgaagccgatctggaatgccacggcttctacgatgttgtcacacaacctgttcagccacccccatatctagactatgagggaagcaaggaagaatatttccccaaggcagcacagttcacttctgatgacccagagtggcacgactcgtacctggatagaatggtccaaatggttcaacgagacaagaatcacccatgcatcttctcttggtcccttggcaacgaatctttctacggcgccaaccatgttgccatgatcgaatacgcccgcagtgtagatgaccgcctcatccactacgagggcgacatcaaagcccaattgaccgacatgtactcttacatgtaccctgaccaagatcgtctgaagcgccacgtcgaaattgacggcatcgaagacggaaaatggcaaaagcctgttattctttgcgaatatgcccacgcaatgggcaatggacctggtggtctagacgattaccaagatgcattccgcaaatatgagcgtctacagggtggcttcatctgggagtgggcaaaccatggtcttttgcataaagatgggtattacgcctatggaggagactttggcgatgaaccaaacgattcgacatttgttatggatggtttagttaatagcgagcataagccaacgccgggactaacagagttgaagaaagtattccagcctgtgaagtttgaagccaagagcggaaaggtattcatcactaacgagtacgactttattgggctggggcacttggagggcgaattttcggtccaagcaatgggtgacaaggtgtcgctgctcgagtctggcaaggtggaaatcccagaggtcaagccttgggaaactgtcgagcttgctcttccggacctcactcagtaccaatcacacgacgaagaggtcttcctgcaggtttctttcaacctcaaggaggctacaaagtgggcaccagcttctcacaagatagcatggttccagcacaagatttccaccgacaaagaggccactacaccagcttcatccaccaccgcccaagccatcgatgtcaaagaaagccgagccgcagttgaggtatcgggtgccgactgggccatcaagtttgatcgagtgcgaggctatatcaccaagtggtcccatggcactgatcttctcgagatggacactgcgacgcgcgcagcgattcatccctgcttctggcgggcgcccacagataacgataaagacagcgctgtcagtgtgtggaaagactacggtgtgcaccgaatgacatctcagctacgatctttccaggttcagaaagatgacgaaagtgttacggtcaagacggtgacatatctcgcacctccagtattgggatggggctacgatattaccacaaattatcgaatctcttctggcggtattgtatcgatgaagctcgatctcgtacccaagggagtattcccgaaggatgttccccgtctgggcctcaatcttcgcttgcccaagacgctcaatcaagtggactggttcggtcgcggacctggagagtcgtatccggataagaagcactctcaggcgattggtatctggtcatcttcggtagacggcctagaagtaccgtacgatgttccccagggtcacggtaataggatggagacgcggtgggtacgcgttgttgacgcggatgggcatggaattcgggcttcgagacgcgatcaaagtacatttgactggacgggcagtcgtttgtcggatgagactgttgagaaagcgaaacacccatgtgatttgaatcatgtgagcccaaagctcgttgacgcgatgatcctcatctag

SEQ ID NO: 35782 - protein, 994 aa, Gibberella zeae PH-1
MDSSVEKPDYENLEVIQRNRLPARAYWLPPAHLILNGQWDFQYAPSPLEASEYPPKDEKSDEAWAPITVPGHWQLQGYGRPHYTNVQFPFPSAPPFIPTENPTGIYRRSFKVPDEWDSNSQLRLRFDGVDSAYHVWLNGEFVGYSQGSRNAAEFDVTSVVKKDEENDLVVRVYQWCEASYIEDQDQWWLSDTGIFRDVTLLSFPEARIEDYFVKTNLDAQYQDAALAVDITLHHAENDPLELSLVLRDGDKQVASTEKVLDDKDATFKFEVPVANPKKWTAESPYLYQLEIALKAPDAKVIQKITQNVGFRKVELKNSLITVNGTPILLRGANRHDHHPLHGRAVPYDFLKQDLLLMKQHNINALRTSHYPGQPWLYDLADELGFWVMDEADLECHGFYDVVTQPVQPPPYLDYEGSKEEYFPKAAQFTSDDPEWHDSYLDRMVQMVQRDKNHPCIFSWSLGNESFYGANHVAMIEYARSVDDRLIHYEGDIKAQLTDMYSYMYPDQDRLKRHVEIDGIEDGKWQKPVILCEYAHAMGNGPGGLDDYQDAFRKYERLQGGFIWEWANHGLLHKDGYYAYGGDFGDEPNDSTFVMDGLVNSEHKPTPGLTELKKVFQPVKFEAKSGKVFITNEYDFIGLGHLEGEFSVQAMGDKVSLLESGKVEIPEVKPWETVELALPDLTQYQSHDEEVFLQVSFNLKEATKWAPASHKIAWFQHKISTDKEATTPASSTTAQAIDVKESRAAVEVSGADWAIKFDRVRGYITKWSHGTDLLEMDTATRAAIHPCFWRAPTDNDKDSAVSVWKDYGVHRMTSQLRSFQVQKDDESVTVKTVTYLAPPVLGWGYDITTNYRISSGGIVSMKLDLVPKGVFPKDVPRLGLNLRLPKTLNQVDWFGRGPGESYPDKKHSQAIGIWSSSVDGLEVPYDVPQGHGNRMETRWVRVVDADGHGIRASRRDQSTFDWTGSRLSDETVEKAKHPCDLNHVSPKLVDAMILI

SEQ ID NO: 35783 - DNA, 3069 bp, Debaryomyces hansenii CBS767
  CDS (1)..(3069)
atgacagaatatacagcacagacactccaatcggtactttcaaacccaaaaattgtcgagatcaatagactagactctagggcttactatttacctagcgactcaacattgagtcttaatgggaattgggatttcaattactcccagtctccattagttgcacctttacctcacgacaaatttgcagaattcccaggtaggttgattgttcctggtcattggcaactacaaggatatgggaaaccacattatactaatgtcgtgttcccatttgcagtggaccctcctaatccaccatcgcagaacccaactggtacataccgccgtaagtttgttgttccagatgagtggaaatcaaagccttttttattcagacttcggtttgaaggtgtagataattcgtttcatatatttcttaatggtaaactagttggttataatgagggtagtagaaatgcatctgaatttgatgttgctgaacatattttattagacgaagttaatgaattatgggtcagggtatatcagtggtcttcttcttcatatattgaagaccaagaccagtggtggttgagtggtatttttagagatgtctacttattagggttcaataagagtggattcattgaggattttaatattgtgaccgacttggataataagtacgtggactcaagattaacaatcaacctgaagataaacttcattacctcgaattctaaattacatgtattattaaaacgtgaagaggatgaaataataaataagatttttgatttaaaagactcaaattttaatgagtgcttagaagtacaaaacccacttaaatggacagccgaatccccaaacctttataatcttgaattatcggttttagtagacaataaggtaacgaataaggtagaacaagatgtgggatttcgtaaggttgaaatgaaaaatggaacattaagggttaacggtaagtctatattaataaggggggtcaatagacatgaccaccatccaaagcacggcagagcagtaccattagaatacataaaacgtgatttatatattatgaaaaagcataacatcaatgctattcgtacatcgcattatccaaatcaccccaagttttatgaattggcaaaccgtttaggattttgggttcttgatgaagcagacctagaatgtcatggattctttgaagcagttagaaagccagttgggggcaatgatgatgctgaatatgacgaagaaaagctacgcttattcaaattagcaaaccaatttacttccgataataaagaatgggaagcagcttatgttgacagagcttatcagttagtaaagagagattttaaccaaccttgtgtatttttatggtcgcttggaaacgaagctttctatggctataatcataaatcaatggttgcgaaaatcagggaattagacacttcgcgcccaattcattatgaaggagaccttcaagcagagtctacagacttatatagccgaatgtatcctctgttccagactctcgataagtttgtgaatcaatcggagaagccattgattttatgtgaatatggccatgcaatgggaaatagcccaggtcttttaagacaatatcaggactatttctacaaatatgatcagcttcaaggaggatttatatgggagtgggccaatcatggattatacgtaaataaagatggtcaagacatttattattacggaggagacttcggtgaatatcctcacgatggggttttcatcatggatggacttttagattctcaacataatccaactccaggattaattgaatatgccaaggttattgagcctatagtgattaaaatagataaagataaaataaaaattactaacacatttgactttattgacttagataattacactgcaacataccaggtagttaactactcggatttagatagaaaaataatcaagagaggtgaattaactttacctaagattaatgcgcaagaaactgttgaagtatcattaccaggatatccgcaaattgtttcgagcggcacgaattgcttagaagtacagttcaagacaataaatcatacagaagctgttgaaagtggacatgtcgtgtcatggtcacagtatgaattagaaaagtttccaaaaagacatgttcatcaatcttatgatagaaatttggttgaatttgctgaagataagttaaagtttcaaattaagagtccctattcagactttgttttcgataagatatctgggtgtatttcaaattggcaaaatgataccaacaatttaatttcgaaaggtattaataatttaaccttttggagaccgagtattaataacgacgcaccggtagatgagccatactggcgccgatttggtcttgatcatatgcaatacaatattagaaacattcatatagataagtttcctgattcagaaaggatagctttaataaaagtggaatctttaatttcaccgccaattttatcttgggggtttaaaactattcaagaatattcgatttttacaaatgagataaagatttatacaaagttgacccctgaaggattcaaagatatatgtatcccagaaactattccaaggttgggatatgaatttgaaatcaatgatgaattgggtagatttgttaaatggtttggtagaggccccggcgaaagttatagtgacaagaaagaatcacaaaggatagatgtttatagattaccgtttgaagatcttgattattcatacgaatatccacaggaaaatggtaatcacgaagaaacagaatggttattattagagaatgacaatgaatcggggctttatgttacaatggaaggtaaacgattcggatataaagcatcagacgaatacgatgttcaagaagccaaacatcctcatgaaataaagcatggctcgaagtatattaggattgattacaagcaacatggagttggtacgggtgcatgtggtccaagagtcctagatgagtttgaattcaaaatttctaaagagacgccaattatttttaccattagtttaaaaggtttgaaatag

SEQ ID NO: 35784 - protein, 1022 aa, Debaryomyces hansenii CBS767
MTEYTAQTLQSVLSNPKIVEINRLDSRAYYLPSDSTLSLNGNWDFNYSQSPLVAPLPHDKFAEFPGRLIVPGHWQLQGYGKPHYTNVVFPFAVDPPNPPSQNPTGTYRRKFVVPDEWKSKPFLFRLRFEGVDNSFHIFLNGKLVGYNEGSRNASEFDVAEHILLDEVNELWVRVYQWSSSSYIEDQDQWWLSGIFRDVYLLGFNKSGFIEDFNIVTDLDNKYVDSRLTINLKINFITSNSKLHVLLKREEDEIINKIFDLKDSNFNECLEVQNPLKWTAESPNLYNLELSVLVDNKVTNKVEQDVGFRKVEMKNGTLRVNGKSILIRGVNRHDHHPKHGRAVPLEYIKRDLYIMKKHNINAIRTSHYPNHPKFYELANRLGFWVLDEADLECHGFFEAVRKPVGGNDDAEYDEEKLRLFKLANQFTSDNKEWEAAYVDRAYQLVKRDFNQPCVFLWSLGNEAFYGYNHKSMVAKIRELDTSRPIHYEGDLQAESTDLYSRMYPLFQTLDKFVNQSEKPLILCEYGHAMGNSPGLLRQYQDYFYKYDQLQGGFIWEWANHGLYVNKDGQDIYYYGGDFGEYPHDGVFIMDGLLDSQHNPTPGLIEYAKVIEPIVIKIDKDKIKITNTFDFIDLDNYTATYQVVNYSDLDRKIIKRGELTLPKINAQETVEVSLPGYPQIVSSGTNCLEVQFKTINHTEAVESGHVVSWSQYELEKFPKRHVHQSYDRNLVEFAEDKLKFQIKSPYSDFVFDKISGCISNWQNDTNNLISKGINNLTFWRPSINNDAPVDEPYWRRFGLDHMQYNIRNIHIDKFPDSERIALIKVESLISPPILSWGFKTIQEYSIFTNEIKIYTKLTPEGFKDICIPETIPRLGYEFEINDELGRFVKWFGRGPGESYSDKKESQRIDVYRLPFEDLDYSYEYPQENGNHEETEWLLLENDNESGLYVTMEGKRFGYKASDEYDVQEAKHPHEIKHGSKYIRIDYKQHGVGTGACGPRVLDEFEFKISKETPIIFTISLKGLK

SEQ ID NO: 35785 - DNA, 3072 bp, Aspergillus nidulans FGSC A4
  CDS (1)..(3072)
atggcctcactttcagcggtctcgggctggccaacttatctacctgactggtccaatctcaatgtattgcaccgcaacactctaccccctcgggcacacttctactcatacccaaatgaggaggcagcgctcacattcaaccgcgatgagggcctttttcagagtctgaacggcacctggaaatttcactacgatgcctcgccatttgaagctcctatctggaacacggccaatactacggagtgggatgatattatcgttcctggcgtgtggcagatgcagggatatgggcgcccgcaatataccaacatccactatccaatccctgttacgccgccaaatgtgtcgtatatgaaccctacgggctcgtattggcgggagtttgacgtccccgccgactgggatgggcagcagatccgcctgcgatacgagggcgtagacagcgcttttcatgtttgggttaatggcgaggaggttggctacagtcagggcagccgcaatcccagcgagttcgacattacgggttacctctcgtcggaaggcaccaacacacttgctacgcgcgtataccagtggtctgacggcacgtatctcgaggatcaggaccaatggtggctttctggtatcttcagggatgtgtacttagtgccgtttcccagctctgcgatcacagacttcttcattcagcctgaagtcgatgacggattcgctagcggcacgctaaaggtcaatgttactatccagggcgagcacgggaacctcagcgtcaaggtcttgtccccaggcggcaacgtggttgacgaatggactgggtcttcgtccaccatttactccaaggatatcaagggcgacgactttctactctggtctgcggagacgccgaacttatatactgtcctgattgagttcaatggacgcaccatcagccaaaaggtcgggttccgccgagtagaaatgagtggctccaatttccttgtgaatggccagccgattatcatctacggtgtcaatcgccatgaacataactacacctctggtcgaacagttccctacgagtcgatgcgcgcagacttgatccgaatgaagcaatccaacatcaacgcgatccgcacagctcactaccctcagcacccgtcattctacgacgtcgctgacgaactagggttctatgtgataaccgaagcggatcttgagtgccacggcttccgcgatattgcagggtctgaagagaacgccgcggcttggacctccgataaccctgagtggacacatgcataccttgacagggctgagcaactggttgagcgttacaagaaccatccctccgtcatcatgtggtcgctcggaaacgaatgccagtacggccagaaccaggctgccatgtacaaatggatcaaagaacgggatccctcacggctcgtccactatgaacaggaccacaatgctgaaactgccgatatatacagtcagatgtattcctcacccgatacaatgctggagcatatggccaaccacacggacaagcctctcattctatgcgagtttgcacatgccatgggcaacggtcctggtgggctgaaagaatacatcgagctgttccgttcacatccgctttcccaaggaggactagtctgggaattcaacaatcacggcttgctgaaaaaggagggcgaccttgaatactatgcctacggtggcgactttggcgatgagccgaacgatgcagacttcgtcatggacggcctaaccctctcagaccataccccgatgcccagtcttctcgaatacgcaaagattatccagcccgtctcggtgaatctgacggatgactcaagcagcatggtcataacaaaccactatgccttcgtcgatctcagcggtctcgatgtttcttggcatattgtccaggatggcgaaaccacagaggcccaagagctagatctgcctcctgttcctgccggagaaagccgcactgtggacttgccactcgatccgtcaagcctttcgaaagagacatggctcaccatcgagttcaagctcaaagaagacaaagcttgggcagttaggggccatgtcgtcgcctgggaccagctatattttcccggctcttctgcttctacttcctcaagcaagcgctccactccgatctctcgccagacttcgggaggcctggaagtcaaacaaaaccaaacaagcctccgaatcataaccggcacatcaatctttggcttcaacctgatacaaggaaacgtcacttgggaagccaacggcgcaagccttttccagcgcgggcccgaactctccttcatccgcgccatgacccaaaacgatgaaggccaatccggcaacgaggccgagtgggacgacgcatgggtcggcacgatgcacacccaagtccgcgatgtcacctggcggagctccgacactgaagcaatagtgcacttcaaagtccgcgtcgcgccgcaagtcctcgaatggggcgtcgaagcagacctcatctacacgatatccacagaggactctgtaccaacactccacatccacgccaccggcgagttcgtaggaacgaacaccccctctgttgtcccgcgcatcggcctccaaaccatcctcccctcgtctttcaacttcgttcgctggctcggccgcggccccggcgagaactacaaggactcgaagcaggcatgccgaatcggcgagtattctgcaacagtagaagaactcttcacgcactacgactacccccaggagaacggcaaccgtgaagacctgcgatggctacagatctcggaccctggcaccggtgtcactctggatgcgcggcgcgcggacgcaagcacaaatcagactgctgttgaggtcttcagcttcaccgcgtcgcagtatatgcccattgacctgaacaacgcgaaacaccctttcgacttgaagccgctggatatgacgattctttggctcgactatgataaccatggcttgggttctgcgagtgtggggccccaaccgtttgagcagtatcggtgtaagacggaaccgtttgatttcgcttttgagcttagtcttctttcctga

SEQ ID NO: 35786 - protein, 1023 aa, Aspergillus nidulans FGSC A4
MASLSAVSGWPTYLPDWSNLNVLHRNTLPPRAHFYSYPNEEAALTFNRDEGLFQSLNGTWKFHYDASPFEAPIWNTANTTEWDDIIVPGVWQMQGYGRPQYTNIHYPIPVTPPNVSYMNPTGSYWREFDVPADWDGQQIRLRYEGVDSAFHVWVNGEEVGYSQGSRNPSEFDITGYLSSEGTNTLATRVYQWSDGTYLEDQDQWWLSGIFRDVYLVPFPSSAITDFFIQPEVDDGFASGTLKVNVTIQGEHGNLSVKVLSPGGNVVDEWTGSSSTIYSKDIKGDDFLLWSAETPNLYTVLIEFNGRTISQKVGFRRVEMSGSNFLVNGQPIIIYGVNRHEHNYTSGRTVPYESMRADLIRMKQSNINAIRTAHYPQHPSFYDVADELGFYVITEADLECHGFRDIAGSEENAAAWTSDNPEWTHAYLDRAEQLVERYKNHPSVIMWSLGNECQYGQNQAAMYKWIKERDPSRLVHYEQDHNAETADIYSQMYSSPDTMLEHMANHTDKPLILCEFAHAMGNGPGGLKEYIELFRSHPLSQGGLVWEFNNHGLLKKEGDLEYYAYGGDFGDEPNDADFVMDGLTLSDHTPMPSLLEYAKIIQPVSVNLTDDSSSMVITNHYAFVDLSGLDVSWHIVQDGETTEAQELDLPPVPAGESRTVDLPLDPSSLSKETWLTIEFKLKEDKAWAVRGHVVAWDQLYFPGSSASTSSSKRSTPISRQTSGGLEVKQNQTSLRIITGTSIFGFNLIQGNVTWEANGASLFQRGPELSFIRAMTQNDEGQSGNEAEWDDAWVGTMHTQVRDVTWRSSDTEAIVHFKVRVAPQVLEWGVEADLIYTISTEDSVPTLHIHATGEFVGTNTPSVVPRIGLQTILPSSFNFVRWLGRGPGENYKDSKQACRIGEYSATVEELFTHYDYPQENGNREDLRWLQISDPGTGVTLDARRADASTNQTAVEVFSFTASQYMPIDLNNAKHPFDLKPLDMTILWLDYDNHGLGSASVGPQPFEQYRCKTEPFDFAFELSLLS

SEQ ID NO: 35787 - DNA, 3123 bp, Erwinia carotovora subsp. atroseptica SCRI1043
  CDS (1)..(3123): transl_table=11
atgagcgacagcgttttatcgaatccaacacgccagcatgctacgctgcgagaaattcttgcccgacgtgattgggaaaacccagcttgtacaaactatcagaggcttcctgctcacccgccattcaacagctggagaaacgtggctgctgcacaccaagatgaaccatctcagcgtcttcgtcgcttgaatggcgagtggaagtttagttattttactcgccccgaagccgtgccggaaagctggctgcagcaggacctgcctgattccgctaccattccggttccttccaattggcagttacagggctatgacacaccgatttacaccaacgtaaaatatccgatccccgttaatccgccctatgttccggaagataatcccacaggttgttactcgctcacttttaaagtcaatcatgactggctcagctgcggacaaacgcgggttatttttgatggcgtcaattccgcgttttacctctggtgtaacggacactgggtgggatattcgcaggatagtcgcctgcctgcggagtttgatattagtcgctatctgacgacaggagagaatcgactggcggtgatggtgttacgttggtctgacggaagttatctggaagatcaggatatgtggcgtatgagtggtattttccgcgacgtcacacttctacataaaccgacggttcatcttggcgatattcaactcactacgccgctcagcgccgatttccgccatggcacactggatattcaggtaaaggcaacactctccgagtctgaggcaaaaaactatcgcgtacacgcacagctttggcgcggtaataacctcattggtgagacacgacaggcgttcggtagcgacattgtggatgaacgtggcacctaccacgacagggcctccctccgtcttgatgtgacacggcccgatctgtggagcgccgagctgccgcatctgtatcgcgccgtcatcgcactggaaacagcggaaggcgaactgctcgaagcggaagcctatgatgtcggcttcagaaaagttgaaattagcaacggcttgctgctgctgaatggtaaaccgctgctaatccgcggcgttaaccgccatgagcatcacccgcagaacggtcaggtgatggatgaagaaacgatgcggcgcgatattatgctgatgaagcagcataattttaacgcggtgcgctgctcccattaccccaaccatccgctgtggtatcggctgtgcgatcgctatggtttgtatgtggtggatgaagcgaacattgaaacgcacggcatgcagccgatgaaccgtctctcggacgatcccatgtggctgccagcctacagcgaacgcgtatcaaggatggtgcagcgcgatcgaaatcacccttgcatcattatctggtcattggggaacgaatccggttacggcgcaaaccatgatgcactttaccagtggatcaaacgccacgacccgacccggcccgtgcattacgaaggcggcggtgcgaatagccgtgcgaccgacattgtgtgcccaatgtacgcccgtgttgatgaagatcagcccttccccaacgtacccaaatggtcgatctcgaaatggattagcatgccgaatgaacatcggccactcatcctctgcgagtacgcgcacgcgatgggcaacagtttggggggattcgcccgctactggaaagcattccgccaataccctcggttacagggtggattcatctgggattgggtcgatcaggcactgatccgccatgatgaacaaggtaatgcctactgggcgtacggcggagattttggcgatatgcctaacgatcgccagttctgtctggacggtctacttttccccgatcgcactccacatcccagcctatatgaagcccaacgagcacagcagcatattcaattcgtctggcaggctgaatccccctgtgaattacgtgttaccagtgaatacctgttccgtcatacggacaacgagcagctgaattggcacattacgctggacgataagaccctggtagaaggttcgctgccactgaagctcgctccgcaggccacccaaaccctgacgctgttggaatcacttcccaccgtcgatcgcgcaggggagatttggctcaatgttgaagtcgtgcaacccaaagaaaccgcctggtcgaaagcaaaccatcgctgtgcctgggatcagtggcaactccctataccgcttcacctgcccgaggcatcatgctctaagcagaaaatcccaccggttttacgagcgtccgatatctattttgacgtcgttcagggcgaacaacattggcgatttaaccgccagagcggcttgctggagcaatggtggacagccgataccccagcactactgactccgttgcaggatcaattcgttcgggcaccactggataacgacatcggtatcagcgaagtcgatcgcatcgatccacacgcgtgggccgaacgctggaaatcagctgggctttatcaattgcagacacagtgtgttgcgattcaggcagaccaactcgccgatgccgtacacattgtcaccgagcatgtattccgccatgcagggcagattctgctacggagtaaaaagcgctggcagattgatgcatatggcgtaatgaccgtcgatgtcgacgttgatgtcgcgactgtacttccgtcactggccagagtcggtttgagttgccaattggctgacgtcgcgcctcaggtcagttggatcgggcttgggccacatgaaaattatcccgaccgacagctcgccgcacagcatgggcattggaatctgccattggatgaccttcacacgccctacattttcccatcggagaacgggttgcgctgcaacacgcgtgcgctgacatatggcaaatgggctatcaccggaaatttccacttcgggctaagccgctacggactaactcagttgatgacgtgtacccaccatcatttattagaaaaggaaaaaggcgtttggctcaatctggatggcttccatatgggaattggtggcgatgactcctggagccccagcgttcattgtgatgatttgctcacagcaacgcattatcactatcgcgtcgctattcaacgtcactaa

SEQ ID NO: 35788 - protein, 1040 aa, Erwinia carotovora subsp. atroseptica SCRI1043
MSDSVLSNPTRQHATLREILARRDWENPACTNYQRLPAHPPFNSWRNVAAAHQDEPSQRLRRLNGEWKFSYFTRPEAVPESWLQQDLPDSATIPVPSNWQLQGYDTPIYTNVKYPIPVNPPYVPEDNPTGCYSLTFKVNHDWLSCGQTRVIFDGVNSAFYLWCNGHWVGYSQDSRLPAEFDISRYLTTGENRLAVMVLRWSDGSYLEDQDMWRMSGIFRDVTLLHKPTVHLGDIQLTTPLSADFRHGTLDIQVKATLSESEAKNYRVHAQLWRGNNLIGETRQAFGSDIVDERGTYHDRASLRLDVTRPDLWSAELPHLYRAVIALETAEGELLEAEAYDVGFRKVEISNGLLLLNGKPLLIRGVNRHEHHPQNGQVMDEETMRRDIMLMKQHNFNAVRCSHYPNHPLWYRLCDRYGLYVVDEANIETHGMQPMNRLSDDPMWLPAYSERVSRMVQRDRNHPCIIIWSLGNESGYGANHDALYQWIKRHDPTRPVHYEGGGANSRATDIVCPMYARVDEDQPFPNVPKWSISKWISMPNEHRPLILCEYAHAMGNSLGGFARYWKAFRQYPRLQGGFIWDWVDQALIRHDEQGNAYWAYGGDFGDMPNDRQFCLDGLLFPDRTPHPSLYEAQRAQQHIQFVWQAESPCELRVTSEYLFRHTDNEQLNWHITLDDKTLVEGSLPLKLAPQATQTLTLLESLPTVDRAGEIWLNVEVVQPKETAWSKANHRCAWDQWQLPIPLHLPEASCSKQKIPPVLRASDIYFDVVQGEQHWRFNRQSGLLEQWWTADTPALLTPLQDQFVRAPLDNDIGISEVDRIDPHAWAERWKSAGLYQLQTQCVAIQADQLADAVHIVTEHVFRHAGQILLRSKKRWQIDAYGVMTVDVDVDVATVLPSLARVGLSCQLADVAPQVSWIGLGPHENYPDRQLAAQHGHWNLPLDDLHTPYIFPSENGLRCNTRALTYGKWAITGNFHFGLSRYGLTQLMTCTHHHLLEKEKGVWLNLDGFHMGIGGDDSWSPSVHCDDLLTATHYHYRVAIQRH

SEQ ID NO: 35789 - DNA, 2958 bp, Propionibacterium acnes KPA171202
  CDS (1)..(2958): transl_table=11
atggttgccaatgccgacaccgcacacaggctcgacgatgctctgacgaaccttattccctggcacggtccggtagctccccgagctcacctgcataccgacgcccccaccctcgatttgtctggaacctggcggtttcagctagtcgactcaccccacgatgcaccggctggcttccccgatcctcagttcgacgacaccgatttcgtcgacctcgccgtgccgtcctcctggcacatggtcgacccagccggaaacgcgccctttggccgtccggcttacctcaacaccaactaccccatcccggttcccgcctcagacgaggacatcgtcgttcccaatgagaaccccaccgggtgctaccgtcacactttcgaggtcggaaaagaattcaccgacgccaagcgagtgctgctgcgcttcgagggcgtcgattcctttgcccgtgtttggttcaacggggtcgaactaggatggaccaagggttcgcgtctcaccagcgagttcgacgtcacgtcgcagctgcgttctggccgcaatgtgctcgctgtggccgtcagccagtggtctgacggtacattcctcgaagaccaagacatgtggagaatgtcaggaatcttccgcgaggtcaccttgctggctcggcctcatggcggcattgacgaccttttcgtccatgcctcttgggacggtgacgccaagctcctcatcgacgggccggagggcgcaaccgtggccatccccgagcttgagctcgccaccacctgcaacaccgaagtggcgatccccgacgcgcaaccgtggaccgccgaaacccccaagctctacgacgccacggtctccaccgataccgaaaccgtcactataaggatcggattccggagtgtcgccattgccggagatatcatcaccgtcaacggagaaaaaatcgtattccgtggggttaaccgccacgaatggcatccacgcaccgggcgaaccctcgatgagcagacgatgcgcgctgacctcgagctcatgaagcgccacggcgtcaatgccattcgcacctcgcactacccgccgaatgttcgtttcctcgatctgtgcgatgaatatggcgtctgggtcctccttgagtgtgacctcgagacccatggcttcgagaggggtggctgggacggcaacccgaccaatgacgaccgctggtatgactgcctacttaaccgcattcaacgcaccgtcgaacgcgacaagaatcatcccgccatcatcgggtggtcgatgggcaacgaatcccactgtggcgaaggcattcgtcttatgaacgactgggttaagaatcgtgacccatcccgtttcacccactacgagggggacgacgcccacgccatctgcgatgtatggacggtcatgtatccgtccatggagtgggtcgaggccgtgcgggaccgcaccgtcatgcccggggccgagcctgctccgcagacgggacgcgagctcgggctgcccttcttcatgtgcgagttcgcccatgcgatgggtaatggccccggagaactcgacgcctacgaggagcgctgcttcgacccgcacttccaccgtgaccgcatgcatggtggattcatctgggagtggatcgatcacggcatcgacactggacgtggctatgcctacgggggcgacttcggtgaggtcctgcacgattcaaacttcgtttgtgatgggctcgtcctgcccgatcgcactccttccccaggcctgctggagtttacggcgacgatgggggcggtgcgcatcgaggtcgacagcgagcaactgcgcgatggcaacggcatcaccgtgatcaaccgacgtgatttctcagacctatccgacctcacattcgtgtggcagctcattaacgacgacgagtacgtccagacaggagttctcgaggtcggcgccctggccgcccaccaaatctggactgggaccgtgccacttcctgacgagatctccgatcggatggttgtcgtcgtggaagcgaagctggtgagggacaccatctgggcaccggccggtcacgttgtagcccggacatcagctctgctggttcccaagccgggcccccgcctctatcttccggcatcgtcacagccgcatcgtgacggtactggctggagtctcggaccagcacactttgaccgtcgtggtcgcctcgtgacatggggtaacgcgaacctcgtcgctcctgttcttgacctcttccgtgcccccattgacaacgatcgggcaagttcactggcccgcaacgctattggtgacgcagcactcgcagctggtctcgaccgactcgtccacaccacgacgtcggtgcgcgacgagggcgatgagttggtcgtcgttactcgcagcgctgctgccgccgcacgcaattccatgacgacaacgtggagttggcgcgccatccagaccaatgatggttccgaaggggtgcaccttgacctccacgtcgatccgcacggatactggccgaccatgctcggtcgcattggcgtgacaatcggcctgcccgcagaatggaccaccgtttcatggtttggcctcgggccgaccgagaactatcccgattctcagcacgccgccatctggggacgctggaatggagaggtggatgacctgcaaaccccctatgtcatgccccaggagaacggccttcgccagggagtccacgaactgacgatcagcggttcgaacggcggcctgcggatcactgcagacggtagctggccggcattcgcggcccggccgtggacttcacaggccttgctgactgccgcccatacctgggacctgaagcccgacgggcacacctggcttaccttggacgccgtgtcagccccgcttggatcgacgtcctgcggcccgatgccgatcatgtctcaccgactgtatgcccaaccggttgacctgtcactaaccctgtcgctgatctaa

SEQ ID NO: 35790 - protein, 985 aa, Propionibacterium acnes KPA171202
MVANADTAHRLDDALTNLIPWHGPVAPRAHLHTDAPTLDLSGTWRFQLVDSPHDAPAGFPDPQFDDTDFVDLAVPSSWHMVDPAGNAPFGRPAYLNTNYPIPVPASDEDIVVPNENPTGCYRHTFEVGKEFTDAKRVLLRFEGVDSFARVWFNGVELGWTKGSRLTSEFDVTSQLRSGRNVLAVAVSQWSDGTFLEDQDMWRMSGIFREVTLLARPHGGIDDLFVHASWDGDAKLLIDGPEGATVAIPELELATTCNTEVAIPDAQPWTAETPKLYDATVSTDTETVTIRIGFRSVAIAGDIITVNGEKIVFRGVNRHEWHPRTGRTLDEQTMRADLELMKRHGVNAIRTSHYPPNVRFLDLCDEYGVWVLLECDLETHGFERGGWDGNPTNDDRWYDCLLNRIQRTVERDKNHPAIIGWSMGNESHCGEGIRLMNDWVKNRDPSRFTHYEGDDAHAICDVWTVMYPSMEWVEAVRDRTVMPGAEPAPQTGRELGLPFFMCEFAHAMGNGPGELDAYEERCFDPHFHRDRMHGGFIWEWIDHGIDTGRGYAYGGDFGEVLHDSNFVCDGLVLPDRTPSPGLLEFTATMGAVRIEVDSEQLRDGNGITVINRRDFSDLSDLTFVWQLINDDEYVQTGVLEVGALAAHQIWTGTVPLPDEISDRMVVVVEAKLVRDTIWAPAGHVVARTSALLVPKPGPRLYLPASSQPHRDGTGWSLGPAHFDRRGRLVTWGNANLVAPVLDLFRAPIDNDRASSLARNAIGDAALAAGLDRLVHTTTSVRDEGDELVVVTRSAAAAARNSMTTTWSWRAIQTNDGSEGVHLDLHVDPHGYWPTMLGRIGVTIGLPAEWTTVSWFGLGPTENYPDSQHAAIWGRWNGEVDDLQTPYVMPQENGLRQGVHELTISGSNGGLRITADGSWPAFAARPWTSQALLTAAHTWDLKPDGHTWLTLDAVSAPLGSTSCGPMPIMSHRLYAQPVDLSLTLSLI

SEQ ID NO: 35791 - DNA, 3201 bp, Yersinia pseudotuberculosis IP 32953
  CDS (1)..(3201): transl_table=11
atgacgtcacaggaaaaggtaccattccaggtgcaactgagtcttccccagattttgtcccgccgagattgggaaaacccgcagatcacacagtatcatcgcctggaggcccacccgccttttcacagttggcgtgatgtagaatctgcccagaaggatcgtccttcaccacagcaacaaacactcaatgggctatggtcattcagctatttcacacaacctgaagcggtacccgagcactgggtgaggtgcgatttagccgaggcaaagccgctccctgtaccggctaactggcaacttcatggttatgacgcaccaatttacaccaatatacaataccctattcccgtcaacccaccacgggtcccggatctaaatccaacgggttgctattcccgtgatttcacgttagagccaagctggttggcatcgggtaagactcgcattatttttgacggtgtcagttctgcattttatctgtggtgtaatgggcaatgggtaggttattcacaagacagccgcctacctgctgagttcgatctcaccccctatttgcaggctggcagtaaccgtatcgcagttttagttctgcgctggagtgatgggagttatcttgaagatcaagatatgtggcgtatgagcggaatttttcgtgatgtgaaattgttgcataaacccgagattcacttacgggatatccacatcatgacgcatctatcccctgaattcacctctgcaaatttagaggtaatggcggccgtcaatatcccctctctacagctcaatgatccgcaggtgaccggatcctatcagctccgtgtacaactttggttagccgataaattggtcgccagtttacaacagcctttaggcacccaagccattgatgaacgaggtccttatactgatcgtacccagctagtattgcgaatagatcagcctctgctctggagtgccgagcagccgacgctataccgagccgtggtttccttgctcaatcatcagcaagaattgattgaggccgaagcctatgacgtgggtttcaggcaagtggcaatccatcaaggcttgcttaaaatcaatggcaaagcggtgctgatcagaggggtgaatcgacatgaacatcacccgcaaacaggtcaggccattgatgaagagagtctgttgcaagacattttattaatgaaacagcataattttaatgctgtgcgctgctcccactatcccaatcatcctttatggtaccgcctttgtgaccgctatggtttgtatgtggttgatgaagcgaatattgagacacacggtatgcagcccatgagcaggctgtccgatgacccaagctggttttcagctttcagtgaacgggtgacgcggatggttcagcgagatcgcaaccatccatgcattattatctggtcactgggcaatgaatcaggccatggcgcaacccatgatgccctctatcgttggataaaaaccaatgaccccacccgccctgtgcaatatgaagggggcggtgccaacaccttagcgaccgacattctgtgtccgatgtatgcccgtgttgatgaagaccagccctttcctgccgtccccaagtggtcaatcaaaaaatggattggcttaccgaatgaatctcgccccttgatcctatgtgaatacgcccatgcgatgggcaatagcttcggtggatttgcccgctattggcaggcatttcgtcagtacccgcgcttacagggcgggtttatttgggactgggtagaccaaagtctgactcatcataatgaccatggtcagccttattgggcgtatgggggtgattttggtgatactcccaatgaccgccagttctgcatgaacggattagtcttccctgaccgcagcccgcacccgagcctttatgaagcgcagtgcgcacagcaattcttccaattttcgttgctgagtacgaccccgttggtgatcaacattaccagtgaatatttgttccgagagagtgataacgaacaattatattggcggataatgttagagggagaatccgtgttggagggtagccaacccctgaatttgtcgcctgaaagctcacagtgctacaggttggcagagaaattacccacgcttaataaacctgggcagctatggctgaatgttgagataaggcaaccaaaagaaaccccgtggtcccctgctcaacatcgcagtgcctggcatcaatggcgcttaccacaaccactcttttcgccgtccagtgatctgaccaatgctacagcgcattatgcccctcaactgcaacataaccttcaactacaacataaccgtcaactacaacatgaccttcaactgcagcaagatgaacagcatattaaggtgacttatcagcaacaatgctggcaattcagtcgtcaaacggggcggttggatcaatggtgggtggcggataaaccgatgctactgcgcccactacaagatcaatttgtgcgtgcgccgctggataacgatatcggtatcagcgaagctacgcatattgaccccaatgcttgggttgagcgctggaagaaagccggaatgtatcaactccagcaacgctgcctctctctacacgtagatcatttatcccattcagtacaaatcagtgccgaatacggttatgaattcgagcaagagcccttgctacacagccattgggtataccgttttgaccgacatggccgtatgaccattgatgttaacgtccgtatcgctacctcactccctgcgccagccagaattggcatgtgttgccaactggctgatatctcacctacggttgaatggctagggttggggccacatgaaaactaccctgatcggcagcttgcagcacaatatgggcactggtccctgccattagagcagatgcacaccgcgtatattttccccagtgagaatggcttgcgctgcaatacccatacgctgaattatggccgctggacgttaacgggcgatttccactttggtataagtcgctacagcacccagcaactgatggtgacctcccatcaacatctattggaacccgaagagggcacctggctcaatattgatggtttccatatgggggtgggcggtgatgattcatggagcccgagtgttcacattgatgacatactcacccgtgaaacctatcagtaccaaatctgttggcaatacaaggtgtaa

SEQ ID NO: 35792 - protein, 1066 aa, Yersinia pseudotuberculosis IP 32953
MTSQEKVPFQVQLSLPQILSRRDWENPQITQYHRLEAHPPFHSWRDVESAQKDRPSPQQQTLNGLWSFSYFTQPEAVPEHWVRCDLAEAKPLPVPANWQLHGYDAPIYTNIQYPIPVNPPRVPDLNPTGCYSRDFTLEPSWLASGKTRIIFDGVSSAFYLWCNGQWVGYSQDSRLPAEFDLTPYLQAGSNRIAVLVLRWSDGSYLEDQDMWRMSGIFRDVKLLHKPEIHLRDIHIMTHLSPEFTSANLEVMAAVNIPSLQLNDPQVTGSYQLRVQLWLADKLVASLQQPLGTQAIDERGPYTDRTQLVLRIDQPLLWSAEQPTLYRAVVSLLNHQQELIEAEAYDVGFRQVAIHQGLLKINGKAVLIRGVNRHEHHPQTGQAIDEESLLQDILLMKQHNFNAVRCSHYPNHPLWYRLCDRYGLYVVDEANIETHGMQPMSRLSDDPSWFSAFSERVTRMVQRDRNHPCIIIWSLGNESGHGATHDALYRWIKTNDPTRPVQYEGGGANTLATDILCPMYARVDEDQPFPAVPKWSIKKWIGLPNESRPLILCEYAHAMGNSFGGFARYWQAFRQYPRLQGGFIWDWVDQSLTHHNDHGQPYWAYGGDFGDTPNDRQFCMNGLVFPDRSPHPSLYEAQCAQQFFQFSLLSTTPLVINITSEYLFRESDNEQLYWRIMLEGESVLEGSQPLNLSPESSQCYRLAEKLPTLNKPGQLWLNVEIRQPKETPWSPAQHRSAWHQWRLPQPLFSPSSDLTNATAHYAPQLQHNLQLQHNRQLQHDLQLQQDEQHIKVTYQQQCWQFSRQTGRLDQWWVADKPMLLRPLQDQFVRAPLDNDIGISEATHIDPNAWVERWKKAGMYQLQQRCLSLHVDHLSHSVQISAEYGYEFEQEPLLHSHWVYRFDRHGRMTIDVNVRIATSLPAPARIGMCCQLADISPTVEWLGLGPHENYPDRQLAAQYGHWSLPLEQMHTAYIFPSENGLRCNTHTLNYGRWTLTGDFHFGISRYSTQQLMVTSHQHLLEPEEGTWLNIDGFHMGVGGDDSWSPSVHIDDILTRETYQYQICWQYKV

SEQ ID NO: 35793 - DNA, 3042 bp, Mannheimia succiniciproducens MBEL55E
  CDS (1)..(3042): transl_table=11
atgtttttacctaattatttccaaaatccgcaaattcttcatgttaacgccacgcctcatcacgcttattttattcctcatgattcggtggaaagtgcggtcaaaaatccgcgagaatcttccgctttttttaccttgctgaacggcgaatggaattttcagtattttgcaagttattatgatttaacggaggattttttaacccggcatttgcccgataaaattccggtgccggcaaattggcaaaatcacggctatgatcatcatcaatataccaatgtgaattacccgattccttttgatccgccttatgtgccgcaggataatccttgcgggctttatcagcgcaaattttgtattaatttgaataaggctaaacgctatttattgaattttgaaggtgtggatagttgcttatttgtctatattaatcaacagtttgtcggttacagtcaaatcagccactgcacctcggaatttgatgtcacggattttttacgccaaggtgaaaacgaaattcatgtgcttgtattgaaatggtgcgacggttcttatttggaagatcaggataaattccgtatgtcgggtattttccgcgatgtgtatttattagaacgtgaaagccattatttgcaggatttctttattcgtaccgaattggcggaagatctgaaaagtgcggtattaaaagtggaaccttttttcgtgcaggcgggggaacccgcagcgttgcgggaaatggcatggcagttgagtgatccgcagggcaatattctgctaagtgcggtgacggagcgcggttttgagtatgtcgtaaacgaactgcagctttggaatgccgagcaaccgaaactttataccttactgtttcggtacggctcggaagttatttgccagaaaatcggtttccggaaaatcgaggtaaaagaaggcgtgttgcatttcaatcatcagccgattaagtttaaaggcgtgaatcgccatgacagcgacccaaaaaccggttatgtcattagccgggaacaggcgttgacggatttacgtttaatcaaaacccataattttaatgcaatccgtaccgcacattatcctaacgcgccttggtttgcggaattatgcgatgaattaggtttttatttgattgcggaaagcgatatagaaagccacggcagcaatgcggtttatgtagaaatgccggaaacgagtattttgctgaatgtaaaaactgatccgaaaacggatgaaattcagcaaaaaactgtggatgaatattgctatttcgcgcgcgatccgaattttaaacaagcgattctggatcgtacttacgccaatgttcagcgtgataaaaaccgcgccagcgtagtgatttggtcattgggtaacgaaagcggtttcggtgagaatttcgaagcggcggcaaaatgggttaaggggtttgatccgagccgtttggtacattatgaaaattctatttatcagcattccgagcatacaaacgatttaactcacattgatttatacagcgaaatgtacgcaagcacggaatccatgcaggcgcattttgccgatccgaataatcgcaaaccttatttgctgtgcgaatatagccatgctatgggtaattcctgcggcgatgcggaagattattggcaaatctttaatcaatatccgcaggcttgcggcggttttgtgtgggaatggtgcaatcattcgccttatttaaccgatgggaaaatggggtacggcggtgatttcggcgatgagcccaatgacggcaatttctgtgccgacggtttggtcactgcggatcggcaggtgcaaagcagtttgctggaaatgaagaacgttaatcgtccgttgcgggcaaatttaacggcgcaaggagtggaattaaccaactatctggactttaccgatacggaagattttatcgccgtgcattatcaattcagcgaaaacggcattgttgtcggcgaaggttatattgatgacgtgaaaatttcgccaaaacagaccgcacttttgccgttaaatttgcctgaagacaacggtaatttatggttgctggatttaacttattatcaaaaaaaggaaacgccgcttgtggcaaaaaatcaccaacttggatttgatcaaattgcgctgttcgggcaacggatcgtgccggtggcaagaatcggccgggtaaaaagtgcggtcaaaatctggcaagattctgcggtgatcaagattcagacggaaaaagcgcaatttgtgatggataaacgcaagggtatcgtgcaacagattatgacggaacagggcggattattgcgtgagccgctggatttcaatatttggcgggcgttagcggacaatgataatctgatcaaacggcaatggcaggcggcgggttatgatcgcgcaataacacgggcttacgagattcaggcggaggatttttcctacaaggcggtggttaaagcgaaatgcgggctggttgcgttgtcgaaagcgcggattttaacccttgatgtggtataccatatttatgccaacggcgaactgaaaattgaaatcgatgcggaaaaagcgccacagttgccgtttttgcctcgtttcggttttcgttttgtgttggatgaggctttccaacagggtgaatattttggttatggcgaaacggaaagttatgcggataaacatcatggagcaaaattgggattgtatcgcactacggcgcaacaaaatcatcgggattatctcaaaccgcaggaaaacggcagccattggggttgttcttttgtcaaactgcggtcggaaaacgaggaaatttgtgtaacttccgacaagccgtttagttttaatctttcgccttataagcaagagagcctgcaaaaggcgaaacataattatgatttggaagactcaaactcaacggtgctttgcattgattacaaaatgagcggaataggctcgaattcctgcggaccggttttgaaagcaatataccgtttgaaagaaaacaaatggcattgcggcttcagattgcagattttataa

SEQ ID NO: 35794 - protein, 1013 aa, Mannheimia succiniciproducens MBEL55E
MFLPNYFQNPQILHVNATPHHAYFIPHDSVESAVKNPRESSAFFTLLNGEWNFQYFASYYDLTEDFLTRHLPDKIPVPANWQNHGYDHHQYTNVNYPIPFDPPYVPQDNPCGLYQRKFCINLNKAKRYLLNFEGVDSCLFVYINQQFVGYSQISHCTSEFDVTDFLRQGENEIHVLVLKWCDGSYLEDQDKFRMSGIFRDVYLLERESHYLQDFFIRTELAEDLKSAVLKVEPFFVQAGEPAALREMAWQLSDPQGNILLSAVTERGFEYVVNELQLWNAEQPKLYTLLFRYGSEVICQKIGFRKIEVKEGVLHFNHQPIKFKGVNRHDSDPKTGYVISREQALTDLRLIKTHNFNAIRTAHYPNAPWFAELCDELGFYLIAESDIESHGSNAVYVEMPETSILLNVKTDPKTDEIQQKTVDEYCYFARDPNFKQAILDRTYANVQRDKNRASVVIWSLGNESGFGENFEAAAKWVKGFDPSRLVHYENSIYQHSEHTNDLTHIDLYSEMYASTESMQAHFADPNNRKPYLLCEYSHAMGNSCGDAEDYWQIFNQYPQACGGFVWEWCNHSPYLTDGKMGYGGDFGDEPNDGNFCADGLVTADRQVQSSLLEMKNVNRPLRANLTAQGVELTNYLDFTDTEDFIAVHYQFSENGIVVGEGYIDDVKISPKQTALLPLNLPEDNGNLWLLDLTYYQKKETPLVAKNHQLGFDQIALFGQRIVPVARIGRVKSAVKIWQDSAVIKIQTEKAQFVMDKRKGIVQQIMTEQGGLLREPLDFNIWRALADNDNLIKRQWQAAGYDRAITRAYEIQAEDFSYKAVVKAKCGLVALSKARILTLDVVYHIYANGELKIEIDAEKAPQLPFLPRFGFRFVLDEAFQQGEYFGYGETESYADKHHGAKLGLYRTTAQQNHRDYLKPQENGSHWGCSFVKLRSENEEICVTSDKPFSFNLSPYKQESLQKAKHNYDLEDSNSTVLCIDYKMSGIGSNSCGPVLKAIYRLKENKWHCGFRLQIL

SEQ ID NO: 35795 - DNA, 3105 bp, Bacteroides fragilis NCTC 9343
  CDS (1)..(3105): transl_table=11
atgaaaagacaactgctgacttgctgcctggcgatgtgtagcctggcgaccatggctcaacatgacgaatggaaaaaccccgaaattaatgcggtaaaccgtgcaccgatgcacaccaattactttgcttactcttcaagtgaagaagccgcaaaagccgataaggaaaactcaagcaactttatgaccctgaatggcatctggaaattcaactgggtgaaaaatgcagatgctcgaccgaccgacttctaccggacagactataatgataaaggttggggacagatgaaagtccccggtgtttgggaaatgaacggatacggtgatccgatttatgtcaacgtaggttacgcctggagaagccaatacaaaaacaatcctccttatgtgcccatagaaaacaaccatgtaggatcgtatcggaaagaaatcattattcctgccgaatggtcaggaaaagaaatattcgcccactttggttcggtcacttcaaacatgtatctatgggtcaacggtaaatatgtgggatatagcgaagacagtaaactggaagctgaatttaacctgaccaaatatctgaaaccgggcaagaacctgattgcgtttcaggtattccgctggtgtgacggtacgtacctggaagatcaggactttttccgctactcgggagtgggacgtaactgctatttgtacagccgcaataaaaaatatattcaagatatccgtgtaactcccgacttggacagcaattatacaaacggtacattgaacgtggcactcaatctgaacggaagcggaacagtagagttgaacctgacagatccggcaggaaaaagtgttgctacggcacaggttaacggaaatggacaaaagtctgttgtcatggacgtgagcaatcctgaaaaatggacagcagaaacacccaacttatatacactgactgcaaccctgaaaaacggcagcaacacgctggaagtgatcccggtaaaagtaggtttccgcaaaattgaattgaagggcggacagatactggtgaacgggcaaccggtgctctttaaaggtgccgaccgccacgaaatggatccggacggaggatacgtggtttcccgtgaacgcatgctgcaagatattctgcgtatgaagcagctgaacattaacgcggtacgtacctgtcactatccggacgacaatctgtggtatgacctttgcgaccaatacggtatctatgtagtggcagaggccaatatcgagtcgcacggaatgggatatggcaaagaaacacttgccaaaaatccatcttacaaaaaagcacacatggaacgcaaccaacgcaatgtacagagagggtataaccatccttccatcattttctggtcattaggaaacgaagccggatacggcccgaacttcgaacagtgctatacatggatcaaaaacgaggacaaaacacgcgccgtacaatatgagcaggcgggtaccaatgaatttacagacattttctgcccgatgtattacgattatgacgcctgcaagaagtacagcgaaggcaatatagacaaacctttgatccaatgtgaatatgctcatgctatgggtaactcgcaagggggcttcaaagagtattgggatctgatacgcaaatatcccaaatatcagggaggttttatctgggactttgtagaccagtcgaaccattggaaaaataaggatggaatagacatctacggatatggcggtgacttcaataaatacgatgcttcggacaataattttaacgacaacggactgatcagccccgaccgtcgccccaacccgcatgcccatgaagtgggatacttctaccagtcaatctggactactcccggcgatctgtcaaagggagaaataaaggtatataacgaaaacttcttccgggatttgtccgcttattatatggagtggcaattactggcaaacggtgaagtaatgcaaaccggagtcgttcaggacctgaacgtggctccccaacaaacagcgactctcaaactgaatctgaatacggaaaagatctgtccatgtaaagagttgttgctcaacgtaacttataagttgaaagctgccgaaacactgatgccggcaggaagtacagtagcatatgaccagctgactatccgtccgtatacagccaaagcattggaattaaagaaccagaaagcatctaatcttgacattgtcgtaccggtcattaaggacaacgaccataattatctgattgtagaaggcgaaaacttcataatcgaattcaataagcacaatggatatctctctcgttacgaagcagatggtatgcaattattaaatccgggagctcaactgactcctaacttctggcgtgctcctaccgataatgattatggagcaggattacagcaccggtatgctgtctggaaaaatccgggactgaagttgacttcattgaaacaaagtatcgaaaacgaacaggcaatcgttcaggctgaatatgaaatgaaagctgtaaaaggaaaactattcctgacttatgttatcaacaatgagggagcggtcaaagtaactcaaaagatggaagccggcaaagaagaaaaggtttctgatatgttccgtttcggcatgcaaatgcaaatgcccgaaaacttcaatgaagtggaatattatggccgtggtccggttgaaaattatgccgaccgcaatcactctactttaattggcaaatatcgccagacagttgccgaacagttctacccgtacatccgtccgcaagaaaccggtaccaaaaccgatttgcgctggtggagagtattgaatatcagcggaaacggtctgcagtttgtaggtgacgctcctttctccgcctctgccttgaactatagcatcgagtctttggatgacggagtacaaaaagaccaacgccactctcctgaagtagcgaaagctcctttcactaacctttgcatcgataaagtacagatgggtctgggatgtgtcaacagttggggaacacttccactggagaaataccgtgtaccttatcaggattatgaattcagtttcatcctgacccccgtacgccacaaagtgaatatgtga

SEQ ID NO: 35796 - protein, 1034 aa, Bacteroides fragilis NCTC 9343
MKRQLLTCCLAMCSLATMAQHDEWKNPEINAVNRAPMHTNYFAYSSSEEAAKADKENSSNFMTLNGIWKFNWVKNADARPTDFYRTDYNDKGWGQMKVPGVWEMNGYGDPIYVNVGYAWRSQYKNNPPYVPIENNHVGSYRKEIIIPAEWSGKEIFAHFGSVTSNMYLWVNGKYVGYSEDSKLEAEFNLTKYLKPGKNLIAFQVFRWCDGTYLEDQDFFRYSGVGRNCYLYSRNKKYIQDIRVTPDLDSNYTNGTLNVALNLNGSGTVELNLTDPAGKSVATAQVNGNGQKSVVMDVSNPEKWTAETPNLYTLTATLKNGSNTLEVIPVKVGFRKIELKGGQILVNGQPVLFKGADRHEMDPDGGYVVSRERMLQDILRMKQLNINAVRTCHYPDDNLWYDLCDQYGIYVVAEANIESHGMGYGKETLAKNPSYKKAHMERNQRNVQRGYNHPSIIFWSLGNEAGYGPNFEQCYTWIKNEDKTRAVQYEQAGTNEFTDIFCPMYYDYDACKKYSEGNIDKPLIQCEYAHAMGNSQGGFKEYWDLIRKYPKYQGGFIWDFVDQSNHWKNKDGIDIYGYGGDFNKYDASDNNFNDNGLISPDRRPNPHAHEVGYFYQSIWTTPGDLSKGEIKVYNENFFRDLSAYYMEWQLLANGEVMQTGVVQDLNVAPQQTATLKLNLNTEKICPCKELLLNVTYKLKAAETLMPAGSTVAYDQLTIRPYTAKALELKNQKASNLDIVVPVIKDNDHNYLIVEGENFIIEFNKHNGYLSRYEADGMQLLNPGAQLTPNFWRAPTDNDYGAGLQHRYAVWKNPGLKLTSLKQSIENEQAIVQAEYEMKAVKGKLFLTYVINNEGAVKVTQKMEAGKEEKVSDMFRFGMQMQMPENFNEVEYYGRGPVENYADRNHSTLIGKYRQTVAEQFYPYIRPQETGTKTDLRWWRVLNISGNGLQFVGDAPFSASALNYSIESLDDGVQKDQRHSPEVAKAPFTNLCIDKVQMGLGCVNSWGTLPLEKYRVPYQDYEFSFILTPVRHKVNM

SEQ ID NO: 35797 - DNA, 3150 bp, Acidobacteria bacterium Ellin345
  CDS (1)..(3150): transl_table=11
atgagacgactcgctgccttcttcttccttttcgcgcttttgggtgtgctcggtttcgcgcaaacccccgactgggagaaccctcgcgttttcggcatcaatagagaagcgccgcgcgcgaccttcaccccatttccagacgaggcctcggcgcttaagcgtcgcgagcaaccgtctgtcttcatgcaatcgctgaacgggatgtggaagttccactgggtaaaaagccctgaagagcggcctcaggatttctatcagccgaactacgacgtgagtgcatggaaagagattcgcgtgcccgcgaactgggagatggaaggctacggcactccgatctataccaacatcatttatccctttgagcgcgatgccccgcgtgtgacgaccgcgcccgccgatcactcctggaccgcatacctgcaacgcgatcccgtcggatcgtaccgccgcgacttcacgcttccggattcatggaatggccgcgaaacgtttctcgtcttcgacggcgtcaactccgcctactacctgtggatcaacggccagaaggtcggctacagccaggacacccggatgatggcggaattcaatatcaccaagtacctgaagccgggcaccaacaccatcgccgtcgaagtctatcgctggtgcgacggcagctacatcgaggaccaggacttctggcggatgagcggcatctaccgcaacgtgacgctggtctcgcgcgcgccgctgcacatccgcgacttccaggtgcaaacgccattcgacgcgcagtatcgcgacgcgatcttgaaggtcagagtcgatgttcgcaatcttggcgcaagcaactcggctgcaacgcttgaagcgcaattactcgacgacaatagtaagccggtctttgcaatccttgcgaagcgcgtgcagctggagcagaacaaagaaacttccatcacgctcgagcagctcgtgaaggcaccgaagcaatggtccgccgaaattccaaacctttaccagcttctgctcacgctcaaagacgcagatggcaagacactcgaagtgatcccgtggaagatcggtttccgccagtccgaaatcaaaggcgaccagattctcttcaacggcaagaagctgatgatcaaaggcgtgaaccgccacgagttcgatcccgacctcggacaggtggtcacccgcgagcgcatgatccaggacatccggattatgaagcagaacaacatcaacgctgtccgcacctcgcattaccccaacgttccagagtggtacgagctcgccgacgaatatggcctctatatcctcgatgaagccaacgtcgaatcgcacggctacgacagcgaagcccagcagcgtatctccacgggcgaagactacaccgacgccattgtcgaccgcatccatcgcactattgagcgcgacaagaaccatccctcaatcatcggcttctcactcggtaacgaagccggttggggccgcaatatggccgccgagcgcgattgggcgaaagcgcaccaccccgagttcttcatcatctaccagccgcacgacagcgttcacggcgacgccctctcgccgatgtacgtgaagccccaggaaattgtgggctactacaaagagcacggccaaggtcgcccattcttcgagattgagtacgcgcacgccatgggcaacggcaccggaaacttccagcagtattgggacgtcttcgattccgaacgctgggcccacggcggcttcatctgggattgggtcgaccagggcatccgccgcaagaacgcgcaaggccgcgaaatctgggcgtacggtggcgacttcggcgacaagcccaacgacgacaacttcgtcaccaacggcctcgtgctccctgatcgaactccgcacccaggtctcaccgaagtaaagcactcgtacgccaacatcaaggtcgaggcagttgatctcgccgccggcgagttccgcattcgcaacaaatacaactttcgcgatttgagttttgtccgcggaacctgggtactggaagagaacgggaacgcgatcaaggctggcgagatacccgcaagcagtgttgctccgctcgctactcaggaggtcacaatcgatctcagccgcccagcgattcgccccaccgctgactatctcgtgacgattcgatatgaattgagagaatctacaccatgggcgccgaagggacatgtgatcgcgtgggatcagtttgcgcttgagagtggaagagaactctcatccgcggtgcgccgggagcgcgcgccgacgctcaagatcgaagacatggagcaccagttcgccgtctacaatgatcgcttctcgatcaccatcggcaaagagagcgggtccatcgagtccttcacgctcgacggcaagaacttgatcaccgcgcctctctcgccgaacttctggcgcgcgcccactgacaacgaccgcggcaacgggatgccgcagaggcaggcgatctggcggcttgccggccagaaccgtgaagtgcagagcgtgaaggcggaacagccgcagccgaatctcgtaagaatcgcaaccgagatgaagctacccgccggaaactccacacagaaatacacgtacaccatccacggcgatggcaccgtggaaatagccagcaccctccacgccgatccctcgctccccgaccttccccgcgtcggcatgcaaatgcgcgtcctaggctctctgcgcaacgtcgagtggttcggccgcggacccgacgaaaactactgggaccgcaacctagcctccaacgtcggcctctacaagaacaccatggacaaaatgtggttcccctacatcgagccgcaggaaaccggcaaccgcaccgacgttcgctgggtgaccttcaccgatgaccaaggcttcggtttcaaagccactggcgagccactcctcaacttcagcgcctggcctttccgcatgtcggagatcgagcacgaaaagtctccggtcaacatcggacgcaagcacgccggcgacatcgaaatgtccgacgacatcaccgtcaacctcgactacaaacaaatgggcgtagccggcgacgacagttggggtgcaccagtccacaaagaattcacgctgcctgcgagcgactacacgtatcgcttccgattggagccggtcggagtcaaatag

SEQ ID NO: 35798 - protein, 1049 aa, Acidobacteria bacterium Ellin345
MRRLAAFFFLFALLGVLGFAQTPDWENPRVFGINREAPRATFTPFPDEASALKRREQPSVFMQSLNGMWKFHWVKSPEERPQDFYQPNYDVSAWKEIRVPANWEMEGYGTPIYTNIIYPFERDAPRVTTAPADHSWTAYLQRDPVGSYRRDFTLPDSWNGRETFLVFDGVNSAYYLWINGQKVGYSQDTRMMAEFNITKYLKPGTNTIAVEVYRWCDGSYIEDQDFWRMSGIYRNVTLVSRAPLHIRDFQVQTPFDAQYRDAILKVRVDVRNLGASNSAATLEAQLLDDNSKPVFAILAKRVQLEQNKETSITLEQLVKAPKQWSAEIPNLYQLLLTLKDADGKTLEVIPWKIGFRQSEIKGDQILFNGKKLMIKGVNRHEFDPDLGQVVTRERMIQDIRIMKQNNINAVRTSHYPNVPEWYELADEYGLYILDEANVESHGYDSEAQQRISTGEDYTDAIVDRIHRTIERDKNHPSIIGFSLGNEAGWGRNMAAERDWAKAHHPEFFIIYQPHDSVHGDALSPMYVKPQEIVGYYKEHGQGRPFFEIEYAHAMGNGTGNFQQYWDVFDSERWAHGGFIWDWVDQGIRRKNAQGREIWAYGGDFGDKPNDDNFVTNGLVLPDRTPHPGLTEVKHSYANIKVEAVDLAAGEFRIRNKYNFRDLSFVRGTWVLEENGNAIKAGEIPASSVAPLATQEVTIDLSRPAIRPTADYLVTIRYELRESTPWAPKGHVIAWDQFALESGRELSSAVRRERAPTLKIEDMEHQFAVYNDRFSITIGKESGSIESFTLDGKNLITAPLSPNFWRAPTDNDRGNGMPQRQAIWRLAGQNREVQSVKAEQPQPNLVRIATEMKLPAGNSTQKYTYTIHGDGTVEIASTLHADPSLPDLPRVGMQMRVLGSLRNVEWFGRGPDENYWDRNLASNVGLYKNTMDKMWFPYIEPQETGNRTDVRWVTFTDDQGFGFKATGEPLLNFSAWPFRMSEIEHEKSPVNIGRKHAGDIEMSDDITVNLDYKQMGVAGDDSWGAPVHKEFTLPASDYTYRFRLEPVGVK

SEQ ID NO: 35799 - DNA, 4368 bp, Clostridium perfringens ATCC 13124
  CDS (1)..(4368): transl_table=11
atgtttagcaaaaagactattgctaatatattaagtattgctttattttcaaatattgtaattaataattttagcattaacgaagttttagcaaatgtaaaaaaagtaaaaattgaagatggtgttttttgggcaaataatcctgaaaaatttgaagacaatcgggaaaaagcacatgctactttaatgccttttaatagtattgaagaagcattaaataatcctaactactctgattattctaattcagagaattatatgtctttaaatggagaatggaaatttaatttagtagaaacttatgataaagatataaaagatttttataaaaccgattttgattctagttcatggaatactatacctgttccatctagttggcaattgcatggatatgatcagccaaggtataatgatacagcttatccttgggaatatcaagataatataccagaaccgcctgatgtaccaacagactataatccaattggatattataagaaaacatttactattcctgaaggatgggataataaagaagtttttgtatcatttcaaggagttgaatctgcatattacttatatataaatggagaatatgtgggttatagtgaggattcatttactggacacgattttaatataggaaagtttttaaaagagggagaaaatgaaatatctgtaaaagttcacagatggagtgatggaagttggttagaatcacaagatatgataaagcttagtgggatatttagagatgtgttcttatattctacacctaaagctcatataagagattatactttagttacagatttagatgataaatatagagattctaatttgaatgttgaaattgatatttctaattatggtattaaagctggaaaatataaaataaaaggtattttatatgatgaaaataaaaaaatagtaaatgaagatattagtgaatttgaattaaatgatgaagaaaatgtattagtttctattaatactagagttgaaaatcctaaaaaatggacagcggaaactcctaatttatatacttatgtaattgctttagaaaatgaaaatggtgaagtggtagaaactataagtaacaagtttggatttagaaaaatagaaattaaaaataatcaagtatgtataaatggacagcctatatcatttaaaggagtgaataggcatgaatttttacctgatactggtagaacacttacggaagaaagtatgatagaagatataaagcttatgaaaaaaaataatataaatgcagtaaggtcatctcattatcctaatgatccaagatggtacgatttatgtaatgagtatggactatatgttatggatgaagctaatttggaaactcatggaagattagatgatattcctcagagtagaccagaatggaccgaggcggttatagatagacagagatcgatgttagagagatcaaaaaatgaaacaagtataataatgtggtcattaggaaatgagtcaagtggaggggaaaattttgaaatagctgcaaagtggataaaggaaaatgatcctactagattagttcattatgaagcggagaggactgtaggagacgtatatagtagaatgtatagaactatagaagaaatggaagcctatgcaaatgatcctgataataaaaagccatatatacaatgtgaatatgctcatggaatgggaaatagtataggtaatttacaaaaatattgggatgtctttgataaatacgatataatgcaaggtggatttatatgggattgggctgatcaagctataagaatgaaagataaaaacacaggtgaagaatttctaagttatggtggcgattggggagatagtgaatttacggatgggaatttctgtgctaatggcttagtttcagctgatagaacagttcaacctgaacttcaagaagtaaaaaaggtttatcaagaaatagagatagaggatattgatattttaaatggtaaagtaaagatagtaaatgaacatttatttactaatttaaataaatacaaaggaaaatgggagttaagagccgatgataatatattacaaaatggggagttagatatttctgttgatccattaagtagcaaggaatttacgattccatttaaaaagccagaacttagtccaggggttgagtattggttaaatataagttttgaattaaaggatgatgagccttgggctgaaaaaggatatgtaatatcaaaagaacaatttaaacttccttttgataatgaaatggaaaaaggaattgatttaaattcaatgaattcaatagaacttaaaaatgatgaaaataatgtgcaaattataggtgatggatttaaggtttcttttgataagaaacttggtgctttagaatcatataaaatagataaagaagggaatgaaattgagcttatagaagaacctataagacctaattattggagagcacctaatgataatgacaaaggatttggtgctgaagaaagatttgatacttggagatatgcaggtgcaaatgctaaagtagaaaatctagaagttatagaagtaggagataaggctgtaaaagtaaatgtagactttatattaccaactaatatagaatctaaacttaatgttgaatatattgtttatggaaatggagaagtttctgtaaataatacacttaatgcttctaaaggtctttcagaaataccagaaataggaatgatgcttaaacttcctaaagaatttgatagtattacttggtatggaagaggaccagaagaaaattatatagatagaaatactgggtatgatattggtgtttataacaagaatgttaaagatttcttcttcccatacttagaaccatccgaaacaggaaatagaacagatacaagatgggtaacattaactaataataatggagtaggattaatggcatctggaatacctagtatagaatttaatgcattacagtatactccagaagaactttcatccggtaaacgtcatccacatgagttagcaaaagaagatagtatagttttaagaattaatcatagacaaatgggtgttggaggagataacagctggggagcaactccacatagagaatttatgaatgaatctggtaaaatatataattattcttttaaaattaaaggtatcgacaaaagttcttctccaatggaaataagtaaaaagaatttaaaggaagatttaattaaggatattaaaattgatggtgttagtttaaggggctttaatgaaaatattacagagtataacatagattacttagagaaaacattggaaaaacctccagtaatagaagttgtaaaagctaatgataatatagatgtagaggtagaaaatgtatatacaataccaggaaaagcaaccattaaggttaatcataaggatgagcttttaaataaaatttatactaaagaatatgttataaattttggaacacataatgtggaatatctttcagatataagttggaaaagcgcaacttctggcatgtatgaacctgtaaaagataggtctgtagttaataatccattagtgttaaaaattgatggagaaataaaaacttttgataaaggtgtgggagtaaactcaaactcagaaatagtagttgatttaaaaggaaaaggttatgaaaaatttgaagcttatgttggcatggatagaggagtaagtggatatggatcttctatagtagctagagttgaggttgatggcaaggaggtattcaatagtgagaaaatatatagtacttctaattgtcataaggttgaagtagatttaaaaggtgctgaaaaattagcattatatattgatgactatgacaataatattaagtatgatcatggaaattgggctgatgctaaatttataaaagctgaggcaaataaagatacttccttaaaagctttaaaagtaaatggagaaaatttaaaagggtttaacacaaatacttttgaatatgatgtgaacctttcaaaggattctcatatacctaagattgaagctattgcaatgaatgaaaattcaaaagtgtttattgaagatgcattaagtattcctggcacaagttatattaaggttatttcagaggcaagcactatgaaaacttataaaataaactttgaattaaatggaaattctacagaagatgatgagaagcctggagatgtagaaaaaccaaatgataatgacttagatgaaaataataagccagaagattctgagggattaccaaatacaggacaaagtgttattaactttgctattattggaattatttcatctttagcaggagtaaaactattaagaagaaaaaataaataa

SEQ ID NO: 35800 - protein, 1455 aa, Clostridium perfringens ATCC 13124
MFSKKTIANILSIALFSNIVINNFSINEVLANVKKVKIEDGVFWANNPEKFEDNREKAHATLMPFNSIEEALNNPNYSDYSNSENYMSLNGEWKFNLVETYDKDIKDFYKTDFDSSSWNTIPVPSSWQLHGYDQPRYNDTAYPWEYQDNIPEPPDVPTDYNPIGYYKKTFTIPEGWDNKEVFVSFQGVESAYYLYINGEYVGYSEDSFTGHDFNIGKFLKEGENEISVKVHRWSDGSWLESQDMIKLSGIFRDVFLYSTPKAHIRDYTLVTDLDDKYRDSNLNVEIDISNYGIKAGKYKIKGILYDENKKIVNEDISEFELNDEENVLVSINTRVENPKKWTAETPNLYTYVIALENENGEVVETISNKFGFRKIEIKNNQVCINGQPISFKGVNRHEFLPDTGRTLTEESMIEDIKLMKKNNINAVRSSHYPNDPRWYDLCNEYGLYVMDEANLETHGRLDDIPQSRPEWTEAVIDRQRSMLERSKNETSIIMWSLGNESSGGENFEIAAKWIKENDPTRLVHYEAERTVGDVYSRMYRTIEEMEAYANDPDNKKPYIQCEYAHGMGNSIGNLQKYWDVFDKYDIMQGGFIWDWADQAIRMKDKNTGEEFLSYGGDWGDSEFTDGNFCANGLVSADRTVQPELQEVKKVYQEIEIEDIDILNGKVKIVNEHLFTNLNKYKGKWELRADDNILQNGELDISVDPLSSKEFTIPFKKPELSPGVEYWLNISFELKDDEPWAEKGYVISKEQFKLPFDNEMEKGIDLNSMNSIELKNDENNVQIIGDGFKVSFDKKLGALESYKIDKEGNEIELIEEPIRPNYWRAPNDNDKGFGAEERFDTWRYAGANAKVENLEVIEVGDKAVKVNVDFILPTNIESKLNVEYIVYGNGEVSVNNTLNASKGLSEIPEIGMMLKLPKEFDSITWYGRGPEENYIDRNTGYDIGVYNKNVKDFFFPYLEPSETGNRTDTRWVTLTNNNGVGLMASGIPSIEFNALQYTPEELSSGKRHPHELAKEDSIVLRINHRQMGVGGDNSWGATPHREFMNESGKIYNYSFKIKGIDKSSSPMEISKKNLKEDLIKDIKIDGVSLRGFNENITEYNIDYLEKTLEKPPVIEVVKANDNIDVEVENVYTIPGKATIKVNHKDELLNKIYTKEYVINFGTHNVEYLSDISWKSATSGMYEPVKDRSVVNNPLVLKIDGEIKTFDKGVGVNSNSEIVVDLKGKGYEKFEAYVGMDRGVSGYGSSIVARVEVDGKEVFNSEKIYSTSNCHKVEVDLKGAEKLALYIDDYDNNIKYDHGNWADAKFIKAEANKDTSLKALKVNGENLKGFNTNTFEYDVNLSKDSHIPKIEAIAMNENSKVFIEDALSIPGTSYIKVISEASTMKTYKINFELNGNSTEDDEKPGDVEKPNDNDLDENNKPEDSEGLPNTGQSVINFAIIGIISSLAGVKLLRRKNK

SEQ ID NO: 35801 - DNA, 3096 bp, Oenococcus oeni PSU-1
  CDS (1)..(3096): transl_table=11
atgactaataaaatttctttccgggacatcatcaatagaaaagattgggaaaaccctgttataaccaactggcatcgtttaccgatccataccgaaatgaattactctaaaagccttaatgaggacaagcaaaaaacgatccagtctcttaatggaaattggtgtttcagttatttttctaaagttaccgatgttcctgaaaattgggcagatcgagatttaacaaaaagcaacataatgccggtgccatcgaattggcaattgcatggttacgatcaaccgatttactcgaatgttgcctacccttttccagctaatccaccttatttgccagaggaaaatccaacggcttgttacagtcgtattttccaactaaatgatgactggcttcaatcaggccaaaatcatgtaatttttaatggtgtgggttcagcttttcatctgtggttgaatggccaatggatcggttactcggaagatagtcgtttaccagccgaattcgatttaacaaaatatttaaaatcaggtaaaaatcgaatttcagtgatggttctccgctggagcaaaggcagttactttgaagatcaggacatgtggcggatgtcgggaattttccgcgatgtcgaagttaaacatctgccggcaacatatttgcaggactatcagcttcaaaccgatttagacgatgatcttgatcaagcaaaaattacaatcaaagcacaagttgccggcaaaaatttttcacagaacaaattacgaacccgactatattttgccaatgaaaaagttgccgaccaaagcagcagattgtcaacaagggcagttgacgaacgggggcctttagacaaccaatttattgccgaattaaatttaaaagatccatatttgtggtcggccgaactcccttatctttatcagcttgtcatcgaattgcttacagatgacggtgatatactacaagttgaaaaagtaaatatcggtgtccgaaaagttgagatcaaaaatggcctcttaaaactaaatggaaagcctttgttgattagaggaaccaataaacacgaatttgattccaagaaaggttatgccgtcgatgaagagaccatgattcaggacattaaagccatgaagcgaaataactttaatgctgtcagatgctcgcattatcctaataatcgtcgatggtatgaactttgtgatcagtatggcctttatgttgtcgacgaagcgaatatcgagacccacggaatggtgccaatgaatcgtttgacaaatgatccggtgtacttgcctttaatgtcggatcgtgtgacgagaatggttacacgcgatcgcaatcatccatcaattataatttggtctttaggcaatgaatccggatacggccgcaaccatgccgctttatacaactggatcaaacaaagtgatctgagtcggccggtacaatatgaaggaggcggcgccaatacagcagttactgacattattgttccaatgtatgctcgtgttgagcaagatcaaatagaatcagttaattcaaaatggtctttaaagaagtggattggtcttcccggagaaacgcgcccgctaattctttgcgaatatgcccacgatatgggcaacagtttgggtggcttcggcaaatattggcaagcctttcataagtatccacgattacagggaggttttatttgggattgggtcgaccagggacttttgaagaaagatgtaaacggtaatgacttttatgcctatggaggcgactttaaagatcaaccaaatgatcgtcaattctgtttggacggtttgctttttcccgatcgaacaccgaagccggcgatgcatgaagtcaaatattggcaacaatattatttgtttaatttgcagcgaaacccacttggacaggctgaaagtttcactgtcaccaatgattattcttttaaaaagagcagtaatgaacgattacattaccagattaaaagcgaaaacgaaatcgttattgataaatatattgatctagtgcttaatcccggtgaatctttattaataaaattaccgaagggtcgatcttcgaccagttctttgcttgatatagatatctctcttatcaagggaaactcttgggctccaagcggctttaaaattgccagtgaacaatatgttttagcaaaaaagtttgggccaactaacgccgtcacggcagcaacgaataagatttctttaatcgaaaacaaagataccaacacttttgaaatcaaattggacgatcaaaagtggcagtttgctaaaaattccggtttgttagtgagttggtccaaatcaggcaatgagaatttattggacgcgttacgtgatcaatttacacgtgcaccgcttgataacgacattggtgttagtaaagtcgaccatatcgatccaaatgcatggtatgaacgttggaaatccgcaggaatgtataatctaaaaaccaatcttgtttcaattgatgccgaacaactcgaacgagctgttcttattcgaacagaacacagttattcaaatcatttccagattcttttcaagagttcgaaaatttatcgaattgatgctaacgggacgatgaccgttacagtcgatgtttcactggctcagggaattccgttccctgcaagaataggtttaacttgtcacttagctgaccaaataactgatgtttcatacacgggactgggcccatttgaaaattatcccgatcgtcaatcggcggctcaatacggccattggcaaatggaattggatgatctttacacgccttatatatttccaagtgaaaacggttcacgtggtcaagttagtcaattggaatttggcaagcaaaaaatttcagcgtatcatgagcaaaacttttctttcaatttgagtcgttttagtaagcagcaattagccaggatttcacatcgaaatcttttacaagcagaaaatggtgtctggctgtcgattgatggctatcgtatgggagttggcggagacgattcctggagcccaagcgtcgctcccgaatatttactctcgaataattattatcattatgctttccaatggtgcagaaaagatatctga

SEQ ID NO: 35802 - protein, 1031 aa, Oenococcus oeni PSU-1
MTNKISFRDIINRKDWENPVITNWHRLPIHTEMNYSKSLNEDKQKTIQSLNGNWCFSYFSKVTDVPENWADRDLTKSNIMPVPSNWQLHGYDQPIYSNVAYPFPANPPYLPEENPTACYSRIFQLNDDWLQSGQNHVIFNGVGSAFHLWLNGQWIGYSEDSRLPAEFDLTKYLKSGKNRISVMVLRWSKGSYFEDQDMWRMSGIFRDVEVKHLPATYLQDYQLQTDLDDDLDQAKITIKAQVAGKNFSQNKLRTRLYFANEKVADQSSRLSTRAVDERGPLDNQFIAELNLKDPYLWSAELPYLYQLVIELLTDDGDILQVEKVNIGVRKVEIKNGLLKLNGKPLLIRGTNKHEFDSKKGYAVDEETMIQDIKAMKRNNFNAVRCSHYPNNRRWYELCDQYGLYVVDEANIETHGMVPMNRLTNDPVYLPLMSDRVTRMVTRDRNHPSIIIWSLGNESGYGRNHAALYNWIKQSDLSRPVQYEGGGANTAVTDIIVPMYARVEQDQIESVNSKWSLKKWIGLPGETRPLILCEYAHDMGNSLGGFGKYWQAFHKYPRLQGGFIWDWVDQGLLKKDVNGNDFYAYGGDFKDQPNDRQFCLDGLLFPDRTPKPAMHEVKYWQQYYLFNLQRNPLGQAESFTVTNDYSFKKSSNERLHYQIKSENEIVIDKYIDLVLNPGESLLIKLPKGRSSTSSLLDIDISLIKGNSWAPSGFKIASEQYVLAKKFGPTNAVTAATNKISLIENKDTNTFEIKLDDQKWQFAKNSGLLVSWSKSGNENLLDALRDQFTRAPLDNDIGVSKVDHIDPNAWYERWKSAGMYNLKTNLVSIDAEQLERAVLIRTEHSYSNHFQILFKSSKIYRIDANGTMTVTVDVSLAQGIPFPARIGLTCHLADQITDVSYTGLGPFENYPDRQSAAQYGHWQMELDDLYTPYIFPSENGSRGQVSQLEFGKQKISAYHEQNFSFNLSRFSKQQLARISHRNLLQAENGVWLSIDGYRMGVGGDDSWSPSVAPEYLLSNNYYHYAFQWCRKDI

SEQ ID NO: 35803 - DNA, 3111 bp, Leuconostoc mesenteroides subsp. mesenteroides ATCC 8293
  CDS (1)..(3111): transl_table=11
atgacaagtataaaacaaatattagcacgccatgattgggaaaatccagtggtaacgaattggaatcgattaccactacacacgagtatgagctacgctaatgaacgaaacaaacgagaaattaaacaaccacgaaaaagcctcaatggaccttggcagtttagttattttgaaaatctatcagacattgacgaagaatggcgaaaaaaagacttgcctacgtcaaaaattattcatgttcctagtaattggcagttacagggggactatgatgttcctgtttatacaaacgttacttacccatttccagtaaatccaccgtatgtgccgactgagaatccggttggcgcttattccaaaaaggtctttcttgataataaatggttagcagataacacagaatcgcatgttgtctttaatggtgttgggtctgcattttatctttgggttaacggagaatgggtcggctattcggaagacagtcgcttaccagcagaatttgacatcactgaagaattgcgagctggtgaaaatcgtatcgcggttttggtgttgaagtggagcaaggggagctattttgaagatcaagatatgtggcgaatgtcgggaattttccgtgatgttgatcttattcgtgttccaaaaacaagatttcaggatttagcaattgagacaaaactggatgaagatcttgatgacgcaactgttgaggttagggcacaattagttggaaattcggcggataacttgagtgtgactgctgaattattttaccatggtatgagcttgttcaaagcaacagaacaatttggtaatcgagtaatcgacgaacgtggtactaatgatggtcaagttagtttagaattaccagtaaaaaatccggcattatggtcagctgaagtaccaaatttatatgatataaaagtttctttgcacgatggggaagaaaactatcaaattgaaaataagaaagttggtataaggaaggttcaaattaaagatggtttactgactttaaataatcaaccgttattaattcgtggtgtcaataagcatgaatttaattcaaaaacaggatactatgttgatgaaaaaacaatgattgatgatatccgtatgatgaaggagcataattttaatgcagtaaggctttctcattatcccaacgcttcacgatggtacgagctgtgtgatcaatatggattatatttagtagatgaggcaaatatcgagacacatggtgtcaagccaatgaattaccttacaaatgaccctaaatacttacccttgatgatggagcgagtgacacgaatggttcagagagactataatcatccatcaattattatttggtcgttggggaatgagtctggctatggacataatcatgatgcaatgtatcaatggattaaaaataccgacccctctcgtccaattcagtatgagggtggtggtgctgatacaccggcaacggacattattgcaccgatgtatgcacgtgttgaccaagatcaagtggaagaggtcaactcaaaatgggctattaaaaaatggattggcttgtcaaaagaaaatcgaccactgatattgtgtgaatatgcgcatagcatggggaatagtttaggtggatttaataaatattgggaggcttttgaaaaatatccaagacttcagggtggcttcatttgggattgggtagatcagggcctgctcacaaaaaataacgaaggccaatcatattatgcttatggtggtgattttggtgattatcctaatgatcgccaatttagcttggatgggttactatttcccgatcgcactccaaaaccagccttgctggaggcaaaatactgtcaacaatatttcgctttccaactggaaaaagatccaactggaaaagttaactatatgacggtatcaaataagcatttattcaaaacagtcaatgatgcaaccttaatttatcaaattttgtcaaatgatcaggtgattgagactaaaaaaatcaaactcaatttggcaccccaaactgaagagagagtcagtttgaatttctccgataacagcaatgaagatgtttatatgaactgccagattgttcaagatagcactgatggccttatccggtctggtacattactggcttacaagcaatttattttgagaaataaaccgataatgattagtgacgtacgatcatctgatgattatgaagatttccttataaatgatgcgacagactccttgtccatttctttagatgatgctatctggcagtttaataagcgtacaggttggttatctaattggataaagaatgggcaggaaaaagtactgactccattgaaagatcaatttagtagagcagctttggataatgatattggagtgagtgaggtaacaaatattgatccaaatgcttggtttgaaagatggcaagcaacagggttcaatcacttgaatgaaaagcttgtgcaattcaattggacagcattaaaagatgaggtacgaatcacgacacaacatcaatttttatcaccgattgatcaacatatcatgtttatatctagtaaagaatatcgaataaatcatgttggtgatttaaaagtgtatgtggatgtttggcggcaagttgccgatccacagccagcacgtattggattgagtgttcaaattaacgcaacgactgacgcagtgacttatagtggattgggaccaatggaaaactatccagataggcgttcagcggctattcgtggcaaatgggatgcttccttgaaggaactttatacaccgtatgtttttcctagtgaaaatggcttgcgtactgaagtggcgtatcttaaatttgatcatcatgtcattcgggcactcgaacaacgtttttcatttaatttgagtcaatttagtcaagcacaattgtcagcagtcacgcatcaacacctattaaaacctgaagagggtgtttggttgaacattgatggctatcatatgggtgttggtggcgatgattcttggtctccaagcgtgtcgccagagtttttattatcaaacgatcattatcattatagtttttcgtggtcaaatgcagaaggagaagcaaatgtatag

SEQ ID NO: 35804 - protein, 1036 aa, Leuconostoc mesenteroides subsp. mesenteroides ATCC 8293
MTSIKQILARHDWENPVVTNWNRLPLHTSMSYANERNKREIKQPRKSLNGPWQFSYFENLSDIDEEWRKKDLPTSKIIHVPSNWQLQGDYDVPVYTNVTYPFPVNPPYVPTENPVGAYSKKVFLDNKWLADNTESHVVFNGVGSAFYLWVNGEWVGYSEDSRLPAEFDITEELRAGENRIAVLVLKWSKGSYFEDQDMWRMSGIFRDVDLIRVPKTRFQDLAIETKLDEDLDDATVEVRAQLVGNSADNLSVTAELFYHGMSLFKATEQFGNRVIDERGTNDGQVSLELPVKNPALWSAEVPNLYDIKVSLHDGEENYQIENKKVGIRKVQIKDGLLTLNNQPLLIRGVNKHEFNSKTGYYVDEKTMIDDIRMMKEHNFNAVRLSHYPNASRWYELCDQYGLYLVDEANIETHGVKPMNYLTNDPKYLPLMMERVTRMVQRDYNHPSIIIWSLGNESGYGHNHDAMYQWIKNTDPSRPIQYEGGGADTPATDIIAPMYARVDQDQVEEVNSKWAIKKWIGLSKENRPLILCEYAHSMGNSLGGFNKYWEAFEKYPRLQGGFIWDWVDQGLLTKNNEGQSYYAYGGDFGDYPNDRQFSLDGLLFPDRTPKPALLEAKYCQQYFAFQLEKDPTGKVNYMTVSNKHLFKTVNDATLIYQILSNDQVIETKKIKLNLAPQTEERVSLNFSDNSNEDVYMNCQIVQDSTDGLIRSGTLLAYKQFILRNKPIMISDVRSSDDYEDFLINDATDSLSISLDDAIWQFNKRTGWLSNWIKNGQEKVLTPLKDQFSRAALDNDIGVSEVTNIDPNAWFERWQATGFNHLNEKLVQFNWTALKDEVRITTQHQFLSPIDQHIMFISSKEYRINHVGDLKVYVDVWRQVADPQPARIGLSVQINATTDAVTYSGLGPMENYPDRRSAAIRGKWDASLKELYTPYVFPSENGLRTEVAYLKFDHHVIRALEQRFSFNLSQFSQAQLSAVTHQHLLKPEEGVWLNIDGYHMGVGGDDSWSPSVSPEFLLSNDHYHYSFSWSNAEGEANV

SEQ ID NO: 35805 - DNA, 3093 bp, Solibacter usitatus Ellin6076
  CDS (1)..(3093): transl_table=11
gtggtccacgtcggcaccgaaaaaccgcacgccacgatgatggcgtatccctcggcccaactggcgaggaccggcgatcgcgcgcagtccccgtggttccatctgctgaacggcacctggaagttccacggctcgctgcgccccagcgaacggccagtcgatttctatcgcaccgatttcaacgactcggcgtggggcccgatgccggtaccggcctcctggcagatgcacggcttcgacgttcccatatacaccaacatcatttatcctttccctcaggaccgctcgaaggcgcccgctccgccgtacgacttcaatcccgtgggcagttatcggcgccagttcacggttccgcccacgtggaaaggccgcacggtcctgctgcatttcgacggtgtggactcggccttctacgtgtgggtgaacggccataagctgggctacagcgaggatagccggacaccggccgagttcaatcttacgccgtatttgaaggcaggcagcaatctgctggcggtagaagtctaccgtttcggcgacggcgcctacctggaagaccaggacatgtggcgcatgagcggcatcttccgcgacgtgtacctatggagtacgccggagcagcacctgcgtgatttccaggtgaacaccaatctcgacgatcagtaccgcgatgccacgctggcgatcaagggcacgatggccaacgcgtcggagaagccggcgaaggtcacgattaccgcggcgctgttcgatgccgccggcgcggcgtacggaaagccggccgccacgacggtggagatcggcggcaaggccgatgcggcggcgcagatcgcagttcccgcggccgcaccgcgcaaatggtcggcggaggatccgtacctttataaactcctgctcacggtaacggacgcctcggggcgtgtgctcgaagtggtcccgcagaacgtgggcttccgccgcgtggagatcaagggcgggcgtttcctgatcaacggacaggccattctggtcaagggcgtgaaccggcacgagcacagcgaggagacggcgaagtacgtgccggtggaatccatgatcaaggacatccggttgatgaagcagttcaacgtgaacgcggtgcggacgtcccactatcccaactcgccggtctggtacgaactctgcgaccgctacggcatctacgtgctggatgaagccaacatcgaatgccaccactacggcaacgacgtccgcaaccgcctgaccaacgaccctgagtggcagacggcctacctggaccgcgtggagcgcatggtggagcgcgacaagaaccacgcgagcgtggtcatctggtcgatgggcaatgagagcggcgatggccccaacgccgcggcggcttatcagtggacgaagcagcgcgacgcttcgcggccattccactacgaaggcaccaccagccacggcggttccaatgccgatatcaattccttcatgtatcccacgcccgagcgcgtcaagcgcgccgctgccgagcggcccgacatgccgctgattctctgcgagtacgagcacgcgatgggaaattcctcgggcggcctgaaggaatactgggacatcttctattcggggaccaacgcccagggcgcgttcgtgtgggactgggtggaccaggggatccgactgccgattcccggcgagtacaagtccaacacgtcgaaatcgactttcctcgcgtacggcggatggtgggaagacaagaccggcattcgcaacgacaacgacttcaacaacaacggactggtctccgccgatcgggtgccgcatcccgggctgtacgcgttgaagtacgtgtatcgcaacctgcatgcctcggcggtggacctggccgatggacgcatcaaaatcaagaactggttcgacttcaccaatccaaaggacctggcacagggaacctgggaggtgaaggccgacggccgcacgatcgcgagcggcaagctggcgccgctcgatatcgagccgcgcggcgagaaggaattcacgattccgctgccgaagctgaaacccgcgcctggcgtggagtactggttgaacgttagcttcactttgaagcaggagacgcgctgggcgccgctcggacatgagatcgcgtgggaccagttcgcgctgccggtctcgctgccgaaggcggaacgcgtccccagcactgccaaattagaggtgaaggacggggaaggcgaagtgaccgtgagcggcaagagcttcgcggtgcggttcgataagcaggccgggctgatgacgcgctactcctatcagggcgtgaccctgctggagcgcggtcctgcgccggacttctggcgcgcgccgaccaacaacgatcgcggcgcatggaagtcgattagcggccgccccaaccttgccaaggcccagaatatcgaactctggcgcgaggccgggcctcggtgggtagtgaagaacgtgcgcgtggagaaggtggacgacgccaccgcgcgcgtgatggtgcaggcggatctcccggtggtggatgccggatacggcatgcagtacacgattcacggcaatggtgagatcgacgtggagtgccgctatacgccggggacgggcctggcgatgatgccgcgcttcgggacggagctggtggtagcgcccgggttcgaaacgttctcatggtacggccgcggcccgaaggagaccatgatcgaccgcgcgttcgagcggatcggccagtacaagagcacggtagatggcgagtgggtggaatacatgcgcccgcaggagaacggaaataaggtggacgtgcgttgggtccggctcaccaacgccgccggactcggcatcgaggccaccggcgccgcgccgctcaatgtgacggcgcggcactacacgaaaaccgacatcgaacgcgcgggctacaccttccagatgaaacggcacccggaggtgtatttgaacctcgacgataaacagatgggggcgggcggcatcgatagctggagcccgaacgcgtacccgatgacgccttaccgcatttccgccaacgaggagcacaaattctcctatacgctgcggcccatcgcaccggcgcccaagcaataa

SEQ ID NO: 35806 - protein, 1030 aa, Solibacter usitatus Ellin6076
MVHVGTEKPHATMMAYPSAQLARTGDRAQSPWFHLLNGTWKFHGSLRPSERPVDFYRTDFNDSAWGPMPVPASWQMHGFDVPIYTNIIYPFPQDRSKAPAPPYDFNPVGSYRRQFTVPPTWKGRTVLLHFDGVDSAFYVWVNGHKLGYSEDSRTPAEFNLTPYLKAGSNLLAVEVYRFGDGAYLEDQDMWRMSGIFRDVYLWSTPEQHLRDFQVNTNLDDQYRDATLAIKGTMANASEKPAKVTITAALFDAAGAAYGKPAATTVEIGGKADAAAQIAVPAAAPRKWSAEDPYLYKLLLTVTDASGRVLEVVPQNVGFRRVEIKGGRFLINGQAILVKGVNRHEHSEETAKYVPVESMIKDIRLMKQFNVNAVRTSHYPNSPVWYELCDRYGIYVLDEANIECHHYGNDVRNRLTNDPEWQTAYLDRVERMVERDKNHASVVIWSMGNESGDGPNAAAAYQWTKQRDASRPFHYEGTTSHGGSNADINSFMYPTPERVKRAAAERPDMPLILCEYEHAMGNSSGGLKEYWDIFYSGTNAQGAFVWDWVDQGIRLPIPGEYKSNTSKSTFLAYGGWWEDKTGIRNDNDFNNNGLVSADRVPHPGLYALKYVYRNLHASAVDLADGRIKIKNWFDFTNPKDLAQGTWEVKADGRTIASGKLAPLDIEPRGEKEFTIPLPKLKPAPGVEYWLNVSFTLKQETRWAPLGHEIAWDQFALPVSLPKAERVPSTAKLEVKDGEGEVTVSGKSFAVRFDKQAGLMTRYSYQGVTLLERGPAPDFWRAPTNNDRGAWKSISGRPNLAKAQNIELWREAGPRWVVKNVRVEKVDDATARVMVQADLPVVDAGYGMQYTIHGNGEIDVECRYTPGTGLAMMPRFGTELVVAPGFETFSWYGRGPKETMIDRAFERIGQYKSTVDGEWVEYMRPQENGNKVDVRWVRLTNAAGLGIEATGAAPLNVTARHYTKTDIERAGYTFQMKRHPEVYLNLDDKQMGAGGIDSWSPNAYPMTPYRISANEEHKFSYTLRPIAPAPKQ

SEQ ID NO: 35807 - DNA, 3681 bp, Kineococcus radiotolerans SRS30216
  CDS (1)..(3681): transl_table=11
gtgggcggtgttcaactccttccgcgactacgggtacacccaggccaacgggtacgcgtccttcgggggcttcaccctggacaactacgcgaacgcctggcggcaggggaacttcggccggcacttcttcaactcggtcatcatcacggtgccctccgtggtgctggcgctgctcctggcgtcgatggtcgccttcgtggtggcccggttcaacttcaagttcaacctcgccctgctcgggctcttcacagccgcgaacctgctgccgccgcaggccctgctgatcccgctcttccgcctcttcaaggcgatcgaggtcccgttctggttcagctactcggggaccctgctcgacagctactgggcgttgatcatcgtcaacacggccttccagaccgggttctgcgccttcgtgctcagcaactacatgaagacgctgccctacgagctctacgaagcggcccaggtcgacggcctgagcgtcttcaagcagtactggaagatcaccctgccgctgtgccggcccgccctggccgctctcgcggtgctcgagatcacctggatctacaacgagttcttctgggccacggtcctgctgcagtcgggggacaagttccccatcaccagctcgctgaacaacctcaagggtcagttcttcaccgactacaacctgctgtcggccggttcggtcctcgtggccctgccggtgctcgtcgtgttcttcgcgctgcagaagcagttcgtctccggtctgacgctgggagccaccaagggatgaaccactggttcgaggacttcacgcccgggcgcggtgccctgcccgcccgggcgtgggtgcgttccgacgcgcccgcgctgtcgctgaacggcggctggcgcttccgctacgccgagcgggccgacgcaccggccgacctcgccgacccggcgctggacgacgggggctggggcgagatcaccgtcccggggcactggcagctgcagggctggggcgtcccggcctacacgaacatcgtctaccccttccccgtcgagccgcccttcgtgcccgacgagaaccccaccggcgaccaccgccgcgcgttcgcgctgcccgcggggttcggggcggagggggcccgcgccgtgctgcgcttcgagggggtcgactccgcgttcaccgcctgggtcgacggcaccgaggtcggccgctcggtgggcagccgcctgcccgtcgagttcgacgtcaccgccgccctggaccccgcccgcgacgagcacctgctggccgtccgggtgcaccagtggtccgcggccagctacctggaggaccaggacatgtggtggctgtccgggatcttccgcgacgtcaccctcctcgcccgccccgccgacgccgtcgaggacgtcttcgtccacgccggctacgaccaccgcaccgggggcgggaccctgcgggtggacacccccggccccgcccggctgcgcgtccccgagctcggggtggacgcggcgacgaacgaggacgtccccctccccgcggtcgagccctggtcggcggaggtgccgcgcctctacgacgccgaggtgtccacggcgggggagcgggtccggctgcggatcgggttccgcaccgtggccgtcgtcgacggcgtgttcaccgtcaacggcgccccggtgaagctgcgcggggtcaaccgccacgaggtgtccgccgaccgcggccgcgccgtcaccgaggccgagatgctggccgacgtgctgctgatgaagcggcacaacgtcaacgccgtccgcaccagccactaccccccgcacccgcgcttcctggagctgtgcgacgagcacggcctgtgggtcgtcgacgagtgcgacctggagacccacggcttctggctgctggactggcggaacaacccctccgacgacccgcgctggcgcgaggcctacctggaccggatccggcgcaccgtcgagcgggacaagaaccaccccagcgtcgtgctctggtcgctgggcaacgagagcggcaccggccagaacctcgcggcgatgtcggcgtgggtcgcggaccgcgacccctcgcgcctggtccactacgagcacgactgggccgtcccgtacgccgacgtctactcccgcatgtacgccacccacgccgaggtcgcggccatcgccacccggaccgaggaggccctgcccgacgcggcggccgacgcgcggcggcgggccatgccgttcgtgcagtgcgagtacgcgcacgccatgggcaacggtcccggcgggctcgcggagtaccaggacctcttcgagagctccgaccgctgcatgggcggcttcgtctgggagtggatcgaccacggcctgcgccagcggggaccggacgggcgcgagcggttcgcctacggcggcgacttccgcgagcccctgcacgacggggccttcgtcgccgacggcctggtgttccccgaccggaccccctccccgggcctgctcgactacgcggccgtcatcacccaggtcaggctgcgccccgaggaaaccccggcgggtggccggctgcggctgaccaaccaccacgacgtcgtcgacctcgaccacgtgcggctgcgctggagcgtggaggacgacgggctcgaggtcgccgccggcgagctcgcgacgcccgagctcgccccccgcgcctcgacgctgctcgagctgcccgaggaggtcccggccctgcccgccgccacggcggaacgctggttcaccgtgaccgcggtgctggcccgcgccaccagctgggccgacgccggtcacgtcctggggcgcgggcaggtgcagctggccgacgcgcccgccccggcgcgcagccccggccgcggaccggcgcgccggggcccggacctgctggtgggtcccgcggtcctcgacgcccgcaccggggcgctgcaccggctgggggcgttcccggcgcggtccctggagctggccctgtggcgggcccccaccgacaacgaccgcggcgagcacggggaaccgctggaaccggcgtggcgcgcgctgggcctgcaccgcctgcggcaccggacggggtcggtggaggtctccggctccgacgtcgtcgtggccggccgctccgccccggcggggacggacacgggtttcgccaccacctggcgctggagcgccgtcggcgacggcgcggtccggctggaggtcgacgtgctcccgcaggcgccggggggcctgtccgtcccgctcccgcgcgtcgggctccgcctggagctgccccgggcgctgcgcaccctcacctggttcgggcgcggcccgggcgaggcgtaccccgacaccggggcggcgacgtggaccagccggttctcgcggtcggtggaggacctgcagaccccctacgtccgaccccaggagaacggccagcgcgccgacgtccggtgggccgagctcaccgcggacgacggctccgggctgcggctggaggccgaccccgcgatcggggtcaccgtgcggccgtggagcaccgaggcgctcgacgcctcgacccacacctcggcgctgcgcgacgagggccgggtgtggctgcacctggacgccgcccagcaggggatcgggacggcgtcgtgcgggccgggcgcgttgccggcctaccggctgcaggcgcagccggtgcgcttcgccgtcacgttcgccgcgctggcctga

SEQ ID NO: 35808 - protein, 1226 aa, Kineococcus radiotolerans SRS30216
MGGVQLLPRLRVHPGQRVRVLRGLHPGQLRERLAAGELRPALLQLGHHHGALRGAGAAPGVDGRLRGGPVQLQVQPRPARALHSREPAAAAGPADPALPPLQGDRGPVLVQLLGDPARQLLGVDHRQHGLPDRVLRLRAQQLHEDAALRALRSGPGRRPERLQAVLEDHPAAVPARPGRSRGARDHLDLQRVLLGHGPAAVGGQVPHHQLAEQPQGSVLHRLQPAVGRFGPRGPAGARRVLRAAEAVRLRSDAGSHQGMNHWFEDFTPGRGALPARAWVRSDAPALSLNGGWRFRYAERADAPADLADPALDDGGWGEITVPGHWQLQGWGVPAYTNIVYPFPVEPPFVPDENPTGDHRRAFALPAGFGAEGARAVLRFEGVDSAFTAWVDGTEVGRSVGSRLPVEFDVTAALDPARDEHLLAVRVHQWSAASYLEDQDMWWLSGIFRDVTLLARPADAVEDVFVHAGYDHRTGGGTLRVDTPGPARLRVPELGVDAATNEDVPLPAVEPWSAEVPRLYDAEVSTAGERVRLRIGFRTVAVVDGVFTVNGAPVKLRGVNRHEVSADRGRAVTEAEMLADVLLMKRHNVNAVRTSHYPPHPRFLELCDEHGLWVVDECDLETHGFWLLDWRNNPSDDPRWREAYLDRIRRTVERDKNHPSVVLWSLGNESGTGQNLAAMSAWVADRDPSRLVHYEHDWAVPYADVYSRMYATHAEVAAIATRTEEALPDAAADARRRAMPFVQCEYAHAMGNGPGGLAEYQDLFESSDRCMGGFVWEWIDHGLRQRGPDGRERFAYGGDFREPLHDGAFVADGLVFPDRTPSPGLLDYAAVITQVRLRPEETPAGGRLRLTNHHDVVDLDHVRLRWSVEDDGLEVAAGELATPELAPRASTLLELPEEVPALPAATAERWFTVTAVLARATSWADAGHVLGRGQVQLADAPAPARSPGRGPARRGPDLLVGPAVLDARTGALHRLGAFPARSLELALWRAPTDNDRGEHGEPLEPAWRALGLHRLRHRTGSVEVSGSDVVVAGRSAPAGTDTGFATTWRWSAVGDGAVRLEVDVLPQAPGGLSVPLPRVGLRLELPRALRTLTWFGRGPGEAYPDTGAATWTSRFSRSVEDLQTPYVRPQENGQRADVRWAELTADDGSGLRLEADPAIGVTVRPWSTEALDASTHTSALRDEGRVWLHLDAAQQGIGTASCGPGALPAYRLQAQPVRFAVTFAALA

SEQ ID NO: 35809 - DNA, 3093 bp, Photobacterium sp. SKA34
  CDS (1)..(3093): transl_table=11
atgactacattttttgatactctacaaaaacgagactgggaaaaccctcaatcagtgaacattcactgcctaaaagctcatagcccacttgcaagcttccgcagtgttgaacatgctcgtgacgatgttttccaacaacgtctttctcttaatggacaatggaaattcaaactttttgatgctccagagcaagttgatgacgaatttatccaaactacatttaacgatacggattggaatgagatcaatgtaccgtcaaactggcaacttcaaggttatgacaagcctatctacaccaatgttaagtacccttttgaagctaaaccgccgttcgttccgaaagagaacccaactggttgctaccgcacagccttatggctttctgatacagaattagagaatacccagcgtattatttttgatggcgtgaattctgccttccacttctggtgtaatggtaaatgggttggctacagccaagatagtcgccttcctgctgagtttgacctcactccctatcttgtagaaggagaaaatacacttgccgtaatggtgatgcgttggtctgatggtagctatctagaagatcaggatatgtggtggttaagtggtattttccgcgatgtcacactgctttctaagccgaaaaactgtattgaagatgtgtttatcactccggatttagatgcctgttaccgcgatggctcactctcaattactacccgtatttccgcacctgaaacttataaagttcaagtacaacttttcgataatggagaagctgtaacagagccgcaagtagatggtcctaataatcgccgtatcgacgagcgtggctgttgggacgatgtcgtatttcaaaccattcatgtacgcgatccaaaaaaatggaccgctgaaacgccaaatctctatcgattagtcgtttctttatttgatgaaaatggagcacatttagagagtgaagcataccaagtcggttttagaaaagtagaaatctctaacggtcaattgaaactaaatggaaaaccattattaatacgcggcgtaaaccgtcatgagcatcatcctgagctgggtcatgtcatgactgaagaagatatgatccgtgatatctgcttaatgaaacaatacaactttaatgccgtgcgcactgctcactatcctaatcacccaagatggtacgagctttgtgatcaatatggcttatatgtctgcgatgaagcaaatatcgagactcatggtttacatcctatgagtcgtatttcagatgatccccagtggtcaaatgcttacatgagcagatatagccaaatggtcatgcgtgataagaatcacccatcgattattatctggtctttaggaaatgagtcaggttacggctgtaaccataacgctatgtatgcgtggtcaaaaaaatatgacccatctcgtcccgttcaatatgaaggaggcggttcaaatactcctgcgaccgatatcattgcacctatgtatgcacgtgttgatagcgatatcgaagatgaagttgtacccaagtgggcaatcaaaaagtggatatcactaccgaacgagtcacgtccattaattttatgtgaatatgctcatgcaatgggcaacagcctgggtagctttgcagattactgggaagcatttcgcactttcccacgcttacaaggtggctttatttgggactgggttgaccaaggattaagccaacaagatgaaaatggtcaacacttttgggcttacggtggtgactttggtgatgagatcaatgaccgtcagttctgtatcaatggtttgattttcccagatcgtaccgtgcacccaacgttggaagaagcgaagttctgtcaacgtatgatcaccgtatcgcttcaggatcaaacagagggcaactgcacacttctaataaccaacgagaacttgttccgtgcaacagataacgaacaattgaactggtcactattagaaaatggtaaggttatccaaactggttcgcaaacacttaatatagaggctaatagccaagcaagccttgatataaccctaaactataccccaaaagcagaggcacaatatcacttaaataccgatattagtcttattacagcaacaccatgggcccatgccgattacgttgtttcatctgaacaaatggcactaagtaataccacaggtcttattatccctacattgaaaagccaaccagcaccaatgttaacgcagcaagacaactcgattctggtttctagtctcgatgaaaaacatcattggtgttgggataagcaaagcggcttgatgacagcgtggctaataaacaataatccgcaattactttcagcaccacaagacaattttttccgagcgccgctggataacgacattggtattagtgaagtcgataatgtggatttcaacgcatggagcagtcgttgggatgcagcaggcattggtcaatgggaacgacaatgtattgcttgtaatagtgaaacgctggcacacgcagttaaagtgacttccacctttacataccactttaactcaacagtacaagcgataacgacttggacatacacattgagtaacaatggagaaatggagctagttgtagatgtaaagctggctgatagcttaccatcaatgccacgtatcggtttagagtttgctctgcccttaaacggacaaaacacaccaattacctggcagggtttaggcccattcgaaaattatcctgatcgttttgctgctgcacgttttggtctctatacacaaacacttgagcaaatgcacacgccatatattttcccaaccgatagcggcctacgttgtggcacacaatggttgaaagtgaacgaattggatatatccggtgatttccaatttagcgttagtcagttcgctttgcagcaattggcaaaagcaaaacacaccaacgatttaatcgcggaagaaaaagtatatgtacgtgtagaccaccagcatatggggatcggtggcgatgactcatggagtcaaagtgtccataaagagtttcaattacgggaaaaacattacacatataccatcacgttcaatcaaaaagcataa

SEQ ID NO: 35810 - protein, 1030 aa, Photobacterium sp. SKA34
MTTFFDTLQKRDWENPQSVNIHCLKAHSPLASFRSVEHARDDVFQQRLSLNGQWKFKLFDAPEQVDDEFIQTTFNDTDWNEINVPSNWQLQGYDKPIYTNVKYPFEAKPPFVPKENPTGCYRTALWLSDTELENTQRIIFDGVNSAFHFWCNGKWVGYSQDSRLPAEFDLTPYLVEGENTLAVMVMRWSDGSYLEDQDMWWLSGIFRDVTLLSKPKNCIEDVFITPDLDACYRDGSLSITTRISAPETYKVQVQLFDNGEAVTEPQVDGPNNRRIDERGCWDDVVFQTIHVRDPKKWTAETPNLYRLVVSLFDENGAHLESEAYQVGFRKVEISNGQLKLNGKPLLIRGVNRHEHHPELGHVMTEEDMIRDICLMKQYNFNAVRTAHYPNHPRWYELCDQYGLYVCDEANIETHGLHPMSRISDDPQWSNAYMSRYSQMVMRDKNHPSIIIWSLGNESGYGCNHNAMYAWSKKYDPSRPVQYEGGGSNTPATDIIAPMYARVDSDIEDEVVPKWAIKKWISLPNESRPLILCEYAHAMGNSLGSFADYWEAFRTFPRLQGGFIWDWVDQGLSQQDENGQHFWAYGGDFGDEINDRQFCINGLIFPDRTVHPTLEEAKFCQRMITVSLQDQTEGNCTLLITNENLFRATDNEQLNWSLLENGKVIQTGSQTLNIEANSQASLDITLNYTPKAEAQYHLNTDISLITATPWAHADYVVSSEQMALSNTTGLIIPTLKSQPAPMLTQQDNSILVSSLDEKHHWCWDKQSGLMTAWLINNNPQLLSAPQDNFFRAPLDNDIGISEVDNVDFNAWSSRWDAAGIGQWERQCIACNSETLAHAVKVTSTFTYHFNSTVQAITTWTYTLSNNGEMELVVDVKLADSLPSMPRIGLEFALPLNGQNTPITWQGLGPFENYPDRFAAARFGLYTQTLEQMHTPYIFPTDSGLRCGTQWLKVNELDISGDFQFSVSQFALQQLAKAKHTNDLIAEEKVYVRVDHQHMGIGGDDSWSQSVHKEFQLREKHYTYTITFNQKA

SEQ ID NO: 35811 - DNA, 3102 bp, Alteromonadales bacterium TW-7
  CDS (1)..(3102): transl_table=11
atgaactcactacagcacataattaaccgtcgcgattgggaaaaccctatttcggtgcaagttaatcaagtaaaagcacacagcccacttaatggttttaaaagcgttgaccatgcccgtacaaacacgcaatcacaaaaacaaagtttaaacggccagtgggattttaaattatttgataaacccgaagcggttgatgagtcattactaagtgaggcactcgccagcgactggcaaagtattcctgtgccttctaactggcaattacacggctttgataaacctatttactgcaacgttaaatacccatttgccgtaaacccgccatttgtaccaagcgataacccaacaggttgctaccgcacagagtttactattacggcggagcaattagctcagcgtaaccatattatttttgaaggcgttaactcggcgtttcacctttggtgtaacggacaatgggtgggctactcgcaggatagccgcttacccagcgaatttgatttaagcaagctgttagtggctggcaccaaccgcattgcggttatggttattcgctggagcgatggcagttacttagaagatcaagacatgtggtggttaagcggcatatttcgcgatgttaatttacttaccaaaccacaaaaccaaatacgcgatgtatttataaccccagatttagacgcctgctaccgcgatgccactttgcatataaaaaccgcaatagatgcgccaaataactaccaagtagccgtacaggtttttgatggcgaacaggcactgtgtgagccacacatacaaagcactaacaataaacgcgttgatgaaaaaggcggctggagcgatgtcgtatttcaaacaattgatatacaaagccctaaaaaatggaccgccgaaaccccaaccttataccgctgtgttgtaaccctgttagatgagcaaggcattacagtagacgtagaagcctacaacattggctttagaaaagtagaaatgctcaacgggcagctttgcttaaacggcaagccgctgcttattcgcggtgttaatcgccacgaacaccacccagaaaatggccacacggtgagcactgccgacatgattgaagatattaagctgatgaagcaaaataactttaatgcagtacgtaccgctcactaccctaaccaccctcgtttttacgagctgtgtgacgagttaggtttatacgtagtagacgaagccaatatagaaactcacggcatgttcccaatgggtaggcttgcaagcgatccgcagtgggctggcgcatttatgtcgcgctatacgcaaatggttgagcgcgataaaaaccacgcatctattattatttggtcattgggtaatgaatgcgggcacggtgcaaaccacgatgctatgtacggctggtctaaaagttttgacccatcgcgcccagtgcaatatgaaggtggcggcgcaaatactaccgctaccgacattatttgcccaatgtacgcccgtgtagatacgcatattgccgatgacgccgtaccaaaatactctattaaaaagtggctaagtctaccgggcgaaacgcgtccactcattttatgcgagtacgcccatgcaatgggtaacagcctaggtagctttgacgattactggcaagcatttagagaatacccgcgtttgcaaggcggctttatttgggattgggtagaccaaggtttatctaaaacagataaaaacggcaagcattactgggcttacggtggcgactttggtgatgagctaaacgaccgccaattttgtgttaacggcttattattcccagaccgtacgccgcacccaagcctgtttgaagctaaatacagccagcagcatttacaatttacgctgcgtgagcaaactcaaaaccaatacaccgttgatgtatttagtgattatgtatttaggcacaccgataacgaaaaactggtttggcagttaatagaaaatggccaatgtgtagagcaaggcaagcaagttattaatattgctccgcaaagcacgcaaacgctaactattaatacaaaaacggtgtttaaagcaggtgcgcaatatcacgttaatttagatgtagcactaattaacgactcaagctttgcatgtgccgagcatgtattaaacaccgagcaatttaagcttataaattgccaaagtttaagcgctgatgcattttcacctgctttagcaaacgcctcaacacagggcgcactaaatattagtgaaaccgacacacagcttagtattgaaggcggcacctttaaacttgtgtttaatagccaatcaggccttattgagcaatggctacacaatcaaacccaagttattaaaagcccattagttgataatttttaccgcgccccgcttgataacgacataggcgtaagcgaagtagacaacctagaccctaatgcatgggaagcgcgctggctaagagcgggtattgggcagtggcagcgtacatgtcgctcgtttgaagtagtgcaatcaaaagtagatatacgtattaaatgtgtatttagttatgaatttaatggcgcagtacaagcaaaaacaacttggctttatacacttaataatacaggtgaaattagcttaaatgttgatgtacaactcaacgatactttgccccccatgccacgcataggattaagtacaacgcttaataaacaaagcgatacacaagtaaactggcttggtttaggcccatttgaaaactacccagaccgcaaagcggcttcgcgtttaggttattacagcgcgcaacataatgagctgcatacaccgtatatatttccaaccgataacggcgtgcgtagtgattgccaattacttagcgttaataatttaaccgtaacaggtgcgtttttatttgcagccagtgagtactcacaaagcatgcttacacaagcaaagcacaccaatgagctagtagctgatgattgcttacatgtacatattgaccatcaacatatgggggttggtggcgatgactcgtggagcccaagtacacataaagaatatttactagagcaaaaaaagtacagttattcacttaccttttctgctaaagactaa

SEQ ID NO: 35812 - protein, 1033 aa, Alteromonadales bacterium TW-7
MNSLQHIINRRDWENPISVQVNQVKAHSPLNGFKSVDHARTNTQSQKQSLNGQWDFKLFDKPEAVDESLLSEALASDWQSIPVPSNWQLHGFDKPIYCNVKYPFAVNPPFVPSDNPTGCYRTEFTITAEQLAQRNHIIFEGVNSAFHLWCNGQWVGYSQDSRLPSEFDLSKLLVAGTNRIAVMVIRWSDGSYLEDQDMWWLSGIFRDVNLLTKPQNQIRDVFITPDLDACYRDATLHIKTAIDAPNNYQVAVQVFDGEQALCEPHIQSTNNKRVDEKGGWSDVVFQTIDIQSPKKWTAETPTLYRCVVTLLDEQGITVDVEAYNIGFRKVEMLNGQLCLNGKPLLIRGVNRHEHHPENGHTVSTADMIEDIKLMKQNNFNAVRTAHYPNHPRFYELCDELGLYVVDEANIETHGMFPMGRLASDPQWAGAFMSRYTQMVERDKNHASIIIWSLGNECGHGANHDAMYGWSKSFDPSRPVQYEGGGANTTATDIICPMYARVDTHIADDAVPKYSIKKWLSLPGETRPLILCEYAHAMGNSLGSFDDYWQAFREYPRLQGGFIWDWVDQGLSKTDKNGKHYWAYGGDFGDELNDRQFCVNGLLFPDRTPHPSLFEAKYSQQHLQFTLREQTQNQYTVDVFSDYVFRHTDNEKLVWQLIENGQCVEQGKQVINIAPQSTQTLTINTKTVFKAGAQYHVNLDVALINDSSFACAEHVLNTEQFKLINCQSLSADAFSPALANASTQGALNISETDTQLSIEGGTFKLVFNSQSGLIEQWLHNQTQVIKSPLVDNFYRAPLDNDIGVSEVDNLDPNAWEARWLRAGIGQWQRTCRSFEVVQSKVDIRIKCVFSYEFNGAVQAKTTWLYTLNNTGEISLNVDVQLNDTLPPMPRIGLSTTLNKQSDTQVNWLGLGPFENYPDRKAASRLGYYSAQHNELHTPYIFPTDNGVRSDCQLLSVNNLTVTGAFLFAASEYSQSMLTQAKHTNELVADDCLHVHIDHQHMGVGGDDSWSPSTHKEYLLEQKKYSYSLTFSAKD

SEQ ID NO: 35813 - DNA, 3021 bp, marine gamma proteobacterium HTCC2143
  CDS (1)..(3021): transl_table=11
atgaggcgcgactgggagacaccggaaagtacgtcatttaaccgactaccttcacacacccccttggccagctggcaaacagaaaccggtgcgttgaacgacgaaccaagttcgtcgatgataagccttgatggtgattggcagtttaccctctatgctaatccagaagccgtcccagcggattggccgcaggtcgataacctagctcaagatactattccagtgccttctaactggcagctgcaaggatatgatcggcccgtttacaccaatgtaaaatatccatttgccagcaatcctccccgcgttccgctagacaaccccacggcttgttaccaacggttttttgaaatgccatcagcatggggcgacggtcaaactcgggtccgcttcgacggtgtcaacagtgcattttatctttggtgcaataataactgggtcggttattcgcaagacagtcggctagcggctgagtttgatctgagtgaatttttgaaaccaggcataaacagtatcgccgtgatggtcattcgctggtcagatggcagctatttagaagaccaagatatgtggtggctcagcggtatttatcggtcggtatcactgcttaacaaacctatttgtcatatcagcgatgtacgaataacgcctgatttagacagtgattatctgcatggaagcctaaaagttgttgtgcaaggtgttcacatagaaaaccttggggttcgcgcgaatttgtatttagatggcactctcgtcgctagccaatcacagggtatgggcatgccgcctgtcgatgaacgtggtggttatcgcgaccgatgtcaaatgaccctgcatgttgaacagcctaaaaagtggagtgccgaaacccccagtttgtatcggttgaccgtttcactgatcgatatggttaccgacactatttatgagatcgaaggatacgatgttggttttagaaaagttgagctattaaacggccagctgtgtttgaacggtcagccgctgttaattagaggggtgaacaagcatgaacacgatccacaaaccggtcatgcggaatctttggcgggggtagaacacgatctgcgcctgatgaagcaaaacaattttaatgcggtgcggtgttcccactatcctcaccaacccggtttttacaagctctgtgaccgtctgggtctatatgtagtggatgaggctaatattgaaacgcatgggatgcaacccatgcgataccttgcagatgacccagcgtggagtcatgcgtttctggagcgaataacccgtatggtcgccagggattttaatcacagctgcattattatttggtctttgggcaatgagtccggctatggcgcagctcatgatgctatgtaccaatggaccaagcgttacgatccgagtcgacctgtgcaatatgaaggtggtggctcagataccgcagcaaccgatattatttgccctatgtacccgcgaacccatcaagaccttgatcagatcttcggcgaccgtccgaagtggtcgctggtaaattgggtagagcgaactgacgaaacgcgacccattatttgttgtgaatatgctcatgctatgggtaacagtctgggtaattttaatgattattggactgtttttcgtgactatcctcggctgcagggtggctttatatgggactgggtggatcagggtctggagcaaaaaacggacagtggcgaaaagtattgggcttatggcggcgattttggcgatacaattaatgaccgtcagttttgtattaatggtctgatgtttcccgatcgcacggcgcatcccagtttgtatgaagcaaagcgctcgcaacagccttttaggttttcgttcgatgcgtcggcatcgttaacgttgaaggtttgtagcgagtttctttttcgatcgacagataatgaggtgattcactggtcaattctttgtggagacaagcaacttatatctggtagctgtgacttagtgttagatgccggttgtagtgctgagatagtgttgtgtgaagatgccaatagcgtcgagatgtcgggggacacctggctgaacgtttggatcactatgccgcgtgcaacttcatggtcagagactgagcatgaagttgcacgcacgcaattcagtctatctgttaacacgcttgaactccctgtatgtgtgcccattgccattatagatcctatgacaatatctgcgggtattagcgagtgggtgttcgatccccaaagcgggttcataacaagttggcaaaaaaatggggtcgagatgctgcgtttgccgctgacggataatttttttcgcgcgccgcttgataacgatatcggtgtatcagaggcaaatcatcccgaccccaactcttgggtggagcgctggcaggcagcgggtctgaatgacttggaacaccgttgcaatgctagagagatggatagcgagcgtggcatggtggttgtttatcacagctattatgtggatgatcaagaagttattagcagccgctggagccatcgtttcgatgcggcgggtcgaatgactgttaaaattgatgtcacccttaaagctgagttaccgccgctaccgcggattggcgcgacatgttgtctggccacggcgatcgaggaggtcagttggctaggccgaggccctcatgaaaactatccagaccgtaaacacagcgccgacttcggtctctggaccgaggccgttgacaatatgcatacaccgtacgtttttccttcagacaatggcttgcgatgcgataccagcgagttgactttgggcaatataaacgtgaagggtgcttttcattttagtgtcagccgatatggccagcagcaacttgccgccgccaagcacaatcatgagctgatagcggagccagggctctatgtctaccttgacgcgctgcatatgggggttggcggggatgactcctggagtcccagcgtgaaaccggcctatttattgtcggattcgcaatattgctgggaatttattctcgggtaa

SEQ ID NO: 35814 - protein, 1006 aa, marine gamma proteobacterium HTCC2143
MRRDWETPESTSFNRLPSHTPLASWQTETGALNDEPSSSMISLDGDWQFTLYANPEAVPADWPQVDNLAQDTIPVPSNWQLQGYDRPVYTNVKYPFASNPPRVPLDNPTACYQRFFEMPSAWGDGQTRVRFDGVNSAFYLWCNNNWVGYSQDSRLAAEFDLSEFLKPGINSIAVMVIRWSDGSYLEDQDMWWLSGIYRSVSLLNKPICHISDVRITPDLDSDYLHGSLKVVVQGVHIENLGVRANLYLDGTLVASQSQGMGMPPVDERGGYRDRCQMTLHVEQPKKWSAETPSLYRLTVSLIDMVTDTIYEIEGYDVGFRKVELLNGQLCLNGQPLLIRGVNKHEHDPQTGHAESLAGVEHDLRLMKQNNFNAVRCSHYPHQPGFYKLCDRLGLYVVDEANIETHGMQPMRYLADDPAWSHAFLERITRMVARDFNHSCIIIWSLGNESGYGAAHDAMYQWTKRYDPSRPVQYEGGGSDTAATDIICPMYPRTHQDLDQIFGDRPKWSLVNWVERTDETRPIICCEYAHAMGNSLGNFNDYWTVFRDYPRLQGGFIWDWVDQGLEQKTDSGEKYWAYGGDFGDTINDRQFCINGLMFPDRTAHPSLYEAKRSQQPFRFSFDASASLTLKVCSEFLFRSTDNEVIHWSILCGDKQLISGSCDLVLDAGCSAEIVLCEDANSVEMSGDTWLNVWITMPRATSWSETEHEVARTQFSLSVNTLELPVCVPIAIIDPMTISAGISEWVFDPQSGFITSWQKNGVEMLRLPLTDNFFRAPLDNDIGVSEANHPDPNSWVERWQAAGLNDLEHRCNAREMDSERGMVVVYHSYYVDDQEVISSRWSHRFDAAGRMTVKIDVTLKAELPPLPRIGATCCLATAIEEVSWLGRGPHENYPDRKHSADFGLWTEAVDNMHTPYVFPSDNGLRCDTSELTLGNINVKGAFHFSVSRYGQQQLAAAKHNHELIAEPGLYVYLDALHMGVGGDDSWSPSVKPAYLLSDSQYCWEFILG

SEQ ID NO: 35815 - DNA, 3093 bp, Escherichia coli B
  CDS (1)..(3093): transl_table=11
atgaatcgctgggaaaacattcagctcacccacgaaaaccgacttgcgccgcgtgcgtactttttttcatatgattctgttgcgcaagcgcgtacctttgcccgcgaaaccagcagcctgtttctgcccttaagcggtcagtggaatttccatttttttgaccacccgctgcaagtgcctgaagccttcacctctgagttaatggctgactgggggcatattaccgtccccgccatgtggcaaatggaaggtcacggcaaactgcaatataccgacgaaggttttccgttccccatcgatgtgccgtttgtccccagcgataacccaaccggtgcctatcaacgtattttcaccctcagcgacggctggcagggtaaacagacgctgattaaatttgacggcgtcgaaacctattttgaagtctatgttaacggtcagtatgtgggtttcagcaagggcagtcgcctgaccgcagagtttgacatcagcgcgatggttaaaaccggcgacaacctgttgtgtgtgcgcgtgatgcagtgggcggactctacctacgtggaagaccaggatatgtggtggtcagcggggatcttccgcgatgtttatctggtcggaaaacaactaacgcatattaacgatttctccgtgcgtaccgactttgacgaagcctattgcgatgccacgctttcctgcgaagtggtgctggaaaatctcgccgcctcccctgtcgtaacgacgctggaatataccctgtttgatggcgaacgcgtggtgcacagcagcgccattgatcatttggcaattgaaaaactgaccagcgccagctttgcttttactgtcgaacagccgcagcaatggtcagcagaatccccttatctttaccatctggtcatgacgctgaaagacgccgacggcaacgttctggaagtggtaccacaacgcgttggcttccgtgatatcaaagtgcgcgacggtctgttctggatcaataaccgttatgtgatgctgcacggcgtcaaccgtcacgacaacgatcatcgcaaaggccgcgccgttggaatggatcgcgtcgagaaagatctccagttgatgaagcagcacaacatcaactccgtgcgtaccgctcactacccgaacgatccgcgtttttacgaactgtgtgatatctacggcttgtttgtgatggcggaaaccgacgtcgaatcgcacggctttgctaatgtcggcgatatcagccgtattaccgacgatccgcagtgggaaaaagtctacgtcgagcgcattgttcgccatatccacgcgcagaaaaaccatccgtcgatcatcatctggtcgctgggcaatgaatccggctatggctgtaacatccgcgcgatgtaccatgcggcgaaagcgctggatgacacgcgactggtgcattacgaagaagatcgcgatgctgaagtggtcgatattatttccaccatgtacacccgcgtgccgctgatgaatgagtttggtgaatacccgcatccgaagccgcgcatcatctgtgaatatgctcatgcgatggggaacggaccgggcgggctgacggagtaccagaacgtcttctataagcacgattgtattcagggacattatgtttgggagtggtgcgaccacggaatccaggcgcaggatgacaacggcaatgtctggtataaattcggcggcgactacggcgactatcccaacaactataacttctgtcttgatggtttgatctattccgatcagacgccgggaccaggcctgaaagagtacaaacaggttatcgcgccggtaaaaatccacgcgctggatctgactcgcggcgagctgaaagtcgaaaataaactgtggtttaccacgcttgatgactacaccctgcacgcagaggtgcgcgccgaaggtgaaacgctcgcaacgcagcagattaaactgcgcgacgttgcgccgaacagcgaagcccccttgcagatcacgctgccgcagctggacgcccgcgaagcgttcctcaacattacggtgaccaaagattcccgcacccgctacagcgaagccgggcattctatcgccacttatcagttcccgctgaaggaaaacaccgcgcagccagtgcctttcgcaccaaataatgcgcgtccgctgacgctggaagacgatcgtttgagctgcaccgttcgcggctacaacttcgcgatcaccttctcaaaaatgagtggcaaaccgacatcctggcaggtaaatggcgagtcgctgctgacccgcgagccaaagatcaacttcttcaagccgatgatcgacaaccacaagcaggagtacgaagggctgtggcaaccgaatcatttgcagatcatgcaggaacatctgcgcgactttgccgtagaacagagcgatggtgaagtgttgatcatcagccgcacggttatagcaccgccggtgtttgacttcgggatgcgctgcacctacatctggcgcatcgctgcagatggccaggttaacgtggcgctttccggcgagcgttacggcgactatccgcacatcattccgtgcatcggtttcaccatggggattaacggcgaatacgatcaggtggcgtattacggtcgtggaccgggcgaaaactacgccgacagccagcaggctaacatcatcgatatctggcgcagcaccgtcgatgccatgttcgagaactatcccttcccgcagaacaacggcaaccgtcagcatgtccgctggacggcactgactaaccgccacggcaacggtctgctggtggttccgcagcgcccaattaacttcagcgcctggcactatacccaggaaaacatccacgcttcccagcactgtaacgagctgcagcgcagtgatgacatcaccctgaatctcgaccaccagctgcttggcctcggctccaactcctggggcagcgaggtgctggactcctggcgcgtctggttccgtgacttcagctacggctttacgttgctgccggtttctggcggagaagctactgcgcaaagcctggcgtcgtatgagttcggcgcagggttcttttccacgaatttgcacagcgagaataagcaatga

SEQ ID NO: 35816 - protein, 1030 aa, Escherichia coli B
MNRWENIQLTHENRLAPRAYFFSYDSVAQARTFARETSSLFLPLSGQWNFHFFDHPLQVPEAFTSELMADWGHITVPAMWQMEGHGKLQYTDEGFPFPIDVPFVPSDNPTGAYQRIFTLSDGWQGKQTLIKFDGVETYFEVYVNGQYVGFSKGSRLTAEFDISAMVKTGDNLLCVRVMQWADSTYVEDQDMWWSAGIFRDVYLVGKQLTHINDFSVRTDFDEAYCDATLSCEVVLENLAASPVVTTLEYTLFDGERVVHSSAIDHLAIEKLTSASFAFTVEQPQQWSAESPYLYHLVMTLKDADGNVLEVVPQRVGFRDIKVRDGLFWINNRYVMLHGVNRHDNDHRKGRAVGMDRVEKDLQLMKQHNINSVRTAHYPNDPRFYELCDIYGLFVMAETDVESHGFANVGDISRITDDPQWEKVYVERIVRHIHAQKNHPSIIIWSLGNESGYGCNIRAMYHAAKALDDTRLVHYEEDRDAEVVDIISTMYTRVPLMNEFGEYPHPKPRIICEYAHAMGNGPGGLTEYQNVFYKHDCIQGHYVWEWCDHGIQAQDDNGNVWYKFGGDYGDYPNNYNFCLDGLIYSDQTPGPGLKEYKQVIAPVKIHALDLTRGELKVENKLWFTTLDDYTLHAEVRAEGETLATQQIKLRDVAPNSEAPLQITLPQLDAREAFLNITVTKDSRTRYSEAGHSIATYQFPLKENTAQPVPFAPNNARPLTLEDDRLSCTVRGYNFAITFSKMSGKPTSWQVNGESLLTREPKINFFKPMIDNHKQEYEGLWQPNHLQIMQEHLRDFAVEQSDGEVLIISRTVIAPPVFDFGMRCTYIWRIAADGQVNVALSGERYGDYPHIIPCIGFTMGINGEYDQVAYYGRGPGENYADSQQANIIDIWRSTVDAMFENYPFPQNNGNRQHVRWTALTNRHGNGLLVVPQRPINFSAWHYTQENIHASQHCNELQRSDDITLNLDHQLLGLGSNSWGSEVLDSWRVWFRDFSYGFTLLPVSGGEATAQSLASYEFGAGFFSTNLHSENKQ

SEQ ID NO: 35817 - DNA, 3090 bp, Enterobacter agglomerans
  CDS (1)..(3090): transl_table=11
atgatgtttacggcgagcccgatgtcacttagcaaaatcttagcccgccgagactgggaaaacccaggcgtgacccaatggcatcgcttgcctgcccatgccccgttcaatagctggcgcgatgaagcatccgcgcgggccgatgataacgcttcccgtaagcgctcgctgaacggtgactggcagtttagctattacgcggcaccagagcaggtgccagacagctgggttacagaagattgcgctgacgcggtgacgacgccggttccatcaaactggcagatgcagggctttgatacgcccatttacactaacgatacctatccgattccggtgaatccaccgtttgtgccagcagagaacccaaccggttgttactcgctcacatttgaagtggatgagcagtggctcgaaagcgggcaaacgcgcattgtttttgatggcgtgaactcagcgttttatctctggtgcaacggcaagtggatgggctattcgcaggacagccgcctgcccgcagagtttgatttaagcgcggttttgcgcccgggaaccaaccgtctggcggtactggtgctgcgctggtgcgacgggagttatcttgaagatcaggacatgtggcggatgagcggcattttccgcgacgtgtcactgctgcacaaaccgcacacccatatcgcggattatcatgccgtgacggagctgaatgccgattacgaccgcgcaaaattacaggttgaagtggcgctcgccggtgagcagtttgccgattgcgaagtggcggtgaccctgtggcgtgacgggctctcagtcgcgacggtcagcgccaaacccggttcagccattattgatgagcgtggcaattgggcggagcgtttaaacgtcacgttgccggtgaaagatccggcactgtggagcgccgaaaccccggaactgtatcgcttaacctttgcactgcgtgacggacaaggtgagattctcgacgtggaggcttgcgacgtcggtttccgttgcgtggaaatcagcaacggcttgttaaaagtgaacggaaaaccgctgctgatccgtggcgtcaaccgccatgagcaccatccggaaaacgggcaggtgatggacgaagccaccatgtgccgtgacattgagctgatgaaacagcacaactttaatgccgtgcgctgctcgcattacccgaaccatccgctgtggtacacgctgtgcgatcggtatggattgtacgtggtggacgaagcgaatattgaaacgcacgggatggtgccgatgagccgtctggccgacgatccgcgctggctgcccgcgatgagcgaacgcgtgacgcgcatggtgctgcgcgatcgtaaccatccgtcgattatcatctggtcactgggcaatgaatccgggcacggtgctaaccacgacgcgctgtatcgctgggtgaaaaccaccgatcccacgcgtcctgtgcagtatgaaggcggcggcgcgaacaccgctgcgaccgatattgtctgcccgatgtacgcccgtgtcgatcaggatcaaccgtttgaagccgtaccgaaatggtcactgaaaaagtggatcggcatgccggatgagacgcgcccgctgatcctgtgcgaatacgcccatgccatgggaaacagttttggtggatttgcaaaatactggcaggcgtttcgcaatcaccctcgcttgcagggcggattcgtctgggactgggtggatcaggcgctgaccaaaaaagacgacaacggcaacgctttctgggcgtatggcggtgattttggtgatacaccgaatgatcgtcagttctgtctgaacgggctagtgttcccggatcgcacaccgcatccggcgctgtttgaagcgcagcgcgcgcagcagtttttcacctttacactggtcagcacctcacctctggtgatcgacgtgcacagcgattatctgttccgccagtgtgataacgagcagttgcgctggaatattgcccgcgacggcgaagtgctggcgagcggggaagtggcgctgacgattgccccgcagcaaacgcagcggattgaaatcgacgcgccggaatttgccgcggcggcaggcgaaatctggctgaatgtggatattgtccaaacggcggcgaccgcctggtctccagcagatcatcgctgcgcctgggatcaatggcaactgcccgcgccgctctatattgcgccacccgttgagggaacggctaagccagacctgaaggtaaaagaggatgtgcttgaggtcagccaccagtcgcagcgctggcactttgaccgcgccagcggaaatctgacccaatggtggaataacggcaccgcaacgctcctcgccccactgagtgataatttcacccgtgcgccgctcgataatgatattggcgtcagcgaagccacgcgtattgatccgaatgcgtgggttgagcgctggaaagcggcgggtatgtacaacctcacgccgcgtctgttgctctgcgaaggagaacaactcgcgcaggctgtgacaattaccacgctgcatgcctgggaatccaacggtaaagcgctgttcctgagccgtaaagtctggaagattgaccgcgctggcgtgctgcatggtgacgtgcaggtgcaagtggcaaatgatattccgcagcccgcgcgtattggcctgagttgtcagctggcacaaacgccgcaaacggcaagttggctgggcctggggccggacgagaactacccggacagaaagctggctgcccgccagggacgctggacgttgccgctcgacgcgctgcatacggcgtatattttcccgaccgataatggcctgcgctgcgatacgcgcgaactgactttcgatactcatcagatgcagggtgatttccacttttcattaagccggtacagccagcaacagctgcgtgataccagccatcatcatttgctggaagcagagccgggctgctggctcaatattgacgccttccatatgggcgtgggcggcgatgactcctggagcccaagtgtgtcgccggaatttatcctgcaacgccgagagatgcgttacgcgtttagctggcgacaggactaa

SEQ ID NO: 35818 - protein, 1029 aa, Enterobacter agglomerans
MMFTASPMSLSKILARRDWENPGVTQWHRLPAHAPFNSWRDEASARADDNASRKRSLNGDWQFSYYAAPEQVPDSWVTEDCADAVTTPVPSNWQMQGFDTPIYTNDTYPIPVNPPFVPAENPTGCYSLTFEVDEQWLESGQTRIVFDGVNSAFYLWCNGKWMGYSQDSRLPAEFDLSAVLRPGTNRLAVLVLRWCDGSYLEDQDMWRMSGIFRDVSLLHKPHTHIADYHAVTELNADYDRAKLQVEVALAGEQFADCEVAVTLWRDGLSVATVSAKPGSAIIDERGNWAERLNVTLPVKDPALWSAETPELYRLTFALRDGQGEILDVEACDVGFRCVEISNGLLKVNGKPLLIRGVNRHEHHPENGQVMDEATMCRDIELMKQHNFNAVRCSHYPNHPLWYTLCDRYGLYVVDEANIETHGMVPMSRLADDPRWLPAMSERVTRMVLRDRNHPSIIIWSLGNESGHGANHDALYRWVKTTDPTRPVQYEGGGANTAATDIVCPMYARVDQDQPFEAVPKWSLKKWIGMPDETRPLILCEYAHAMGNSFGGFAKYWQAFRNHPRLQGGFVWDWVDQALTKKDDNGNAFWAYGGDFGDTPNDRQFCLNGLVFPDRTPHPALFEAQRAQQFFTFTLVSTSPLVIDVHSDYLFRQCDNEQLRWNIARDGEVLASGEVALTIAPQQTQRIEIDAPEFAAAAGEIWLNVDIVQTAATAWSPADHRCAWDQWQLPAPLYIAPPVEGTAKPDLKVKEDVLEVSHQSQRWHFDRASGNLTQWWNNGTATLLAPLSDNFTRAPLDNDIGVSEATRIDPNAWVERWKAAGMYNLTPRLLLCEGEQLAQAVTITTLHAWESNGKALFLSRKVWKIDRAGVLHGDVQVQVANDIPQPARIGLSCQLAQTPQTASWLGLGPDENYPDRKLAARQGRWTLPLDALHTAYIFPTDNGLRCDTRELTFDTHQMQGDFHFSLSRYSQQQLRDTSHHHLLEAEPGCWLNIDAFHMGVGGDDSWSPSVSPEFILQRREMRYAFSWRQD

SEQ ID NO: 35819 - DNA, 3105 bp, Bacillus megaterium
  CDS (1)..(3105): transl_table=11
atgttaaaaaccggcaagaaatttcattatacagcacctgcaaacggataccctgaatggaataacaaccctgaaatttttcaattgaaccgttcaaaagcacacgctttacttatgccttatcaaacggtcgaagaggccttaaaaaatgatagaaaatcttctgtttactatcaaagcttaaaaggcagctggtattttcattttgctgaaaatgcagatgcccgcgtcaaaaactttctcgcacctgagttttcatatgagaaatgggactctatttcagttccttcacattggcagctgcaaggatatgactatcctcaatatacaaacgtgacatacccttgggttgaaaatgaagagctcgaacctccttttgcaccgactaaatataaccctgtcggtcagtacatccgtacttttacacctaaaccagaatggaaagatcagccggtgtacgtcagcttccaaggcgtcgaatctgctttttacgtatggattaacggtgagtttgttggatacagcgaagacagctttactccagctgaatttgatataacttcttaccttcaagaagatgaaaatacgatagcagtagaagtatatcgctggagtgatgcaagctggcttgaagaccaagatttttggcgaatgagcggcatcttccgagatgtgtatctctattctactccaccagttcacatctatgactttagcgttcgttcgtcgcttgataacaactaccaagatggtgaacttatcgtttcagctgatatcttaaactactttgagcacgatactcaaggtctaacatttgaagccacgctgtatgacgcgaatggccaagaagtactacaagctccgctgcaaataaatttaagtgtgagcgatcaacgtacagtctccttgcgtacacacattaaaagccctaaaaaatggagtgcagaaagccctcatttgtatacgcttgtactcagcttaaagaattctgctggttctattattgaaacagaaagctgtaaagtcggcttccgtacatttgaactaaagaacggtcttatgacaatcaacggcaaacgtattgtacttcgaggagtgaatcgccacgaatttgattcagtaaaaggccgggcaggcatcacgcgcgaagacatgcttcacgacattttgctgatgaaacagcataatattaacgccgtgcgtacatcccattatcctaacgattcagtatggtatgaactgtgtgatgaatacggactgtacgttattgatgaaaccaatttagaaacgcacggaacgtggacttatttacaagaaggtgagcaaaaagccgttccaggaagcaagccagaatggaaagaaaacgtattggatcgctgtcgttcgatgtacgaacgtgacaaaaaccacccttctatcattatttggtcgcttggaaacgaatcatttggcggagaaaactttcaccatatgtataccttttttaaagaaaaagattccgcacgacttgttcattacgaaggaatcttccatcatcgcgactatgatgcttcagatatagaaagcacgatgtacgttaagccagcagatgtagagcgctatgcattaatgaatccgaaaaaaccttacatcttatgtgaatacagtcatgcaatgggcaattcatgcgggaatttatacaaatactgggagctgttcgatcaatatccgatcttgcaaggcggttttatatgggactggaaagatcaagctcttcaaacaacagcagaagacggtacttcttacttagcttacgggggagattttggtgatacgcctaacgatggtaacttctgcggaaacggcttaatctttgctgatgggacagctagccctaaaattgcagaagtaaaaaaatgctatcagcccgtaaagtggacagcagtcgacgctgctaaaggaaagttttccgttcaaaacaaacacttgtttacaaacttgaacgcctatgattttgtttggactgttgaaaaaaacggtgaactcgttgaaaagcatgcgtctcttttaaatgtagctcctgatggtacagaagaactgacgctttcttatcctctttatgagcaagaaaatgaaactgatgaatttgttttaactctttctctcagattgtccaaagatacagcttgggcttcagctggatatgaagtggcatacgaacagtttgtactgcctgccaaaaccgctgtaccttcagtaaaagctgctcatcctgctttaaccgttgaccaaaatgaacaaacgcttacggttacaggaactaacttcacggctatttttgataagcgaaaaggacagtttatttcttacaactatgagcacaccgagctgcttgcatcgggtttccgtccgaatttttggcgtgcagtaaccgataatgacctcgggaataaactgcatgaaagatgtcaaacgtggcgtcaagcaagcttagagcagcatgtgcaaaacataagtgttcagccgcaaattgactttgttatcatttcggttgaactagctttagacaactctcttgcttcttgctatgtaacgtatacgctatataacgatggtgaaatgaagattgaacaatctttagcaccttctgagacaatgcctgaaattcctgaaatcggcatgctgtttatgatgaatgcggcttttgattctttaacgtggtacggaagaggacctcatgaaaattattgggaccgtaaaactggcgctaagctggcccttcataaaggcagtgtaaaagagcaagttacaccgtatttacgcccccaagaatgcggaaataaaacggacgttcgatgggccactattacaaacgatcaaggacgcggctttttgataaaaggtttgccaacagtcgagctgaacgctttaccttactcaccttttgaactggaggcttacgatcatttttacaaattgccgtcaagcgattcagtaaccgtgcgggttaactacaagcaaatgggcgttggcggagacgacagctggggagctaaaacacatcctgattacacactatatgctaaccgctcgtatacaaacacgtttacgctaaaacctctataa

SEQ ID NO: 35820 - protein, 1034 aa, Bacillus megaterium
MLKTGKKFHYTAPANGYPEWNNNPEIFQLNRSKAHALLMPYQTVEEALKNDRKSSVYYQSLKGSWYFHFAENADARVKNFLAPEFSYEKWDSISVPSHWQLQGYDYPQYTNVTYPWVENEELEPPFAPTKYNPVGQYIRTFTPKPEWKDQPVYVSFQGVESAFYVWINGEFVGYSEDSFTPAEFDITSYLQEDENTIAVEVYRWSDASWLEDQDFWRMSGIFRDVYLYSTPPVHIYDFSVRSSLDNNYQDGELIVSADILNYFEHDTQGLTFEATLYDANGQEVLQAPLQINLSVSDQRTVSLRTHIKSPKKWSAESPHLYTLVLSLKNSAGSIIETESCKVGFRTFELKNGLMTINGKRIVLRGVNRHEFDSVKGRAGITREDMLHDILLMKQHNINAVRTSHYPNDSVWYELCDEYGLYVIDETNLETHGTWTYLQEGEQKAVPGSKPEWKENVLDRCRSMYERDKNHPSIIIWSLGNESFGGENFHHMYTFFKEKDSARLVHYEGIFHHRDYDASDIESTMYVKPADVERYALMNPKKPYILCEYSHAMGNSCGNLYKYWELFDQYPILQGGFIWDWKDQALQTTAEDGTSYLAYGGDFGDTPNDGNFCGNGLIFADGTASPKIAEVKKCYQPVKWTAVDAAKGKFSVQNKHLFTNLNAYDFVWTVEKNGELVEKHASLLNVAPDGTEELTLSYPLYEQENETDEFVLTLSLRLSKDTAWASAGYEVAYEQFVLPAKTAVPSVKAAHPALTVDQNEQTLTVTGTNFTAIFDKRKGQFISYNYEHTELLASGFRPNFWRAVTDNDLGNKLHERCQTWRQASLEQHVQNISVQPQIDFVIISVELALDNSLASCYVTYTLYNDGEMKIEQSLAPSETMPEIPEIGMLFMMNAAFDSLTWYGRGPHENYWDRKTGAKLALHKGSVKEQVTPYLRPQECGNKTDVRWATITNDQGRGFLIKGLPTVELNALPYSPFELEAYDHFYKLPSSDSVTVRVNYKQMGVGGDDSWGAKTHPDYTLYANRSYTNTFTLKPL

SEQ ID NO: 35821 - DNA, 3258 bp, Thermotoga neapolitana
  CDS (1)..(3258): transl_table=11
atggtctacgaatgggaaaaccctcagcttgtgagtgagggaacagaaaagcctcatgcctctttcataccctacctcaatccgttcacaggagagtgggagtatcccgatgacttcatcctgctcaatgggaactggaagttcttctttgcaaaaaatcccttcgaggttccggagaactttttcctggaaggtttcgatgacacaaactgggacgaaatagaagttccaagcaactgggagatgaaaggctacgggaaacccatctacacgaacgtggtctatccctttgagccaaatcccccgtttgttccaaaagacgacaatccaaccgggatatacagaaggtgggtggaagttccagaggagtggtttgaaaaggaaatctttcttcacttcgaaggagtacggtctttcttctatctttgggtgaacgggaaaaggatgggattcagcaaagacagctgcacacccgctgagttcagggtcacagacgttttgaaaccaggaaagaacctgatctgtgtggaggttctgaagtggagtgatgggagttacctggaagatcaggacatgtggtggtttgcaggaatctacagggatgtctatctctacgcactttcgaagttccatgtgagagacatattcgtgagaacagacctcgatgaagattacagagacggaaagatctttctggacgtggaactgagaaaccttggagaagagaaagaaaaagatctcattatcacactcacagatccacagggaaaagaaatgactctggtggaagagagggtaggaccaaagaatgaaacgctgtcttttgttttcgaagtgaaagacccgaagaaatggtcagcagagactcctcatctttacgttttgaaggtggaacttggagaagacgagaaaaaagtcaacttcgggttcaagaaggtggaggtaaaggatggaaggcttcttttcaacgggaaacctctctacataaagggagtgaacagacacgagttcgaccccgacaggggtcatgcggtgacagtggagagaatgattcaggacataaagctaatgaagcagcacaacataaacacagttcgcacatcacactatccgaaccagacgaagtggtacgatctgtgtgactactacggcctttacgtcatagacgaggcaaacatcgaatctcatggaatcggtgaagctcctgaagtgacccttgcgaacagaccggaatgggagaaggcacatctcgacaggatcaaaaggatggtagagcgtgacaagaaccatcccagcatcatcttctggtcgcttggaaacgaggcaggagacggaatgaactttgaaaaggccgccctctggataaaagaaagggacaacacaagactcgtccactacgaaggaacaacaagaaggggagaatcgtactacgtggatgttttctctctcatgtacccgaagatagatgttcttcttgagtacgcctcaagaaagagggaaaagcccttcatcatgtgtgagtatgcccacgcgatgggaaacagtgtgggaaatctgaaggactactgggatgtgatagaaaagtatccgtatcttcacggagggtgcatctgggactgggtggaccagggaatcaggaaaaaggatgaaaacggaaaggaattctgggcgtacggcggagatttcggcgatgaaccaaacgacaagaatttctgctgcaacggagtggtccttcccgacagaacacccgagccagagctttacgaggtgaagaaattctatcagaacatcaaagtgcgccagatcgcaaaagacacctacgaagtggagaacgggtatctcttcacagatcttgagatgttcgatggaacctggaggatcagaaaagacggtgaagtggtgagagaagaaaggttcaaactctcagccaggccaggagaaaagaaaattcttaagataccacttccagagatggaagactccgagtatttccttgagatctgtttttccctttctgaagataccctctgggcgaagaaaggacacgttgtggcgtgggaacagttcctcataaaacctccttcctttgagaagactgttgttcgagaaagtgtggatctctcagaagatggaagacatctttttgtgaggtcaaaggacacagaacttgtgttctctaaattcaccggccttctgaagcgcatcgtgtacaggggaagaaatatcctgacaggatcgatcgttccaaatttctggagggttccaacggacaacgacgtcggaaacaaaatgccagagaggctatccatctggaagagggcatcaaaagaaagaaaactcttcaagatgttcttctggaagaaagaagaaaacagcgtatccgttcagagtgtctatcaggtacccggaaacagctgggtgtacctcacctacaccatctttggaaacggtgacatcctcgtggatctttccctgattcccgcagaaggtgtaccggagattccaaggatcggtcttcagtttgccgttcctggagatttcaggttcgttgagtggtacggaaggggtccgcacgagacctactgggacagaaaagaaagcggactttttgctcgatacagaaggactgttcaagatatgatacacaggtacgtcaggccacaggagacaggaaacagatcggacgtgagatggttcgctctctccgatggaagggtgaaccttttcgtgtcgggcatgccggtggtggatttcagtgtctggccgttctccatggaagacctggaaaaggcagatcacgtgaacgaacttccagaaagggactttgtcaccgtgaatgtggactacagacagatgggacttggaggagacgacagctggggggcacagccccacctggagtacaggcttctaccagaaccgtatcgcttttctttcagaatgagggtaagtgaggaaattctatcctggagggttcttccagcgatctctgaaacacttcacgctgagatgtcctcagaggacatgatacgcgaaggagacaccctgaaagtgaaactttctcttctgaacgattctccactgagcagaaaagaccagatcatactctttgtggacggaaaagaacattcggcaaagaaggtggttataccacccttcaaagaggaaacgctggtcttcaaagtgaacggactgaagaggggagagcacctcgtatccaccagtctgaacacgggaaaaaccatctatgtgaggtga

SEQ ID NO: 35822 - protein, 1085 aa, Thermotoga neapolitana
MVYEWENPQLVSEGTEKPHASFIPYLNPFTGEWEYPDDFILLNGNWKFFFAKNPFEVPENFFLEGFDDTNWDEIEVPSNWEMKGYGKPIYTNVVYPFEPNPPFVPKDDNPTGIYRRWVEVPEEWFEKEIFLHFEGVRSFFYLWVNGKRMGFSKDSCTPAEFRVTDVLKPGKNLICVEVLKWSDGSYLEDQDMWWFAGIYRDVYLYALSKFHVRDIFVRTDLDEDYRDGKIFLDVELRNLGEEKEKDLIITLTDPQGKEMTLVEERVGPKNETLSFVFEVKDPKKWSAETPHLYVLKVELGEDEKKVNFGFKKVEVKDGRLLFNGKPLYIKGVNRHEFDPDRGHAVTVERMIQDIKLMKQHNINTVRTSHYPNQTKWYDLCDYYGLYVIDEANIESHGIGEAPEVTLANRPEWEKAHLDRIKRMVERDKNHPSIIFWSLGNEAGDGMNFEKAALWIKERDNTRLVHYEGTTRRGESYYVDVFSLMYPKIDVLLEYASRKREKPFIMCEYAHAMGNSVGNLKDYWDVIEKYPYLHGGCIWDWVDQGIRKKDENGKEFWAYGGDFGDEPNDKNFCCNGVVLPDRTPEPELYEVKKFYQNIKVRQIAKDTYEVENGYLFTDLEMFDGTWRIRKDGEVVREERFKLSARPGEKKILKIPLPEMEDSEYFLEICFSLSEDTLWAKKGHVVAWEQFLIKPPSFEKTVVRESVDLSEDGRHLFVRSKDTELVFSKFTGLLKRIVYRGRNILTGSIVPNFWRVPTDNDVGNKMPERLSIWKRASKERKLFKMFFWKKEENSVSVQSVYQVPGNSWVYLTYTIFGNGDILVDLSLIPAEGVPEIPRIGLQFAVPGDFRFVEWYGRGPHETYWDRKESGLFARYRRTVQDMIHRYVRPQETGNRSDVRWFALSDGRVNLFVSGMPVVDFSVWPFSMEDLEKADHVNELPERDFVTVNVDYRQMGLGGDDSWGAQPHLEYRLLPEPYRFSFRMRVSEEILSWRVLPAISETLHAEMSSEDMIREGDTLKVKLSLLNDSPLSRKDQIILFVDGKEHSAKKVVIPPFKEETLVFKVNGLKRGEHLVSTSLNTGKTIYVR

SEQ ID NO: 35823 - DNA, 2991 bp, Lactococcus lactis
  CDS (1)..(2991): transl_table=11
atgatgacaatgattgatgtactagagcgtaaagattgggaaaatccagtagtttcaaattggaataggttgccaatgcatacacctatggactttttagaaaagcaatcactgaatggtctttggaattttgatcatttttctagaatttcagatgtacctaaaaattggttagaactgacggagagtaaaacggaaattatcgttccaagtaattggcaaatagaatttaaggataaaagcgatgttccaatttatacaaatgtgacttatcctattccaattcagcctccttatgtaccagaggctaacccagttggagcttatagtcgctattttgatatcacaaaagaatggcttgagagcggtcatgttcaccttacatttgaaggggttggatcagcttttcatttttggttgaatggggaatacggaggttattcagaagatagccgcttgcctgctgaattcgatatcagcaacctggccaaagaaggtcaaaattgtttaaaagttctagtttttcgttggtcaaaaggcacctattttgaagatcaagatatgtggcgaatgtcaggtatttttcgttcagtgaacttacaatggcttccagataactacttgttagacttttctataaaaacagatttggatgaggatttagattttgcaaatgtaaaacttcaagcatatgctaaaaatatggatgatgcttgtttagaatttaagctttatgatgacgaacaattaattggagagtgtcatggttttgatgcagaaattggagtagtcaatccaaaattatggtcagatgaaattccctatctttatcgtttagaattaactttaatggaccggagtggggcggtatttcataaagaaacaaaaaaaattggtattcgaaaaattgctattgaaaaaggacagctaaaaataaacgggaaagcacttcttgttcgaggagtgaataagcacgaatttacccctgagcatggttatgtcgtttctgaagaagtgatgattaaagacatcaaattgatgaaagaacataattttaatgcggtccgctgctctcattatcctaatgattcacgctggtatgaattgtgtgatgaatatggattgtatgttatggatgaagcaaatatcgaaacgcatggaatgactccgatgaatcgtttgacaaatgatccgacttatttaccattaatgagtgaacgtgttacacgaatggttatgcgtgaccgtaatcatccatcaattattatttggtctcttggtaatgagtcaggttatggaagtaaccatcaagctttatatgattggtgtaaatcatttgattctagccgccctgttcattatgaggggggagatgacgcaagtagaggagcaacagatgccactgatatcatttgtccgatgtatgctagagtagatagtccaagtattaatgcgccttattcattaaaaacctggatgggggtagctggagagaatagaccactaattctttgtgaatatgctcatgatatgggtaattcattaggaggattcgggaagtactggcaagcttttcgagaaattgaccgattgcaaggtggattcatctgggactgggtggatcaaggtttattaaaagatggaaattatgcttatggaggtgactttggggataagccaaatgatcgtcagtttagccttaatggtcttgtttttccaaatcgtcaagcaaaaccagctcttcgtgaagcaaaatattggcaacaatattatcagtttgaattggagaaaactccactaggtcaagtttttgcctttacagttacaaatgagtatctatttcgaagtactgacaatgaaaaattatgttaccaactgaccaatggcttagaagtattatcccaaaatgagcttatattgaatatgcctgctggagggtctatgagaatagacctgtctgagttgcctattgatggaacagataatttatttttgaacattcaagttaaaacaattgagaaatataatcttcttgagtctgattttgaagttgctcatcaacaatttgttctacaagaaaaaattaattttactgacaaaatagatagtaatgaagaaattacacttttggaggatgaagagctactgaccgtacgatcagcaaaacagaaatttatttttaataaaagcaatggtaatctctcgcgctggcttgatgagaaaggcaatgaaaagttactgcatgagctctcagaacaatttacaagggctccattagataatgatattggtgttagtgaagttgagcatattgatcctaatgcttggttagaacgttggaaggctgttggcttttatgagttaaaaacgcttttgaaaaatatgataatacaagcaacagagaatgaagtaattatttctgtccaaacagactatgaagcaaaaggaaaaattgcattttcaaccattcgagaatatcatatttttagaaacggtgaacttcttttaaaagttgattttaaaagaaatatagagtttccagaaccagctcgaattggcttgagtcttcaactagctgaaaaagcagaaaatgttacatattttggacttggcccagatgaaaattatcctgaccgaagaggggcaagtttatttggccagtggaatttaaggattactgatatgactacaccttatatttttcctagtgaaaatgggttgaggatggaaaccagagagttaaattatggtcgtttaaaagttcgggcaatgggtcaatcttttgcttttaatctaagtccgtatagtcaaaaccagcttgctaaaaagggacattggcatctacttgaagaagaagcaggaacatggttaaatattgacggattccatatgggtgtaggtggagatgattcatggagtccaagtgtcgctcaggaatatttattgacaaagggaaattatcattatgaagttagttttaaattaacgtga

SEQ ID NO: 35824 - protein, 996 aa, Lactococcus lactis
MMTMIDVLERKDWENPVVSNWNRLPMHTPMDFLEKQSLNGLWNFDHFSRISDVPKNWLELTESKTEIIVPSNWQIEFKDKSDVPIYTNVTYPIPIQPPYVPEANPVGAYSRYFDITKEWLESGHVHLTFEGVGSAFHFWLNGEYGGYSEDSRLPAEFDISNLAKEGQNCLKVLVFRWSKGTYFEDQDMWRMSGIFRSVNLQWLPDNYLLDFSIKTDLDEDLDFANVKLQAYAKNMDDACLEFKLYDDEQLIGECHGFDAEIGVVNPKLWSDEIPYLYRLELTLMDRSGAVFHKETKKIGIRKIAIEKGQLKINGKALLVRGVNKHEFTPEHGYVVSEEVMIKDIKLMKEHNFNAVRCSHYPNDSRWYELCDEYGLYVMDEANIETHGMTPMNRLTNDPTYLPLMSERVTRMVMRDRNHPSIIIWSLGNESGYGSNHQALYDWCKSFDSSRPVHYEGGDDASRGATDATDIICPMYARVDSPSINAPYSLKTWMGVAGENRPLILCEYAHDMGNSLGGFGKYWQAFREIDRLQGGFIWDWVDQGLLKDGNYAYGGDFGDKPNDRQFSLNGLVFPNRQAKPALREAKYWQQYYQFELEKTPLGQVFAFTVTNEYLFRSTDNEKLCYQLTNGLEVLSQNELILNMPAGGSMRIDLSELPIDGTDNLFLNIQVKTIEKYNLLESDFEVAHQQFVLQEKINFTDKIDSNEEITLLEDEELLTVRSAKQKFIFNKSNGNLSRWLDEKGNEKLLHELSEQFTRAPLDNDIGVSEVEHIDPNAWLERWKAVGFYELKTLLKNMIIQATENEVIISVQTDYEAKGKIAFSTIREYHIFRNGELLLKVDFKRNIEFPEPARIGLSLQLAEKAENVTYFGLGPDENYPDRRGASLFGQWNLRITDMTTPYIFPSENGLRMETRELNYGRLKVRAMGQSFAFNLSPYSQNQLAKKGHWHLLEEEAGTWLNIDGFHMGVGGDDSWSPSVAQEYLLTKGNYHYEVSFKLT

SEQ ID NO: 35825 - DNA, 5079 bp, Ostreococcus tauri
  CDS (1)..(5079)
atgctctatgaatgcaactgggaagctctcgtgcactgggtacttcggtgtaccggtctgcgagctgtactgaagttgtatgattgctgggtttttcggacgtcaaggatattgggtctccttcttaggctaggcgaagctggttatgcgatgttctttgacgtttacgtacgagaagcactccacggggtacgaattcatttacatgcaacttttaaagactctcgctcaacgtttgaaaaggaacaaggtacagttgggcagatacctgactgggaaaatcccacgatagtgggacgtaatcgcaggtatggtgtggctacccttgaatcgaaaggcacgacgtacgcttttacagatgaagccgagtttgtctctttctggcgaagtggaggttgttgggaacgccgactaactttgagtaatgttcgttctctgaacggagtgtggcaatttaaacttttgtcgtacccgatatctttaacaggtgaatacgttgcgatggacttctcgacgaacgaatgggattccatcaacgtgccgtcaaactggcaatgtgagggatgggatcgacccatatacaccaacttccaatatcctttcccgctccacccaccggtcgctagaactcagagcgactattcaagcgataactcgaggggacatacgaagataagtgctgtaaatccaactggtgtgtacaggcactcatttaacttggaggatgactggaacgcaaagcatgataaaacgtacatcgtatttgagggagttgacgcagctttccatgtctgggtaaacgagcagtcagtcggttactctcaagatagcaaactggccgcagagtttgacatttctaggtacattcatagtggagtcaatcagttggtagtacatgtctaccggtggtgtgatggcagctatctggaggatcaagaccagtggtggctgagtggaatattcagagatgtgtatttatatcgcaagtgtctctcgcaaatttcagattatagttttcgcacgcagtgcccggatcatcaaacaggcaaatgggatgtgactgtccaagcagaaatatgtgagacgactgaagcatatttcaaaaaagtcaataaagttcttgtactccgtcttttgtataacaatttcgttgaaatacatcaagcatgtctgcatgactttcgtatccatcagaagatgccctatcttggaacaatgcacgatgcgtgtacagaagaagtttatctccagaccaaggtgcacttcagtctagaacacatcatggaatggtcttcagaaagtccaacactttacatgctcgtgataagtttagagacagaatcaggggaagtactagactgcgagggatgcagagtaggtttccgaactgtacgagtggaaaacaaacaaatcctcatcaacaacaggccagttcttattcaaggtgtgaatcggcacgagcactgcccggtgcgaggcaaagcagtatcagaaaaactcatgctagacgatattctcctcatgaaacacaccaattttaatgctgttcgaacatcgcattatcccaatcatccgcgtttttatgagttatgtgatgaatatgggttgtacgttgtcgacgaggcaaatattgaaacacatggctttgagtttggattacattcgactccttatctcgcaaatcggccaacttggaaaaacgcttacatggctcgagttacgagaatgtttgcaagagacaaaaatcactgctctgtcatcatttggtcactcggaaacgagtcagggtgcggtggcgcgcattttgccatgtactcctggataaaacacaatgaccagtctcgtctcgtccagtacgagggagggggctataagacaccttgtacagacatcatctgtcccatgtatgcgcctcctttgttgtgtgcacaactggcgtcacaaccagattggcggccagtgattttatgtgaatactcccatgctatgggcaatagcaacggcgggctgcataaatattttgacgtgtttcgaaaccaaacaggcgtgcaagggggatttatttgggacctgatcgatcaggggcttcaatgctccaaggatggagtacaatattggggatacggtggagattttggcgacgaaccaaatgataaacagttctgtatcaatggtttatttttccccgatcgaacacctcatccagcctcgtttgaggcgaagtatctccagcagcctttgatgataactctgcaagcagatcaagtgcaggttcacaatcgctacgctttcacggatcttgatcaactgaagttccattggtgtgttgtcctcgataatggctatacacttgcagctggtaacattcactgcatcaaagtgggccctggaatggttgcaaattacgattgggttgatcttttcccgtcagtggcatcattgtcacaaacagctacggaaagacgcttaactttcgatgagtggtgggtcgacatcactgcctcgtttgttgaagaccaactatgggcagactcgcagatgatcatcgcgaagtgccagctaatgttaccaaagcgcgtcacgagcgtctcaaaagaacccaggctggagagcagagttcgcgtggaaagaggctgcaatcgattgacggtagattgccgcgatagctcctacatatttgacaccgcttcgggcagtttagttgagtttcagtttcgtggcgagacgctgattgattcaggactcgccccatgcctttggcgcgcgcctacagataacgacaatggaggttccattttttcgtttgctgcgcgctgggcacatgcaggtttgaataagttggatgaatataagacgagtacaagcagccgcatcaatgagcacggttgtttccagctattagtgcaaaagtctctcggacccaccaagagaaaacttgtttgcactttgtgtactcgctacaccgtcactagatgcggtcatctagaagttaagtgcactttcaactttgcacgaaatctgccaccacttccaagaataggtgtgagcgttacgtgcccgaaacaacttcatcaggttgagtggcttggacttggtccacatgaaaattatctggataggaagacgtcagctttcttagggcgttatggtgctacagttgaagaattgcatgttccttacatagtcccgtgtgaaaatggagcacggcaagggacacgctggctatctttaggatcgtcagaaagtacaaacaagtgcctcttcacgagcaaggagaacttttcgttcagtgcgtcgaacttcactgatgaagagcttgcacgccgtgtacatcaacatgagctgcagcgcgcacaaagcatcaatatacatttggacgcttttcatatggggcttggaggagataacagctggtttccgagtgtgcacccagaatttacatcatctataacaaccaaaaattatgattttgccttaaaaccgaatgacaactattgcgattttgaggactggatcatgccgatcttggacgagatgcttcgagagcagaacgaggagggagtgaagtggacgtgctcgaaggtgatcaagcggctcgggctggagattaatcacgaggattccatcttttattgggcggcgaagaacgacatcccgtgctactgcccggcgctcaccgacggctccatcggggacatgctgtatttccactcttacaagaaccccggactcgtgattgatgtcgttgctgacgttcgtgcgatgaacgacgagtctataaaggtgaaacgtccgagaaagacgggcatcatcctcctcggcggtggcgttgccaagcaccacatttgcaacagcaacctgatgcgaaacggtgccgattacgccgtgttcataaacacggcgcaggagttcgacggcagtgactccggtgcgcgtcctgacgaggccgtgtcctggggtaagatcacgatggacgccaaaccggtcaaactctacgtcgacgccaccatcgcgtttccgctcctcgtcgcgcagacgttcaagaaaaattttcaaccgcgaggtccccccgcgagggcgccgctcttggagcgatgtacacacgtagaccatacatccttgttaatacgtaccggtagcaaacgaaaagtgcaacaaacaacacaaagtgcaacagatctcgcggctcagacccccacgcgcgcggacctcgagggttggtccgcggcctcgacgagcggcgcgttgtcccagagcgacgtccgagagtttcaaaggctcggcttcctggccctcactggatggtgcaccgacgacgaatgcgcggcgatgcggaatcgagcgagtgcgatcgtcagagatttcgatcccgcgtcgcacgcgagcgtgttcagcacgacggatcagacgcggacgacggatgaatattttttggcgagcggcaacggcgtgagctgtttctttgaggaaaaagcgctgcgcgcagacggcactctgacggtggagaaggaggtggcgatcaataagattggacacgcgatgcatgatttggacgacgtgtttcgcgcgttttcgagatcagacaaagtcaaacgactcatggaatcattgtcgatgtcgaagccgacaccggtgcagtcaatgtacatcttcaaacaaccgagcatcggcggcgaggtcgtcccgcatcaagacagcacctttttgaacacatcgccggcgacatgcatcggaatctggctcgcgctggaggattgcacggtggaaaatgggtgtctctttgcgcttcctggaacgccgccagtggcgcgcgtcatgactgtggactaccccggtggctcgcgaaagattgaattcatcggcgcaaatccgacgcacgacctcgacgccgcgcacgcgttggaagttccggccggaacgctcgtcctcctccacggtgccaacgtgcacttctcccgagcgaacaccagcgcgaagtcgcgccacgcttacagcgtccatttcgtctccggcgacgccgcgtggaagcccaccaattggctccagcgctcgaacgatttccctttcacccctttgtaa

SEQ ID NO: 35826 - protein, 1692 aa, Ostreococcus tauri
MLYECNWEALVHWVLRCTGLRAVLKLYDCWVFRTSRILGLLLRLGEAGYAMFFDVYVREALHGVRIHLHATFKDSRSTFEKEQGTVGQIPDWENPTIVGRNRRYGVATLESKGTTYAFTDEAEFVSFWRSGGCWERRLTLSNVRSLNGVWQFKLLSYPISLTGEYVAMDFSTNEWDSINVPSNWQCEGWDRPIYTNFQYPFPLHPPVARTQSDYSSDNSRGHTKISAVNPTGVYRHSFNLEDDWNAKHDKTYIVFEGVDAAFHVWVNEQSVGYSQDSKLAAEFDISRYIHSGVNQLVVHVYRWCDGSYLEDQDQWWLSGIFRDVYLYRKCLSQISDYSFRTQCPDHQTGKWDVTVQAEICETTEAYFKKVNKVLVLRLLYNNFVEIHQACLHDFRIHQKMPYLGTMHDACTEEVYLQTKVHFSLEHIMEWSSESPTLYMLVISLETESGEVLDCEGCRVGFRTVRVENKQILINNRPVLIQGVNRHEHCPVRGKAVSEKLMLDDILLMKHTNFNAVRTSHYPNHPRFYELCDEYGLYVVDEANIETHGFEFGLHSTPYLANRPTWKNAYMARVTRMFARDKNHCSVIIWSLGNESGCGGAHFAMYSWIKHNDQSRLVQYEGGGYKTPCTDIICPMYAPPLLCAQLASQPDWRPVILCEYSHAMGNSNGGLHKYFDVFRNQTGVQGGFIWDLIDQGLQCSKDGVQYWGYGGDFGDEPNDKQFCINGLFFPDRTPHPASFEAKYLQQPLMITLQADQVQVHNRYAFTDLDQLKFHWCVVLDNGYTLAAGNIHCIKVGPGMVANYDWVDLFPSVASLSQTATERRLTFDEWWVDITASFVEDQLWADSQMIIAKCQLMLPKRVTSVSKEPRLESRVRVERGCNRLTVDCRDSSYIFDTASGSLVEFQFRGETLIDSGLAPCLWRAPTDNDNGGSIFSFAARWAHAGLNKLDEYKTSTSSRINEHGCFQLLVQKSLGPTKRKLVCTLCTRYTVTRCGHLEVKCTFNFARNLPPLPRIGVSVTCPKQLHQVEWLGLGPHENYLDRKTSAFLGRYGATVEELHVPYIVPCENGARQGTRWLSLGSSESTNKCLFTSKENFSFSASNFTDEELARRVHQHELQRAQSINIHLDAFHMGLGGDNSWFPSVHPEFTSSITTKNYDFALKPNDNYCDFEDWIMPILDEMLREQNEEGVKWTCSKVIKRLGLEINHEDSIFYWAAKNDIPCYCPALTDGSIGDMLYFHSYKNPGLVIDVVADVRAMNDESIKVKRPRKTGIILLGGGVAKHHICNSNLMRNGADYAVFINTAQEFDGSDSGARPDEAVSWGKITMDAKPVKLYVDATIAFPLLVAQTFKKNFQPRGPPARAPLLERCTHVDHTSLLIRTGSKRKVQQTTQSATDLAAQTPTRADLEGWSAASTSGALSQSDVREFQRLGFLALTGWCTDDECAAMRNRASAIVRDFDPASHASVFSTTDQTRTTDEYFLASGNGVSCFFEEKALRADGTLTVEKEVAINKIGHAMHDLDDVFRAFSRSDKVKRLMESLSMSKPTPVQSMYIFKQPSIGGEVVPHQDSTFLNTSPATCIGIWLALEDCTVENGCLFALPGTPPVARVMTVDYPGGSRKIEFIGANPTHDLDAAHALEVPAGTLVLLHGANVHFSRANTSAKSRHAYSVHFVSGDAAWKPTNWLQRSNDFPFTPL

SEQ ID NO: 35827 - DNA, 3301 bp, Arthrobacter psychrolactophilus
  CDS (91)..(3177): transl_table=11
agtgttgctgtccatcatccccctcgccatcgcaatggtcgtgctgcagcgcttctggcgcggcggccttacagaaggatccgtaaaataatgacccccgcagacgtttcgtacatcaccgaccagggccccggctccggcctgcgtgtgccggcccgttcctggctgaattccgacgccccctcgctctcactgaacggggactggcgctttcggctccttccggccgcccccggaaccccgggcgccggatccgtgctgcccgacggggaatccgtggaaggtgtggctgccgaatccttcgacgactccgcctgggacaccctgcccgtcccgtcccactgggtgctgcatggagagggcaaatatggccgcccgatctacaccaacgtgcaataccccttcccgtcggatccgcccttcgtccccgacgccaaccccacaggagactaccgccgcagctttgacgtccccgccgcctggtttggaaagtacgacgcggcactcaccctgcgctttgacggcgtcggatcgcgctacaaggtttgggtgaacgggcaggaaatcggggtgggctcgggcagccgactcgcccaggagttcgatgtcaccgcggcgctgcgccccggctccaaccttcttgtggtgcgcgtccaccaatggtcggccgccagctatctggaagaccaggaccagtggtggctgccgggcatcttccgcgacgtcacactggcggcccgccccgccggcggcatcaccgacgtctggctgcgcaccggatggacggctgacaccggcgcggggcagggagccggcaccggcaccctcgatccggaaatcattgccgaggcggacgcctacccggtgaccctcacggcgcccgcgctgggagttgcggtgcgctgggactcgccggccgacgtcgtccccttcacagtggacaacgtggagccctggtccgccgaactcccccggctctacgaggccacggtgtccagcgcggcggagagcatcacgctccgcctgggtttccgcaccgtggagatcgtgggtgaccagttcctggtcaacggccgccgcgtcgtgttccacggcgtcaaccggcatgagaccaacccggaccgcggacgcgtctttgatgaagccgacgcccgcgaggacctggcgctcatgaagcgtttcaacgtcaacgccatccggaccagccactacccgccgcacccgcgcctgctggacctggccgacgagatgggcttctgggtcattttggaatccgacctggaaacccacggcttccaccggcagggctgggtggataaccccagcgacgtccccgcgtggcgcgatgccttcgttgaccggatggaacgcaccgtggagcgggacaagaaccatgcctccatcgtcatgtggtccctgggcaatgaatccggcacgggcgcaaacctgacagttatgcaagcctggacccacacggccgtacgcctttcccgtcccgtccactatgagggcgactacacgggagcctatacgaatgtgtactcccgcatgtactcctccatcccggagaccgattccattggccgcaacgactctcatgcgctgctccttggctgcgacgcggccgaatcggcccggcagcgcacccggccgttcatcctgtgcgagtacgtgcacgccatgggcaacggccgcggcgccatggaccagtacgaggaacttgtggacaaatacccgcgcctgcacggcggttttgtgtgggagtggcgcgatcacggcatccgcgccaataccgccgacggcacggaattctttgcctacggcggcgaccttggcgaggtgatccacgattccaacttcgtcatggacggcatggtcctctccgattccacgcccacccccggcttgcatgagtacaagcagatcgtctcccccatccgcctgtcgctggccctggacgacggcggtgcgccgcggctcactgtcgcgaacctgcggcacacggctgacgcgtccgacgtcgtgcttcgctggcgggtggagcacaacggcgccgtcgccgcctcaggggagctggctgtcgacagcgcagacggtccgctgcgggctggcgaatccgtcacgctcacactgccgcccgtcgctgccgcgccggaaggcgaaacctggttgacgatggaggtcgtactgcgcgacgccacggagtgggccccggccgggcatccgctggccgcaacccagctggacctctcggcgccgcaatccgcaccgcgcgcgccccgtccggccgcgcccgtcagcggcgcgtccccgttgagcctgggccatgccatgttcgacgcaggagcgctcgttgcgctggcaggcctgccggtgtccggtccccgctttgagctgtggcgggcaccgaccgacaatgacaggggcaagggatttggcgcctatggcccggaggatccttggctcaacaacgggaaaggtgttccggcgccgtcgtcggaggccgtgtggaagcaggccggacttgaccggctgacgcgccgcgtcgaggacgttgccgcgctgccggacggactgcgggtccggaaccgctacgctgccgcgaacagtgccgccagcgtagcggtagaggagaactggcagctggcgggcgaggaactgtggctgcgcctggacatcatgcccagcgcgggctgggacctggtgttcctccggatcggcgtgcggctggacttgcccacggacgttgacggtgcctcatggttcggcgccggcccacgggaatcctacgcggacagcatgcatgcaacagttgtgggacggcacagcggctccattgatgagctgaatgtcccctacgcccggccgcaggaaaccgggcaccgcagcgatgtgcgctcactggagctctcccgcaacggggctccgtggcttcgcattgaggccgatccggatgcactggggcgccgtcccgggttctcgctggcccggcacacggcacagcaggtcaccgcggccgggcacccgcacgagcttccggcgtcaagccacagctacctgtatcttgatgcggcgcagcacggcctgggctcgcgcgcctgcggaccggatgtgtggcccgactttgccctgcgcccagaggcaaggacgctggtactgcgcttctccgcactgtaacccaatgccgccaaacgcggcagcatctaatgggcacttttcgccaacgcggcagcactcattgctgccgcgttggcgaaaacacgccatttggtgatgcggcgttgcgggcggcggggaattc

SEQ ID NO: 35828 - protein, 1028 aa, Arthrobacter psychrolactophilus
MTPADVSYITDQGPGSGLRVPARSWLNSDAPSLSLNGDWRFRLLPAAPGTPGAGSVLPDGESVEGVAAESFDDSAWDTLPVPSHWVLHGEGKYGRPIYTNVQYPFPSDPPFVPDANPTGDYRRSFDVPAAWFGKYDAALTLRFDGVGSRYKVWVNGQEIGVGSGSRLAQEFDVTAALRPGSNLLVVRVHQWSAASYLEDQDQWWLPGIFRDVTLAARPAGGITDVWLRTGWTADTGAGQGAGTGTLDPEIIAEADAYPVTLTAPALGVAVRWDSPADVVPFTVDNVEPWSAELPRLYEATVSSAAESITLRLGFRTVEIVGDQFLVNGRRVVFHGVNRHETNPDRGRVFDEADAREDLALMKRFNVNAIRTSHYPPHPRLLDLADEMGFWVILESDLETHGFHRQGWVDNPSDVPAWRDAFVDRMERTVERDKNHASIVMWSLGNESGTGANLTVMQAWTHTAVRLSRPVHYEGDYTGAYTNVYSRMYSSIPETDSIGRNDSHALLLGCDAAESARQRTRPFILCEYVHAMGNGRGAMDQYEELVDKYPRLHGGFVWEWRDHGIRANTADGTEFFAYGGDLGEVIHDSNFVMDGMVLSDSTPTPGLHEYKQIVSPIRLSLALDDGGAPRLTVANLRHTADASDVVLRWRVEHNGAVAASGELAVDSADGPLRAGESVTLTLPPVAAAPEGETWLTMEVVLRDATEWAPAGHPLAATQLDLSAPQSAPRAPRPAAPVSGASPLSLGHAMFDAGALVALAGLPVSGPRFELWRAPTDNDRGKGFGAYGPEDPWLNNGKGVPAPSSEAVWKQAGLDRLTRRVEDVAALPDGLRVRNRYAAANSAASVAVEENWQLAGEELWLRLDIMPSAGWDLVFLRIGVRLDLPTDVDGASWFGAGPRESYADSMHATVVGRHSGSIDELNVPYARPQETGHRSDVRSLELSRNGAPWLRIEADPDALGRRPGFSLARHTAQQVTAAGHPHELPASSHSYLYLDAAQHGLGSRACGPDVWPDFALRPEARTLVLRFSAL

SEQ ID NO: 35829 - DNA, 3105 bp, Phaeosphaeria nodorum
  CDS (1)..(3105)
atggcttcaggtacctaccccgctgcaaagccagactggaacaatctcgacatcctccacgagaataccttagcaccccgcgcatacttccataactacacatcggaagcggatgccttgacatacgatgtaaccaaatcgaagattcataacctgtccggaacatggaagtttgagcatgcatactcgccctttgaggctcccgaaggctttgaagcgccatcctttgacacttcgaaatggagcgatattgccgtaccaggcatgtggcagttgcaaggatttggtaaaggaccccaatatacgaatgtccagtaccaaatcccagtggacccgcccaatgtctcattcactgagaacgagactggttcatacgtgaagaagttcaagatcccacaagagttgcagtcaggccagattcgcttgcgattcgaaggtgtcgacgcagcgttccatgtctgggtgaatggtaaagaggtgggttactctcaggggtccaggaacccagacgaattcgacatcactagtctggttgatctcaatggtgagaacgtactcgctgtaagggtctaccagctgtgtgatggtacatacattgaagaccaggatcaatggtggctcagcggaatcttccgagacgtgctcttgattggcttcccaaaggagagccgcattgacaatgtctttgcccagacactgctcgacagctcctacacagatgctgatctcaaggttaaagtcagtgccatcggatccggcaaggtcaccgtcaaagttctagatgcacaaaagaagattgttgcaactgctgatgcagaggtcaacaacggcggttcaaccgactttagcatcccagtcaagaaccccttgaagtggactgcagaatcacccaatctctaccatcttgttgtatcacttggctctgagcagttcgtcactcagcgtatcggcttccgccaggtcgagatgaaagatggtctgatcaaagtcaacggaaagagaatcgtcttccgcggcgtcaaccgtcacgaacatcaccccaagcatggccggaccgttccacttgagttcttgaagcaggaccttctgaccatgaagcgccacaacatcaatgctatccgcacatctcaccagctcaatgatcctcgactctacgatctggccgacgagatgggtttctgggtcatggacgaggcggacttggaatgtcacggcttcgagactattgctgatctggcgcttacgcctgctgagcaaaagttgcccttccgcgaacgccagctcctgacaagagaaaaggcggcagagtggactaccgacaaccccgactggaccaaggcttatgtagaccgcgccgagcatctggtcaagcgtgatcagctccatccttccattatatcgtggagcttgggtaatgaagccttctatggacggaacttcaaggcgatgtacgatcatatcaaagcgtacgacaacagcagacccatacactatgaagcagacatctacgccgagaccatggacatgtactccaggatgtatccaccaatcaatgagatcattgagtttggaaaagacaagaccaagactaagcctctcgtgctttgcgagtttgttcacgccatgggtaacggcccaggaaacatcaaagagtatgtcgatgctttctacgagtaccctactctacagggtggtttcgcctgggaatgggcgaaccacggccttgtaaccaaggataagcagacaggcgaggaatttatggcatatggcggtgacttcggcgaggaggttcatgactccactttcgttatggacggtcttgtcaactcagaccacactcccaatgctggattggtggagtacaagaaggctattgagcccgtgcagcttctggaatctagcaagacaaaggcaaagtttatcaacagatatgacatcatcactctggatcacctggtctgccagtacacggttgcgtctgaggctggtggcgagggtaagtctggtgtgcttgatatcccgtctggtatcgcaccaggacagactttcgaagttgaacttccccagatctccgacttggtcggagaagcgcttctcagcattacgttcggcctgaaagaggctaccccatacctggagaagggattcgaagttggcacggctcagatccccattactgcgaccgcacccgtacagcttcctgcaaaatcagatggaaagcttgaggtcgctacgagccggaatttgttggagattacaagccaaaagtcgacctggaaattcaacactctccacggcaccctcacgtcctggcgtcaagcctccaccgagctcatcaccaaggcgccagaattcgacatcttccgcgcagaaaccgacaacgacgccccgcaagacggctgggaatggaaggagaagtgcctccatctcgccaaaccatcgacccgcaaggtcgagtggtcgcaaccagacgccaacaccttgaaggtcgtcgtgaaccagcgcctcgctccaccgacactatcatggtctatcgacaccattctgacatacacattccgctcgaacggcagcgtttccatcgccgtcaatggcacaccccgaggcgcgaacctgccccgcacactcccgcgcatcggcctcgtcatgtcgctcccccagcaattccaacgcgtcgactggttcggccgcggccccggcgaatcctatcgtgactccaagttctcccagcccgtgggcaagtacaccgcccaaaccattgacgagctctgggtcgactacgaagtcccgcaggaaagcgccaaccgcacagacacgcgctgggtctccgtatccaacggcaaggacgcattgctgcttgcgcagtttgtcaagggtgaggagaggaagttgtttgatttccaggtgagccattataggatgcgggatgttgctgaagcgggacatccgcatgagttgaggcgcaagaagagggaggaggtattgctaagattggatgcggaacatcatggtttgggcagtgggagttgtggaccgaggacgctggatgagtatgcgttgttgacagggccgtttgattttgaagtgttgttgcagacgaagtag

SEQ ID NO: 35830 - protein, 1034 aa, Phaeosphaeria nodorum
MASGTYPAAKPDWNNLDILHENTLAPRAYFHNYTSEADALTYDVTKSKIHNLSGTWKFEHAYSPFEAPEGFEAPSFDTSKWSDIAVPGMWQLQGFGKGPQYTNVQYQIPVDPPNVSFTENETGSYVKKFKIPQELQSGQIRLRFEGVDAAFHVWVNGKEVGYSQGSRNPDEFDITSLVDLNGENVLAVRVYQLCDGTYIEDQDQWWLSGIFRDVLLIGFPKESRIDNVFAQTLLDSSYTDADLKVKVSAIGSGKVTVKVLDAQKKIVATADAEVNNGGSTDFSIPVKNPLKWTAESPNLYHLVVSLGSEQFVTQRIGFRQVEMKDGLIKVNGKRIVFRGVNRHEHHPKHGRTVPLEFLKQDLLTMKRHNINAIRTSHQLNDPRLYDLADEMGFWVMDEADLECHGFETIADLALTPAEQKLPFRERQLLTREKAAEWTTDNPDWTKAYVDRAEHLVKRDQLHPSIISWSLGNEAFYGRNFKAMYDHIKAYDNSRPIHYEADIYAETMDMYSRMYPPINEIIEFGKDKTKTKPLVLCEFVHAMGNGPGNIKEYVDAFYEYPTLQGGFAWEWANHGLVTKDKQTGEEFMAYGGDFGEEVHDSTFVMDGLVNSDHTPNAGLVEYKKAIEPVQLLESSKTKAKFINRYDIITLDHLVCQYTVASEAGGEGKSGVLDIPSGIAPGQTFEVELPQISDLVGEALLSITFGLKEATPYLEKGFEVGTAQIPITATAPVQLPAKSDGKLEVATSRNLLEITSQKSTWKFNTLHGTLTSWRQASTELITKAPEFDIFRAETDNDAPQDGWEWKEKCLHLAKPSTRKVEWSQPDANTLKVVVNQRLAPPTLSWSIDTILTYTFRSNGSVSIAVNGTPRGANLPRTLPRIGLVMSLPQQFQRVDWFGRGPGESYRDSKFSQPVGKYTAQTIDELWVDYEVPQESANRTDTRWVSVSNGKDALLLAQFVKGEERKLFDFQVSHYRMRDVAEAGHPHELRRKKREEVLLRLDAEHHGLGSGSCGPRTLDEYALLTGPFDFEVLLQTK

SEQ ID NO: 35831 - DNA, 3036 bp, Aspergillus oryzae
  CDS (1)..(3036)
atggcgtctcttgcgaccaccgggtggccaggagccctgcctgactggtctaatttgaatgtgctgcatcgcaatacattggcccccagggcgcacttttacctctacccgaacgaggaagcggccctgacattcgatcgtgaggagagtctattccacagcctgaatgggacttggaaatttcactatgatgcctccccattcgtgtccccctcctgggacagtaatgtgaatgattgggatgatatcgtggtgcctggtatgtggcagacgcaagggtacggccgcccacattataccaatattgactaccctttccctgctaccccaccgaacgtctcatatatgaacccaacagggtcatactggcgtgaatttgaagtcccctcggactgggacgggcagcagattcgtcttcgttatgaaggggtggacagtgcattccatgtctatgtcaatggcgaggaagttggctatagtcaaggtagccgaaaccctagcgagtttgacatcaccgaatacctctcacctaatgataccaacacacttgcgactcgggtctaccaatggtctgatggctcctacctcgaggatcaggatcaatggtggctttcagggatcttccgagatgtctacctcataccgttccctcagtctgctattacagacttcagtgtcatgccagagttggatgatagtcttgagattggcaccttaaacgtcaatgtgagtacccagggagaagatggtgacatgagtattaaggtcctcctgccgaatgggggggtattagacagctggtcaggatcatcatcggatcgctactccaagagagtagagggggatgatttacacctctggtctgctgaaactcccaacttatatacgatcctaatcgaattcaatggccgtactattagccagaaagttgggttccgccgggttgaaatgagtggctcaaactttctagttaatggaaagcccattattatctatggggttaatcgccacgaacatcactatttgtccggtcgaactgttccttacgaggcaatgcgcgcagacttgattcagatgaagcgctctaatatcaacactattcgcactgctcatcagccaccacacccggcatttttcgatgtggctgatgaactgggcttctacgtgatctctgaggcagatcttgaatgtcacgggtttggtcatattgaagataccgaggaacaggcggcgacatggttgtctgataaccccgaatggacacatgcatacttggatcgggcccagcaggtggtagagcggttcaagaatcatgtatccgtgattatctggtcccttggcaatgaatgcttttatggtcagaaccaggcagccatgtaccagtggattaaggagagggacccctcacgaatcatccactatgaacaggaccggaaggccgaatcagcagatatctatagccatatgtattccagtccggatactatgcttgagcacatggcaaatcacacggataagcctctgattctttgcgaatatgcgcatgcaatgggtaacggccctggtggactagaggagtacgttgccctgtttagatcggagcctctctcccagggaggactcgtctgggaatggaacaaccacggcttgttaaagaaagaaggggacctggagtatttcgcctatggtggtgactttggggacgagcctaatgatgccgacttcatcatggacggtctgaccctctctgatcatacacctatgcccagtctgctggagtacgccaagatcatccagccggtcactgtacgcttgaccgaggactctagccagatgattgtgaccaaccattacgactttgttgacctcagcggactgaatgtgttctggcatatggtctatgacggccggacgaccaaccggactgaactaacgctgccccgtgtaccagccggggagaatcgcactgtggacctgccactaaatatcgatgatgtctcccaagaagcgtggttaacgattgagtttgaactgaaggagaatcgaatctgggcagaccagggccacattgtggcttgggaccagctctacctgcctgggacttctgtccagcgctcaatggcagctgttgggcgtgctgtgtcaccctctgcacgccaggcagggctgcaagtaacccaggaccgagcaaaactcaacatcaccaccggtgggacggcctttggatttgacctcctgcagggcaatgtcacctgggaagtggatggcgtcagcatgttccagcagggaccggagctctacttctaccgagcaatgactcaaaatgacgaggcaagtgcaggtgacggcgtggaatgggatgcggccaaggtcggtatgatgcatacgcaggttcgggacgtgacatggtcacagtcagagaacggagtgacggttcacttccagatccgcgtggccccaaaggtactcgaatggggcgtggaagccgatcttatttacaccgtgtctactggggacccggcaattcgtgttcaagccaggggtgagtttgtgggtaagaacacgccgtctgtcgttccccgtatcggacttatggctgtcatgtccaaagagttcagtgatgtgagctggtttggacgaggcccaggagagaactataaggactcgaagcaggcatgccgcatgggtcgatatgagtcgactgtggaggacttatttacgtactacgactacccacaggagaacggaaaccgtgaggacctgcgatggctgcaggtttctaacggagaggtgacattggatgtgcgtcgtgcagatgagggcgcctcattcagcttcacggctggacgatatatgccattcgacctgaatgatgcaaagcaccctcatgatctcaatcctctcaacgtcactgtgctcaatctcgactatgacaaccatggcttgggatccgcgactgtcggtcctaagccattcgagaagtacaagtgtaggacggagccattcgattttacatttgtgatgagcttggcctag

SEQ ID NO: 35832 - protein, 1011 aa, Aspergillus oryzae
MASLATTGWPGALPDWSNLNVLHRNTLAPRAHFYLYPNEEAALTFDREESLFHSLNGTWKFHYDASPFVSPSWDSNVNDWDDIVVPGMWQTQGYGRPHYTNIDYPFPATPPNVSYMNPTGSYWREFEVPSDWDGQQIRLRYEGVDSAFHVYVNGEEVGYSQGSRNPSEFDITEYLSPNDTNTLATRVYQWSDGSYLEDQDQWWLSGIFRDVYLIPFPQSAITDFSVMPELDDSLEIGTLNVNVSTQGEDGDMSIKVLLPNGGVLDSWSGSSSDRYSKRVEGDDLHLWSAETPNLYTILIEFNGRTISQKVGFRRVEMSGSNFLVNGKPIIIYGVNRHEHHYLSGRTVPYEAMRADLIQMKRSNINTIRTAHQPPHPAFFDVADELGFYVISEADLECHGFGHIEDTEEQAATWLSDNPEWTHAYLDRAQQVVERFKNHVSVIIWSLGNECFYGQNQAAMYQWIKERDPSRIIHYEQDRKAESADIYSHMYSSPDTMLEHMANHTDKPLILCEYAHAMGNGPGGLEEYVALFRSEPLSQGGLVWEWNNHGLLKKEGDLEYFAYGGDFGDEPNDADFIMDGLTLSDHTPMPSLLEYAKIIQPVTVRLTEDSSQMIVTNHYDFVDLSGLNVFWHMVYDGRTTNRTELTLPRVPAGENRTVDLPLNIDDVSQEAWLTIEFELKENRIWADQGHIVAWDQLYLPGTSVQRSMAAVGRAVSPSARQAGLQVTQDRAKLNITTGGTAFGFDLLQGNVTWEVDGVSMFQQGPELYFYRAMTQNDEASAGDGVEWDAAKVGMMHTQVRDVTWSQSENGVTVHFQIRVAPKVLEWGVEADLIYTVSTGDPAIRVQARGEFVGKNTPSVVPRIGLMAVMSKEFSDVSWFGRGPGENYKDSKQACRMGRYESTVEDLFTYYDYPQENGNREDLRWLQVSNGEVTLDVRRADEGASFSFTAGRYMPFDLNDAKHPHDLNPLNVTVLNLDYDNHGLGSATVGPKPFEKYKCRTEPFDFTFVMSLA

SEQ ID NO: 35833 - DNA, 3090 bp, Enterobacter cloacae
  CDS (1)..(3090): transl_table=11
atgcccaacactctatcgctgactctcagcgccattctggcccgacgggactgggaaaacccgggtgtcacccagtggaaccgtctggaggcacatgcgccgttacacagctggcgtcttgaacagcctgccctggatgatgctgcatccgccagcagacgctccctcaatggggtgtggcgatttaactactttcctgcacctgagcaaatcccggaggcgtgggtaaccgaagattgtgcagacgccgttccgatgcccgtgccgtcgaattggcagatgcaggggtttgacacgcccatctacaccaacgtcacctatcctatccccgttaatccgccttttgtgccgcaggaaaacccaaccggctgttactcgctcacatttgatgtggatgacgcgtggcttcagagcgggcagacccgcatcatctttgacggcgtgaactctgcgtttcatctgtggtgcaacgggcggtggatgggctattcccaggacagcaggctgcctgccgaattcaatctctcgacggttctgcggcccggtgagaaccgcctggcggtcatggtgctgcgctggtgcgacggcagctatctggaagatcaggacatgtggcgcatgagcggaattttccgcgatgtgacgctgctgcataaacccgaaacgcagattgccgattatcgcgtggtgacggacctgaatgcggagctggaccgcgcggtgcttaaggcagatgtcgcgctggcaggggcgggctttgcagactgcgaggtggtctttaccctgtggcgcaagggtgaaaaatgcgccagcgtttcccggcgtccggggtctgccgttgtggacgagcgtggcagctgggacgaacgcttaacggtggcgatccccattgaccgccccgcgctctggagtgctgaaacgccggaactgtatcgcctgacgatggcgcttctcggcccgcagggtgaggtgctggaggttgaggcgtgcgatgtgggcttccgccgcgttgacatcagcaacggcctgctgaagcttaacggtaagccgctgctgatccgcggggttaaccgactcgagcatcacccggaaaacggtcaggtgatggacgaggcgaccatgcgtcgcgacatcgaaatcatgaagcagcataacttcaacgccgttcgttgctcgcactacccgaaccatccgctgtggtaccggctttgcgatcgctacgggctgtacgtcgttgacgaagccaatattgaaacccacggcatggtgccgatgagccgcctcgctgacgatccacgctggctgcccgccatgagtgagcgcgtaacccgcatggtgcagcgcgatcgcaatcatccctcaattatcatctggtcgctgggtaacgagtccggccacggcgcgaatcatgatgcgctgtaccgctggctgaaaaccaccgatcccacgcgcccggtacagtacgaaggcggcggggcgaatacggcggcgaccgatattgtttgcccgatgtacgcccgggtcgattgggatcagcctttcccggcggtgcctaaatggtcaatcaagaaatggatcggcatgcccgacgaaacgcgtccgctgatcctctgtgaatacgcccacgcgatgggaaacagcttcggcgggtttgcgaaatactggcaggcgtttcgcagccatcctcgcctgcagggtgggtttgtctgggactgggtcgatcaggcgttgacgaagaaagacgaaaagggcaacgcgttctgggcctacggcggggactttggcgatacgccgaacgatcggcagttctgcctcaatggcctggtcttccccgatcgcacgccgcacccggcgctgtacgaggcgcagcgcgcccagcagttctttacctttacgctggtcagcacctctccgctgatgattgaggtgcaaagcggctacctgttccgccctaccgataacgaggtgctgagctggacggttgcccgggatgggaaggtactggcttcgggcgaggtcacgctggcgatagcccctgaaggcgttcagcgtctggagatcgctctgccggaattgaaagccgggccgggtgaaatctggctgaacgttgaggttcgccagcctcgggcaacgccgtggtcaccggcaggccatcgctgcgcgtgggagcagtggccgcttccggccccactctttattgcaccgccagcctctacgggcgagccgccggttttaacgcaaaacgatcgcatcctggaggtcacacatcgtcaacagcgctggcagttcgatcgcgcatccggatacctgactcaatggtggcgaaatggcgttgaaacgctgctttcacccgtgacggataacgtcagccgcgcgccgctggacaacgacattggggtgagcgaagcgacgcgcatcgatccaaacgcgtgggttgaacgctggaaagcggcgggcatgtacgatctcacctcgcgcatgctgcactgtgaggcagagcagcatgcgcgtgaggtggtggttaccacgcttaatgtcctggagcatcgcggcagggcgctgttcctgagccgtaaaatctggcggctggacgagcagggggttctgcatggcgacattcaggtcgatattgcgtctgatatcccgaagcccgcgcgcattggcctgagcgttcatctcgctgaaacgccagaaaaggttgactggctggggctggggccgcatgaaaactacccggacagaaagctggcggcgcagcaggggcgctggacactgcccctggcagacatgcacacgccgtatatcttcccgacggaaaatggtttgcgctgcgatacccgcaaacttgtgctgggggcgcatcagctgaatggcgcgttccatttctcagtgggccgctatagccagcagcaactgcgtgagacaacccatcatcatctgctgcgggaagagccggggggctggctcaacctcgatgcgtttcatatgggggtgggcggcgatgactcctggagccccagcgtttcgccggaatttatcctgcagacgcgccagcttcgctatacctttagctggcagcagaacccttaa

SEQ ID NO: 35834 - protein, 1029 aa, Enterobacter cloacae
MPNTLSLTLSAILARRDWENPGVTQWNRLEAHAPLHSWRLEQPALDDAASASRRSLNGVWRFNYFPAPEQIPEAWVTEDCADAVPMPVPSNWQMQGFDTPIYTNVTYPIPVNPPFVPQENPTGCYSLTFDVDDAWLQSGQTRIIFDGVNSAFHLWCNGRWMGYSQDSRLPAEFNLSTVLRPGENRLAVMVLRWCDGSYLEDQDMWRMSGIFRDVTLLHKPETQIADYRVVTDLNAELDRAVLKADVALAGAGFADCEVVFTLWRKGEKCASVSRRPGSAVVDERGSWDERLTVAIPIDRPALWSAETPELYRLTMALLGPQGEVLEVEACDVGFRRVDISNGLLKLNGKPLLIRGVNRLEHHPENGQVMDEATMRRDIEIMKQHNFNAVRCSHYPNHPLWYRLCDRYGLYVVDEANIETHGMVPMSRLADDPRWLPAMSERVTRMVQRDRNHPSIIIWSLGNESGHGANHDALYRWLKTTDPTRPVQYEGGGANTAATDIVCPMYARVDWDQPFPAVPKWSIKKWIGMPDETRPLILCEYAHAMGNSFGGFAKYWQAFRSHPRLQGGFVWDWVDQALTKKDEKGNAFWAYGGDFGDTPNDRQFCLNGLVFPDRTPHPALYEAQRAQQFFTFTLVSTSPLMIEVQSGYLFRPTDNEVLSWTVARDGKVLASGEVTLAIAPEGVQRLEIALPELKAGPGEIWLNVEVRQPRATPWSPAGHRCAWEQWPLPAPLFIAPPASTGEPPVLTQNDRILEVTHRQQRWQFDRASGYLTQWWRNGVETLLSPVTDNVSRAPLDNDIGVSEATRIDPNAWVERWKAAGMYDLTSRMLHCEAEQHAREVVVTTLNVLEHRGRALFLSRKIWRLDEQGVLHGDIQVDIASDIPKPARIGLSVHLAETPEKVDWLGLGPHENYPDRKLAAQQGRWTLPLADMHTPYIFPTENGLRCDTRKLVLGAHQLNGAFHFSVGRYSQQQLRETTHHHLLREEPGGWLNLDAFHMGVGGDDSWSPSVSPEFILQTRQLRYTFSWQQNP

SEQ ID NO: 35835 - DNA, 3015 bp, Fusarium oxysporum f
  CDS (1)..(3015)
atggatctgtcggcgctaggtttccctggggcgttgcccgactggagtaacttgaacgtccttcatcgcaacacccttccagctcgagctcacttctactcctaccctgatcaagaatccgctctgtccttcaaccgcgagcaaagctacttccatagtctgaacggaacatggaaattccactacgacatcagtccactcgatgctcccatctgggaaacggccaacaccagctcatgggacgacattgaagtcccaggcatgtggcagctccaaggctacggccatcctcactacaccaatattgactaccccttctctgtcactcctcccaacgtctcatacgtcaatcccactggttcttactggagacagtttgaagtacctgaggagtgggacggtgatcagatcagactgcgcttcgagggcgttgatagtgcatttcacgtctgggtcaatggcgaagaggttggctacggtcaagggagtcgtaatccaagcgagtttgacattacggactacctctctccgggtcaagcgaatgatcttgctgtaagggtttatcagtggtcggatggttcttatatcgaggaccaggatcagtggtggctctccggtatctttcgcgacgtttatctcatccccttttccgaatcgtccatcatggactttcaggttgactctgaactcagcgactcttttgatgaagggtcttttaaagtcaatgtgaccattcaagggaaagagggtgaccttgatatcaacttgctctcgccaaatggatcggtcattgatgaatggaaaggatcatcttcagatatctatgagaagagcctttctggggatgatttccatatctggtccgctgaaacgccaaacttgtacaccttgctcatcaccttcaacggacggactatcagtcaaaaagttggtctgcgtcgcgttgagattcaagggtccaacttttacgtcaacggaaaacctatcattatatacggagtcaacagacatgagcaccaccatctcactggacgtacagtcagttacgaaaacatgcgaaaggaccttctactcatgaagcgttccaacattaacgcaattcgcactgcccatcagcctccccatcctgacttcttcgacgtggctgacgaactcggtttctacgtcatcgccgaatctgaccttgaatgccatggcttcggtagtattgaagaaacagaagaagaagctgctgagtggctctccaacaatccagattgggaagaggcttatgtcgatcgggctcgtcagctagttgagcgattcaagaaccatgcttctgtcatcatctggtctctcggcaatgagtgcttctatggtcgaaatcatgctgccatgagcaagtggatcaaagagagggacccaagtcggatcattcactacgagcaagaccgtaatgctacgtcgacggatatgtacagtcagatgtacagcacgcctgacgatgtaagggagttcatcaagactcatactgataagccaattgtgttgtgtgaatatgcccatgctatgggcaacggaccaggtggtctcgtagagtacatcgacctcttcagaaacgagcctttatctcaaggtggccttgtctgggagtggagcaatcacggactcctcaagaaggaagagaacattacatactacgcttacggaggtgactttggcgacgagcccaatgatggtgactttatcatggacggtcttgtcttatctgaccattcgccaatgccttcattgaaggagtacgccaagatcatccagcccgtatcggtgaaattggcgaagaatggaagtgcaatgactgttgtcaaccactatgacttttctgacttgagtcatctcgatgtttcgtggcatgttgtcgcagacggtcttaagactgaagctcgtccactcgaccttccaagagtacccgctggagagaataggaccgtggcacttccatcggggctgaatattacacagaatgaggcatgggtcacggtcgagttcaagctgaaggaagctactctctgggctccgaagggccatgtcattgcttgggaccaacttcacatccaacgccctgatatcaagacccggggcatatcggtagtccgtcgtcaagacagcggagagttccagaagaacggaaccaagctcctctataagagtggagatgcttcctttggatttgacttgcttcagggaaatgtcacctggaacatcaacggcgtggatatcttccaacgaggacccgagctctccttctatcgcgctctcacacaaaatgacgcggcatcttctggcgacggaccaatctgggaacaggaaaagatcccaatgatctacccccaagtcagagacgtgacctggcgcatagacgatgatggcgcagtggtgcattataaagtctgggttggagtcaagacacgtgcttggggcgttgaagcagacatgatctataagatccccactcaaggtgctcaccttcaactcgaagctcggggcgaatttgtcggcaagaatgagtctcatgtcattccccgcatcggtctcatggctgttttgcccgaagctttcgacgacgtctcatggttcggccgaggacctggagaaagctataaagactccaagcaagggtcccgcatcgggcagtacagttccaccgtcccggatctgttcacctactatgactaccctcaagagaacggaaacagagaagatttgcggtggttgaagatcggcaacaaacatgtcacacttgatgcgcgacggacgaaagacgcaccattcagctttaccgctcggagatacatgccctttgatttggatgacgctcagcacccgcacgacttgaagcctcttaacatgacggtactgcatcttgattacgacaacaatggactgggatcggctacggttagagtgagaccttttgagaagtacaggtgttacaccaagccattcaactttacctttgacttcaacatatcttag

SEQ ID NO: 35836 - protein, 1004 aa, Fusarium oxysporum f
MDLSALGFPGALPDWSNLNVLHRNTLPARAHFYSYPDQESALSFNREQSYFHSLNGTWKFHYDISPLDAPIWETANTSSWDDIEVPGMWQLQGYGHPHYTNIDYPFSVTPPNVSYVNPTGSYWRQFEVPEEWDGDQIRLRFEGVDSAFHVWVNGEEVGYGQGSRNPSEFDITDYLSPGQANDLAVRVYQWSDGSYIEDQDQWWLSGIFRDVYLIPFSESSIMDFQVDSELSDSFDEGSFKVNVTIQGKEGDLDINLLSPNGSVIDEWKGSSSDIYEKSLSGDDFHIWSAETPNLYTLLITFNGRTISQKVGLRRVEIQGSNFYVNGKPIIIYGVNRHEHHHLTGRTVSYENMRKDLLLMKRSNINAIRTAHQPPHPDFFDVADELGFYVIAESDLECHGFGSIEETEEEAAEWLSNNPDWEEAYVDRARQLVERFKNHASVIIWSLGNECFYGRNHAAMSKWIKERDPSRIIHYEQDRNATSTDMYSQMYSTPDDVREFIKTHTDKPIVLCEYAHAMGNGPGGLVEYIDLFRNEPLSQGGLVWEWSNHGLLKKEENITYYAYGGDFGDEPNDGDFIMDGLVLSDHSPMPSLKEYAKIIQPVSVKLAKNGSAMTVVNHYDFSDLSHLDVSWHVVADGLKTEARPLDLPRVPAGENRTVALPSGLNITQNEAWVTVEFKLKEATLWAPKGHVIAWDQLHIQRPDIKTRGISVVRRQDSGEFQKNGTKLLYKSGDASFGFDLLQGNVTWNINGVDIFQRGPELSFYRALTQNDAASSGDGPIWEQEKIPMIYPQVRDVTWRIDDDGAVVHYKVWVGVKTRAWGVEADMIYKIPTQGAHLQLEARGEFVGKNESHVIPRIGLMAVLPEAFDDVSWFGRGPGESYKDSKQGSRIGQYSSTVPDLFTYYDYPQENGNREDLRWLKIGNKHVTLDARRTKDAPFSFTARRYMPFDLDDAQHPHDLKPLNMTVLHLDYDNNGLGSATVRVRPFEKYRCYTKPFNFTFDFNIS

SEQ ID NO: 35837 - DNA, 3155 bp, Kluyveromyces marxianus
  CDS (18)..(3095)
atcgagaactgaaagatatgtcttgccttattcctgagaatttaaggaaccccaaaaaggttcacgaaaatagattgcctactagggcttactactatggtcaggatattttcgaatctctcaatgggccttgggcttttgcgttgtttgatgcacctcttgacgctccggatgctaagaatttagactgggaaacggcaaagaaatggagcaccatttctgtgccatcccattgggaacttcaggaagactggaagtacggtaaaccaatttacacgaacgtacagtaccctatcccaatcgacatcccaaatcctcccactgtaaatcctactggtgtttatgctagaacttttgaattagattcgaaatcgattgagtcgttcgagcacagattgagatttgagggtgtggacaattgttacgagctttatgttaatggtcaatatgtgggtttcaataaggggtcccgtaacggggctgaatttgatatccaaaagtacgtttctgagggcgaaaacttagtggtcgtcaaggttttcaagtggtccgattccacttatatcgaggaccaagatcaatggtggctctctggtatttacagagacgtttctttactaaaattgcctaagaaggcccatattgaagacgttagggtcactacaacttttgtggactctcagtatcaggatgcagagctttctgtgaaagttgatgtccagggttcttcttatgatcacatcaatttcacactttacgaacctgaagatggatctaaagtttacgatgcaagctctttgttgaacgaggagaatgggaacacgactttttcaactaaagaatttatttccttctccaccaaaaagaacgaagaaacagctttcaagatcaacgtcaaggccccagaacattggaccgcagaaaatcctactttgtacaagtaccagttggatttaattggatctgatggcagtgtgattcaatctattaagcaccatgttggtttcagacaagtggagttgaaggacggtaacattactgttaatggcaaagacattctctttagaggtgtcaacagacatgatcaccatccaaggttcggtagagctgtgccattagattttgttgttagggacttgattctaatgaagaagtttaacatcaatgctgttcgtaactcgcattatccaaaccatcctaaggtgtatgacctcttcgataagctgggcttctgggtcattgacgaggcagatcttgaaactcatggtgttcaagagccatttaatcgtcatacgaacttggaggctgaatatccagatactaaaaataaactctacgatgttaatgcccattacttatcagataatccagagtacgaggtcgcgtacttagacagagcttcccaacttgtcctaagagatgtcaatcatccttcgattattatctggtccttgggtaacgaagcttgttatggcagaaaccacaaagccatgtacaagttaattaaacaattggatcctaccagacttgtgcattatgagggtgacttgaacgctttgagtgcagatatctttagtttcatgtacccaacatttgaaattatggaaaggtggaggaagaaccacactgatgaaaatggtaagtttgaaaagcctttgatcttgtgtgagtacggccatgcaatgggtaacggtcctggctctttgaaagaatatcaagagttgttctacaaggagaagttttaccaaggtggctttatctgggaatgggcaaatcacggtattgaattcgaagatgttagtactgcagatggtaagttgcataaagcttatgcttatggtggtgactttaaggaagaggttcatgacggagtgttcatcatggatggtttgtgtaacagtgagcataatcctactccgggccttgtagagtataagaaggttattgaacccgttcatattaaaattgcgcacggatctgtaacaatcacaaataagcacgacttcattacgacagaccacttattgtttatcgacaaggacacgggaaagacaatcgacgttccatctttaaagccagaagaatctgttactattccttctgatacaacttatgttgttgccgtgttgaaagatgatgctggtgttctaaaggcaggtcatgaaattgcctggggccaagctgaacttccattgaaggtacccgattttgttacagagacagcagaaaaagctgcgaagatcaacgacggtaaacgttatgtctcagttgaatccagtggattgcattttatcttggacaaattgttgggtaaaattgaaagcctaaaggtcaagggtaaggaaatttccagcaagtttgagggttcttcaatcactttctggagacctccaacgaataatgatgaacctagggactttaagaactggaagaagtacaatattgatttaatgaagcaaaacatccatggagtgagtgtcgaaaaaggttctaatggttctctagctgtagtcacggttaactctcgtatatccccagttgtattttactatgggtttgagactgttcagaagtacacgatctttgctaacaaaataaacttgaacacttctatgaagcttactggcgaatatcagcctcctgatttcccaagagttgggtacgaattctggctaggagatagttatgaatcatttgaatggttaggtcgcgggcccggcgaatcatatccggataagaaggaatctcaaagattcggtctttacgattccaaagatgtagaggaattcgtatatgactatcctcaagaaaatggaaatcatacagatacccactttttgaacatcaaatttgaaggtgcaggaaaactatcgatcttccaaaaggagaagccatttaacttcaagatttcagacgaatacggggttgatgaagctgcccacgcttgtgacgttaaaagatacggcagacactatctaaggttggaccatgcaatccatggtgttggtagcgaagcatgcggacctgctgttctggaccagtacagattgaaagctcaagatttcaactttgagtttgatctcgcttttgaataagaattttatacttagataagtatgtacttacaggtatatttctatgagatactgatgtat

SEQ ID NO: 35838 - protein, 1025 aa, Kluyveromyces marxianus
MSCLIPENLRNPKKVHENRLPTRAYYYGQDIFESLNGPWAFALFDAPLDAPDAKNLDWETAKKWSTISVPSHWELQEDWKYGKPIYTNVQYPIPIDIPNPPTVNPTGVYARTFELDSKSIESFEHRLRFEGVDNCYELYVNGQYVGFNKGSRNGAEFDIQKYVSEGENLVVVKVFKWSDSTYIEDQDQWWLSGIYRDVSLLKLPKKAHIEDVRVTTTFVDSQYQDAELSVKVDVQGSSYDHINFTLYEPEDGSKVYDASSLLNEENGNTTFSTKEFISFSTKKNEETAFKINVKAPEHWTAENPTLYKYQLDLIGSDGSVIQSIKHHVGFRQVELKDGNITVNGKDILFRGVNRHDHHPRFGRAVPLDFVVRDLILMKKFNINAVRNSHYPNHPKVYDLFDKLGFWVIDEADLETHGVQEPFNRHTNLEAEYPDTKNKLYDVNAHYLSDNPEYEVAYLDRASQLVLRDVNHPSIIIWSLGNEACYGRNHKAMYKLIKQLDPTRLVHYEGDLNALSADIFSFMYPTFEIMERWRKNHTDENGKFEKPLILCEYGHAMGNGPGSLKEYQELFYKEKFYQGGFIWEWANHGIEFEDVSTADGKLHKAYAYGGDFKEEVHDGVFIMDGLCNSEHNPTPGLVEYKKVIEPVHIKIAHGSVTITNKHDFITTDHLLFIDKDTGKTIDVPSLKPEESVTIPSDTTYVVAVLKDDAGVLKAGHEIAWGQAELPLKVPDFVTETAEKAAKINDGKRYVSVESSGLHFILDKLLGKIESLKVKGKEISSKFEGSSITFWRPPTNNDEPRDFKNWKKYNIDLMKQNIHGVSVEKGSNGSLAVVTVNSRISPVVFYYGFETVQKYTIFANKINLNTSMKLTGEYQPPDFPRVGYEFWLGDSYESFEWLGRGPGESYPDKKESQRFGLYDSKDVEEFVYDYPQENGNHTDTHFLNIKFEGAGKLSIFQKEKPFNFKISDEYGVDEAAHACDVKRYGRHYLRLDHAIHGVGSEACGPAVLDQYRLKAQDFNFEFDLAFE

SEQ ID NO: 35839 - DNA, 4501 bp, Lactococcus lactis
  CDS (1149)..(4145): transl_table=11
aaagtcttcaaatcaaagctaaaagtgctgatggcaagcttcatcataccattactccgattgctcgaattcgagaggggaaatatgaattagatttagttttacgagataataatacaagtgaaatttatccagatggaatttttcatccacatccagctctacaccatatcaaaaaagaaaatattggcttgattgaagtgatgggacttgcaattttaccagccagattaaagacagaacttatggaagttgaaaaatatctcttgaatcaagaaaatgagatgtcagaaattcacaaaccatgggctgaagaattgaaagaaacagaatatttttcaaaagaaacagtgcatgaaacagttcaggcagcagttggagaagtatttgaacaggtattgaaagatgccggagtattcaaagataatgaggtaggacaaaaaggtttttatgaatttataaatttcgtaaataattaattttcataaatcaagagagttttaaaaaggagttgatgaaatgcttaaattagaaaactacaaacgagttcacacgggagaactctactttcctaacgatcaaaaattatggaaagagcaacaagaagctttagttttactggaaaagtttaatcaaacttcagtgactcagccagagcaacaaatggtacttctcaaagaaatgttttcagaaattggagaaaattgttttattcaaccccctttctatgctaattttggtggaaaaaatgtccattttgggacagggatttacgctaattttaatctaacattagttgatgatacagatatttttgtaggaaatcatgtcatgtttggaccaaatgttacgattgacacggcgacacattctgtctcgcctgacttacgtaaacgaggggctcaatataataaaaaagtttatattgaagaaaatgtttggctaggtgctggagtaattgttttacctggtgttagaattgggaaaaatagtgtgattggcgcagggagtcttgtaactaaagacattccagataatgtggttgcttttggaactccttgtagggttaaaagaaaaatcaatgattctgactttaaaacttatgatcatggaaaaaagattgatttagatgatttcatctgaaaggaatggctatgatgacaatgattgatgtgctagaacgtaaagattgggaaaatccaggggtttcaaattggaataggttgccaatgcatacacctatggattttttagaaaagcaatcactgaatggtctttggaattttgatcatttttctagaatttcagacgtacctaaaaattggttagaactgacggagagtcaagcggaaattgtcgtccctagtaattggcagatagaatttaaggataaaaacgatgttccaatttatacaaatgtgacttatcctattccaattcagcctccttatgtgccagaggctaacccagttggagcttatagtcgctattttgatatcacaaaagaatggctagaaggcggtcatgttcaccttacttttgaaggggttggatcagcttttcatttttggttgaatggggaatacggaggttattcagaagatagccgcttgcctgctgaattcgatatcaccaatcttgccaaagaaggtgaaaattgtttaaaagttctagtttttcgttggtcaaaaggcacctattttgaagatcaagatatgtggcgaatgtcagggatttttcgttcggtgaacttacagtggcttccagaaaattatttgttagacttttctataaaaacagatttagatgaagacttagattttgcaaatgtaaaacttcaagcatatgctaaaaaaatggatgatgcttgtttagaatttaagctttatgatgacgaacaattaattggagaatgtcatggttttgatgcagaaatcggagtagtcaatccaaaattatggtcagatgaaattccctatctttatcgtttagaattaactttaatggaccggagtggggcggtatttcacaaagaaacaaagaaaattggtattcgaaaaattgctattgaaaaaggacagctaaaaataaacggaaaggcacttcttgttcgtggagtgaataagcacgaatttactcctgagcatggttatgtcgtttctgaagaagtgatgattaaagacatcaaattgatgaaagaacataattttaatgcggtccgttgctctcattatcctaatgattcacgctggtatgaattgtgtgatgaatatggattgtatgttatggatgaagcaaatatcgaaacgcatggaatgactccgataaatcgtttgacaaatgatccgacttatttaccattaatgagtgaacgtgtcgcacgaatggttatgcgtgtccgtaatcatccatcaattattatttggtctcttggtaatgagtcaggttatggaagtaaccatcaagctttatatgattggtgtaaatcatttgattctagccgccctgttcattatgagggggagaatgacgcaagtagattagacccagatgccagtgatatcatttgtccgatgtatgctagagtagatggtccaagtattaatgcgccttattcattaaaaacctggatgggggtagctggagagaatagaccactaattctttgtgaatatgctcatgatatggggaattcattaggaggattcgggaagtactggcaagcttttcgagaaattgaccgattgcaaggtggattcatctgggactgggtggatcaaggtctattaaaagatggaaattatgcttatggaggtgactttggggataagccaaatgatcgtcagtttagccttataggtcttgtttttccaaatcgtcaagcaaaaccagctcttcgtgaagcaaaatattggcaacaatattatcagtttgaactggagaaaactccactaggtctagttttagcctttacagttacaaatgagtatctatttcgaagtactgacaatgaaaaattatgttaccaactgaccaatggcttagaagtattatgggaaaatgagcttatattgaatatgcctgctggaggggctatgagaatagacctgtctgaattgcctattgatggaacagatgatttatttttgaacattcaagttaaaacaattgagaaatgtaatcttcttgagtctgattttgaagttgctcatcaacaatttgttctacaagaaaaaattaattttactgacagaatagatagtagtgaagagattacacttttggaggatgaagagctactgaccgtacgatcagcaaaacagaaatttatttttaataaaagcaatggtaatctctcgcgctggcttgatgagaaaggcaatgaaaagttactgcatgagctctcagaccaatttacaagggctccattagataatgatattggtgttagtgaagttgaacatattgatcctaatgcttggttagaacgttggaaggctgttggcttttatgagttaaaaacgcttttgaaaaatatgataatacaagcaacagagaatgaagtaattatttctgtccaaccagactatgaagcaaaaggaaaaattgcattttcaaccattcgagaatatcatatttttagaaacggtgaacttcttttaaaagttgattttaaaagaaatatagagtttccagaaccagctcgaattggcttgagtcttcaactagctgaaaaagcagaaaatgttacatattttggacttggcccagatgaaaattatcctgaccgaagaggggcaagtttatttggccagtggaatttaaggattactgatatgacaaccccttatatttttcctagtgaaaatgggttgaggatggaaaccagagagttaaattatggtcgtttaaaagttcgggcaatgggccaatcttttgcttttaatctaagtccgtatagtcaaaaccagcttgctaaaaaaggacattggcatctacttgaagaagaagcaggaacatggttaaatattgacggattccatatgggtgtaggtggagatgattcatggagtcctagtgtcgctcaggaatatttattgacaaaggggaattatcattatgaaattagttttaaattaacgtgatgataaaaattttcaagaatttgatataatatatagaaaatggaggttcttatgacggttttagttcttggtggagcaggatatgtgggaagccatgcggtagatatgcttcttaaacgtggttacgatgtggcagtggtggataatttactgacaggccaccgtgaatctgttccagcaaatgtacgcttttacgagggtgatgtgcgtgatcatgctttcttagctagtgtttttgaaaaagaaaatattgaaggaatcatgcacttctgtgcttactctttagtgggtgagtcaatgcaaaaacctttaatgtattttaataataatgtcggtggtgctcaagtaattctaga

SEQ ID NO: 35840 - protein, 998 aa, Lactococcus lactis
MAMMTMIDVLERKDWENPGVSNWNRLPMHTPMDFLEKQSLNGLWNFDHFSRISDVPKNWLELTESQAEIVVPSNWQIEFKDKNDVPIYTNVTYPIPIQPPYVPEANPVGAYSRYFDITKEWLEGGHVHLTFEGVGSAFHFWLNGEYGGYSEDSRLPAEFDITNLAKEGENCLKVLVFRWSKGTYFEDQDMWRMSGIFRSVNLQWLPENYLLDFSIKTDLDEDLDFANVKLQAYAKKMDDACLEFKLYDDEQLIGECHGFDAEIGVVNPKLWSDEIPYLYRLELTLMDRSGAVFHKETKKIGIRKIAIEKGQLKINGKALLVRGVNKHEFTPEHGYVVSEEVMIKDIKLMKEHNFNAVRCSHYPNDSRWYELCDEYGLYVMDEANIETHGMTPINRLTNDPTYLPLMSERVARMVMRVRNHPSIIIWSLGNESGYGSNHQALYDWCKSFDSSRPVHYEGENDASRLDPDASDIICPMYARVDGPSINAPYSLKTWMGVAGENRPLILCEYAHDMGNSLGGFGKYWQAFREIDRLQGGFIWDWVDQGLLKDGNYAYGGDFGDKPNDRQFSLIGLVFPNRQAKPALREAKYWQQYYQFELEKTPLGLVLAFTVTNEYLFRSTDNEKLCYQLTNGLEVLWENELILNMPAGGAMRIDLSELPIDGTDDLFLNIQVKTIEKCNLLESDFEVAHQQFVLQEKINFTDRIDSSEEITLLEDEELLTVRSAKQKFIFNKSNGNLSRWLDEKGNEKLLHELSDQFTRAPLDNDIGVSEVEHIDPNAWLERWKAVGFYELKTLLKNMIIQATENEVIISVQPDYEAKGKIAFSTIREYHIFRNGELLLKVDFKRNIEFPEPARIGLSLQLAEKAENVTYFGLGPDENYPDRRGASLFGQWNLRITDMTTPYIFPSENGLRMETRELNYGRLKVRAMGQSFAFNLSPYSQNQLAKKGHWHLLEEEAGTWLNIDGFHMGVGGDDSWSPSVAQEYLLTKGNYHYEISFKLT

SEQ ID NO: 35841 - DNA, 6066 bp, Vibrio vulnificus
  CDS (822)..(3917): transl_table=11
agtgttcgccaagcggttcacttggtatagacccgctttaatgttggtgagtgtgtggcgcgttttaaccacatcatgcatatccagcatcagctcggttgtcaggcgaaggcccgcgatcgcatcttcgctttgaatcacgatggaaccttggccgtgttcaacatgggagatgacaaacacgggtgcccaatcttgtccttcacgatgcccttccacaccggggctactgaacacaccgcggccaagctcaggatggagtgtcatcgcaacatcagtatcaaggcgaccatatggcaccggacgatgcagtgcaacgcgagcgctttcaagctccccctgaaccttgtttccccagtgcagaatctccgcgtattcgccgagctcgaccattaactgagtttcccgaccgcttaactcaaccactgttttgttcgtcatcatgcttacctaaaaacgagaaattacgccgcatcataatgaaacggacaaaataatctgtgagccacagcaaaatcatgaaaacgtttccagatttattcaaaactcagtgccgtagctgccgataaaaccaagacccacaatcttttccaacctttgaagcgctagctctcatcaccatacctgacggcaaaacaacgatcattctcacattgctatggatttatcgtgtgcgagtggaaaaatgccacacacatcatgaaaacgtttccaaaatttcattacactctgcctcagttaggaacttgttacttgcttgtgctgctctaaaacacgctgacttatccgcccgcaggtaacatcaatcataaaggcaccacatgactgcattttcagaaattctccaacgacgcgactgggaaaacccgcaatccgtgaacattcactgcctaaaggcacatagcccactcgccagttttcgcgatatggcccatgctcgcgatggtattcacgcccagcgtcaatcactaaatggacaatggaaattcaaactgtttgatgcaccagagcaggtggatggccagttcacgcaggccgatttcaatgacgcggaatgggatgagatccccgtgccgtctaactggcaactgcacggttacgacaaacccatttacgccaatattaaatacccatttgacgtaaacccgccgtttgtaccaagtgataacccaaccggttgctaccgcactagggtatcgttctcaccagaagagttggccaacacgcaacgcattatctttgatggtgtgaattcggctttccatctttggtgtaacggcacttgggttggctacagccaagacagccgtttgcctgccgagtttgatctcacatcgcatctcgtggcaggggaaaatacgctcgcggtcatggtgatgcgttggtgtgatggcagctacctagaagaccaagacatgtggtggctaagcggtatcttccgtgacgtgacattgctgtcgaaaccacagcactgcattgaagatgtgttcatcacgccggatctcgacgcctgctatcgcgacggctcgctctccatcgtcaccaccattgcagcgccagaaacctatcaagtacaggttcaattgtttgagggtacacaagcggtcactgagccaaacatcgctcgcccacacaaccgtcgcatcgacgagcgtggtacttggaatgatgtggtattccaaaccctgcacctacgcgagccaaagaaatggacggcggaaacaccgaacctctaccgcttagttgtttcactgttggatgaaaacggcacgcatctcgagagcgaagcgtaccctgtgggctttcgtaaagtggaaatcagcgagggtcaattgaagctcaacggcaagccgctgctgatccgcggggtcaatcgccacgagcatcatccagagctgggccatgtgatgaccgaagaggatatgatccgcgacatctgcctgatgaaacaatacaacttcaacgcggtgcgcaccgctcactatccaaaccatccgcgttggtacgaactgtgtgaccaatacggcttgtacgtgtgtgatgaagcaaacattgaaacacacggcatgcagccaatgagtcgcttatcgagcgatccgcaatgggcgcacgcgtacatgagtcgctatacccaaatggtactgcgcgataagaaccatccatcgatcatcatctggtctttaggtaatgaatcgggccacggcagcaaccacaatgcgatgtacgcttggtcgaaaaactttgatccgtcacgccctgtgcaatacgaaggcggcggttcaaacaccacggcaaccgacatcattgcgccgatgtacgctcgcgtaaataccctagttgccgatgaagcggtaccaaaatggccaatcaaaaaatggatttctctacccaacgaaacgcgcccattgatcttgtgcgaatacgcccatgcgatgggcaatagcctaggcagttttgatgaatactgggcggcatttcgcgagttcccacgcctacaaggcggctttatttgggattgggttgaccaaggcttgagccaatgggatgaaaacggccagcacttctgggcttacggcggcgattttggtgatgaaatcaatgaccgccagttctgcattaacggcttgatcttccccgatcgcaccgtgcatccaacgttgcaagaagccaaatattgccagcgcatgatcaccgtctcgctgcaagagcaaacccaaaaagcgtgcacactgttggtgaccaacgagaacctgttccgtaccactgataacgagcaattgaactggtcactgttagaaaatggccaagtcatccaaacgggttcacaggtgcttagcgtagaggctgacagccaaacacgccttgaaattgcgctgaatttcacgccaaaagcgcaggcgcaataccacttaaataccgacatttgccttattgaagcgacgtcatgggctcccgctggccatgtggtggcgacagagcaaatggcgctgcgcaatcacgcaggccttgccatgccaaccttgcgcacacagcctgcacccaagctgacccaaaacggccacgccattgtggtcagcagtctggatgaaaagcatcaatggcgctgggatagccaaagcggtttgctgatggaatggaacgtggatggcaaagcgcaaatgctggccgcgccgcaagacaacttcttccgcgcgccgctggataacgacatcggcatcagtgaagtggataacgttgaccccaacgcttgggtatgccgttgggagatggcgggcattggccagtgggaacgtcattgcgtccagtgcgagagcgaaacgctcgctcacgccgtggtcgtaaccaccacgtttgcctaccactttggcggcgacgtgcaagccattacccagtggacgcacacactcagcaacgatggcgaaatgctattggatgtcgacgtcacactggcagacgctctgccgccgatgccgcgtattggcttggagttgcaacttccgcttcaccaaaccgacacgccgatcacatggcaaggcttaggcccatttgaaaactacccagatcgcttagccgcagcacgttttggcttacatactcaaacactagcgcagatgcacacaccgtacatcttcccaaccgacagcggcctgcgttgtggcacgcagtggttgcaagtgaacgagttggccatctcgggtgacttccagttcagtgttagccaatacgctcagcaacaattggcagaagcgaaacatacccatgatttgctagcgcaagagcggatttacctgcgtctagatcaccagcacatgggggttggcggtgacgattcttggagcccaagtgtgcacaaagaattccaattaacggagaaacactaccgctaccagttgcgatttaagcctgcttcacgctagcgtttgctcgcctctaggctttctcactaggctttccctctaggccaaacccaataagccaagcctttgattttgcgtctaaggcttggttttgtcgttttagtgcgtattttttgcactcgatcattacctttctgaccaacgtttacacgcaagataaaaaaccacactcaaatcacaaaacccttacaaacattaacattcaattacaaatctggtgaaatttttatctagttcacattaattgattcgtttgtcactatactcaaagggtaaacgttttcaccaattataaaattaattgcagataacgaattacccctacagcaaaccaataacaaacaatcaggatttttctatgagaaaggttactctacttgctctgctcactgctggtgtaggctttggaacacaagctctagcggataccacccttggatttactatctacaagtacgacgacaacttcatgtcggttgtgcgccaagcgattgaaaaagaagcggcatcagacaaaagcactcgcattctgatgaacgattcgcaaaacagccaatcgatgcaaaacgaccaagtggacgtcatgttggctcgtggtgtgcaagcgctggccattaacctggttgaccctgcggctgcgccaaccatcatccaaaaagcgaaaatggacgatgtgcctatcgtgttctacaacaaagaaccaagcccacaagcgctcgcgagctacgacaaagcgtactacgtcggtaccgactcaaaagaatcgggcatcattcagggtgatctcatcgcgcaagcgtggaaagccaacccagcatgggacaaaaacggcgatggcgtactgcaatacgtaatgctaaaaggcgaacctggccacccagatgcggaagcacgcaccacgtattctgtgcaaaccatcaatgaaaacggcatcaaaaccgaagagttgcacatggataccggcatgtgggataccgcgatggcgaaagacaaaatggacgcttggctctctggccctaacggcagcaaaatcgaagtggtgattgccaacaacgacggcatggcaatgggcgcggtagaagcactacgcggcgcgggcgtgaaactgcctgtgtacggtgttgatgccctagctgaagccttggcgctggtcaaatctggcgacatggcgggtaccgtactcaacgatgcggaatcccaagcgaaagcgacctttgaactgtcacgcaacctcgccgatggcaaacagcctgctgaaggcactcgctggcaagtcgtgaacaaaattgttcgcgtgccttatgttggcgttgataaagataccttgaactaatttagtgcccgggggagcatgctccccctatgcgctttcttcattgtcacactgtcgttagagaacatttctgttgtccgcccattgacgaaataaagagagaccatggtaaatcaaacacatgaattcctgttggagatgacaggagtaagtaaagagtttcctggggtaaaggcattagataaggttaatttaaacgttcgccctcattctattcatgcattaatgggagaaaatggggctggcaaatcaacactattaaaatgtctatttggtatttacgagaagaatgaaggaaatattctctttctcggtaaggaagtgaatttcacctcatcaaaagaagcattggaatccggtgtttctatggttcaccaagaattgaaccaagtaaaacaatgctccgtcatggataatatttggctcggtcgttatccaaagaaagggttctttgttgatcacgataaaatgtatcgcgataccaaagcaatctttgccgaattggatatcgatatcgatcctaaagtcaaagtcgcgaccttatccgtgtcacagatgcagatggttgagatcgccaaagcgttctcctatgacgccaaaatcgtcatcatggatgaacccacctcatcgctgacggaaaaagaagtcagccacctgtttaccatcatcaacaagctgaaagagaaaggctgtggtgtggtgtacatctcgcacaagatggaagaaatctttgctatctgcgatgaaatcaccattttgcgcgatggacaatgggtcgacactcgccctctcaaagggctcgatatggaccagatc

SEQ ID NO: 35842 - protein, 1031 aa, Vibrio vulnificus
MTAFSEILQRRDWENPQSVNIHCLKAHSPLASFRDMAHARDGIHAQRQSLNGQWKFKLFDAPEQVDGQFTQADFNDAEWDEIPVPSNWQLHGYDKPIYANIKYPFDVNPPFVPSDNPTGCYRTRVSFSPEELANTQRIIFDGVNSAFHLWCNGTWVGYSQDSRLPAEFDLTSHLVAGENTLAVMVMRWCDGSYLEDQDMWWLSGIFRDVTLLSKPQHCIEDVFITPDLDACYRDGSLSIVTTIAAPETYQVQVQLFEGTQAVTEPNIARPHNRRIDERGTWNDVVFQTLHLREPKKWTAETPNLYRLVVSLLDENGTHLESEAYPVGFRKVEISEGQLKLNGKPLLIRGVNRHEHHPELGHVMTEEDMIRDICLMKQYNFNAVRTAHYPNHPRWYELCDQYGLYVCDEANIETHGMQPMSRLSSDPQWAHAYMSRYTQMVLRDKNHPSIIIWSLGNESGHGSNHNAMYAWSKNFDPSRPVQYEGGGSNTTATDIIAPMYARVNTLVADEAVPKWPIKKWISLPNETRPLILCEYAHAMGNSLGSFDEYWAAFREFPRLQGGFIWDWVDQGLSQWDENGQHFWAYGGDFGDEINDRQFCINGLIFPDRTVHPTLQEAKYCQRMITVSLQEQTQKACTLLVTNENLFRTTDNEQLNWSLLENGQVIQTGSQVLSVEADSQTRLEIALNFTPKAQAQYHLNTDICLIEATSWAPAGHVVATEQMALRNHAGLAMPTLRTQPAPKLTQNGHAIVVSSLDEKHQWRWDSQSGLLMEWNVDGKAQMLAAPQDNFFRAPLDNDIGISEVDNVDPNAWVCRWEMAGIGQWERHCVQCESETLAHAVVVTTTFAYHFGGDVQAITQWTHTLSNDGEMLLDVDVTLADALPPMPRIGLELQLPLHQTDTPITWQGLGPFENYPDRLAAARFGLHTQTLAQMHTPYIFPTDSGLRCGTQWLQVNELAISGDFQFSVSQYAQQQLAEAKHTHDLLAQERIYLRLDHQHMGVGGDDSWSPSVHKEFQLTEKHYRYQLRFKPASR

SEQ ID NO: 35843 - DNA, 3228 bp, Arabidopsis thaliana
  CDS (1)..(3228)
atggtttcgttagcgacccaaatgattcttccatctgaaaatgggtatagagtttgggaggatcagacccttttcaaatggcgtaagagagatcctcatgtcaccttgcgttgccatgaatccgtccaaggggctttgaggtactggtatcagcggaacaacgtggatctcaccgtatcaaaatctgctgtttggaatgatgatgctgttcaagctgctcttgatagcgctgctttttgggttgacggcttgccctttgttaagtctttatctggttactggaagtttttcttggctcctaaacctgctaatgttcctgacaaattttatgatgctgccttttctgattcagactggaatgctttacaggttccttccaactggcagtgtcatggatttgatcggcctatctatacgaatgtggtgtaccctttcccgaatgatcctccttatgttcctgaggataatcctactggttgctacagaacctacttccagattcccaaagaatggaaggacagaagaatacttcttcactttgaagctgtagactccgcattctttgcttggataaatggcaaccctgttgggtacagatggagtgatggttcataccttgaagaccaagatcattggtggttgtctggtattcatcgagatgtgcttttgttagcaaagcccaaggtcttcattgctgactactttttcaagtcaaaattggcagatgacttttcatacgcagacatccaggttgaagtgaagattgacaatatgcaggagtcctcaaaggatcttgttctttctaacttcatcatagaggctgccatatttgatacaaaaaattggtacaactctgaaggatttagttgtgaactttctcccaaggtggctaatttgaagcttaatccttctccaagcccaactcttggatttcatggttacttgcttgagggaaaactggattcgccaaatctctggtcagctgaacaaccaaatgtttacatcctcgttttaactctaaaagatacatctgggaaagtccttgattctgaatcaagcattgtgggcattcggcaagtatcaaaggcctttaaacagcttcttgttaatgggcacccagtcgtgataaaaggtgtaaacaggcatgagcaccatccacgtgttgggaagacgaatatagaggcatgcatggtcaaggatttaattatgatgaaagaatataatatcaatgcggtgcgaaacagtcattatcctcaacatccccgctggtatgaattatgtgatttgttcggcatgtacatgatcgatgaagccaatatagagacacatggttttgatctctctgggcatctgaagcaccctgcaaaagagccaagctgggcagctgctatgctggatcgagtagttgggatggttgaaagagacaaaaaccatacatgcataatttcttggtcacttggaaatgaggctggctatgggcccaatcattctgccatggcaggttggattagggaaaaggacccctcacggttggtgcactatgaaggtggtggttccagaacaagttctacagatatagtctgccctatgtacatgcgggtttgggacatcatcaagattgcacttgatcaaaatgaatcacggccgttgatattatgcgagtatcaacatgctatgggtaacagcaacgggaatatagatgagtactgggaggcaattgacaatacctttggcctgcaaggaggtttcatatgggactgggttgaccaggggctattgaaactggggtcagatggcattaagcgttgggcatatggaggggactttggtgaccagcctaatgatttgaacttctgtctcaatgggcttatatggcctgaccgaactcctcatccagcactccatgaggttaagcattgttaccaaccaatcaaggtttcattgacggatggcatgataaaggttgcaaacacttactttttcaacacaacagaagaattggagtttagctggacaattcatggggatggtcttgaacttggatctgggactctctctattcctgtgataaagccacaaaatagttttgagatggagtggaagtcaggtccatggttttctttctggaatgactcaaatgctggagaattgtttctgacaataaatgccaagcttttaaatcttactcgttcgcttgaagccggtcatcttttgtcttcaacgcagattcctttaccagcaaagggacaaataataccgcaggcgataaaaaagacagacactagtatcacttgtgaaactgttggagatttcattaagatcagccagaaagattcatgggagctaatggtaaatgtccgaaaagggactattgaaggttggaagattcaaggagttctccttatgaacgaagctatactgccatgcttttggcgagcacctacagacaatgataaaggtggaggtgactctagttatttttcgaggtggaaagcggcacagttagataatgtggagttccttgttgaaagctgttcagtaaagagcatcactgataaatccgtagagatagagttcatttaccttggttcttcagcttctggctcttcaaagtcagatgccttattcaaagtcaatgtgacatatctgatctatggttccggagatatcatcaccaattggtttgtagaaccaaactctgatcttccaccgctaccacgtgtaggtatagaattccacattgaaaaaacactggaccgtgtagaatggtatggcaaaggtccatttgagtgttacccagaccgaaaagcagcagcccatgtggcgatatatgaacacaatgttggagacatgcatgtcccttatattgttccaggagaaaatggaggtagaacagatgttaggtgggtaacattccgaaacaaagatggtgtaggaatatatgcttcaacatatggtagctcttctctaatgcaaatgaatgctagttattatacaaccggtgagcttcaccgtgcaacgcatgaagaggatcttatcaaaggacaaaacatcgaggtgcatctggaccacaaacacatgggtcttgggggagatgatagctggactccatgtgttcacgataagtttctgattccgcctgcacagtattcgttttctctcaggctatgcccaattactgcatccacctcgggtttgaacatctacaaggatcaactcccctgctag

SEQ ID NO: 35844 - protein, 1075 aa, Arabidopsis thaliana
MVSLATQMILPSENGYRVWEDQTLFKWRKRDPHVTLRCHESVQGALRYWYQRNNVDLTVSKSAVWNDDAVQAALDSAAFWVDGLPFVKSLSGYWKFFLAPKPANVPDKFYDAAFSDSDWNALQVPSNWQCHGFDRPIYTNVVYPFPNDPPYVPEDNPTGCYRTYFQIPKEWKDRRILLHFEAVDSAFFAWINGNPVGYRWSDGSYLEDQDHWWLSGIHRDVLLLAKPKVFIADYFFKSKLADDFSYADIQVEVKIDNMQESSKDLVLSNFIIEAAIFDTKNWYNSEGFSCELSPKVANLKLNPSPSPTLGFHGYLLEGKLDSPNLWSAEQPNVYILVLTLKDTSGKVLDSESSIVGIRQVSKAFKQLLVNGHPVVIKGVNRHEHHPRVGKTNIEACMVKDLIMMKEYNINAVRNSHYPQHPRWYELCDLFGMYMIDEANIETHGFDLSGHLKHPAKEPSWAAAMLDRVVGMVERDKNHTCIISWSLGNEAGYGPNHSAMAGWIREKDPSRLVHYEGGGSRTSSTDIVCPMYMRVWDIIKIALDQNESRPLILCEYQHAMGNSNGNIDEYWEAIDNTFGLQGGFIWDWVDQGLLKLGSDGIKRWAYGGDFGDQPNDLNFCLNGLIWPDRTPHPALHEVKHCYQPIKVSLTDGMIKVANTYFFNTTEELEFSWTIHGDGLELGSGTLSIPVIKPQNSFEMEWKSGPWFSFWNDSNAGELFLTINAKLLNLTRSLEAGHLLSSTQIPLPAKGQIIPQAIKKTDTSITCETVGDFIKISQKDSWELMVNVRKGTIEGWKIQGVLLMNEAILPCFWRAPTDNDKGGGDSSYFSRWKAAQLDNVEFLVESCSVKSITDKSVEIEFIYLGSSASGSSKSDALFKVNVTYLIYGSGDIITNWFVEPNSDLPPLPRVGIEFHIEKTLDRVEWYGKGPFECYPDRKAAAHVAIYEHNVGDMHVPYIVPGENGGRTDVRWVTFRNKDGVGIYASTYGSSSLMQMNASYYTTGELHRATHEEDLIKGQNIEVHLDHKHMGLGGDDSWTPCVHDKFLIPPAQYSFSLRLCPITASTSGLNIYKDQLPC

SEQ ID NO: 35845 - DNA, 4092 bp, Psychromonas marina
  CDS (612)..(3707): transl_table=11
ctgcagaaataatggccactggaatggttgggtattgattacgcaatgctaataaccctttcaaccctgacatgccgggcatattgaggtccaatagaatcagatccagctcctcattgtctgccacaaaggcaagcatcgattcgatatcttcagtttgcgcgatgcttgaaccattaaagtgagtggtaataatattagcgatcgcatctctgaacaaagggtggtcatctgcaactaaaagattatacataagcggccctcagtgtaatggaaacaatcgcttgctcagcgtttattaaagtgaataaatagatgcgactagattactgtaaaaactgcgtcaccattttaaaattattagagaagttagacgtaaaaaacaaaagttgtttaatttgatagctatcttttgaagttcacccgattgaaagtgcatttttttactttcaatcctttttaaatgaaagaagcataacctagctctaattattcgatttttattaaaatagataccagtgtaatcgtttacatgatgtttgggcggtgtacactttgtcactaaggttaaagctctactcactaaatagtctattagcgcgaggaataaaatgagaacatttccggaaataataaacgcccgcgattgggaaaatcagcatgtgactcatcagcatgttttagaagcacacgcacctttgcatgcctttcattcccaacaagctgcgctgcttaatcaggcctctgaatttcaacacactttaaatggtcagtggcgttttcaattatttactaaaccggaagtggttccctgtgacagtattgaggttgattttgatgacagtgagtggcccaatattactgtaccaagtaattggcagttacaggggtacgataaacccatctataccaatgtaaaatacccctttgaagataatcccccgtttgttcccgctgataatccaaccggcatttaccgattaaactttgatcttcccgatacttggcaagggcgtaagcaaacaatcacttttgatggtgtgaattcagcctttcatctttggtgtaatggtgtttggattggctattctcaggacagtcgtttacccgctgaatttgacttaagtgaacagttacaggctggcaacaatcaactaacggtgatggtgctgcgttggtctgatggttcctatcttgaagatcaagatatgtggtggttgagtggtatttttagagatgtcacgctgcgcagtaaacctattatctcactgcgagatattgccatcagtaccgatttagatgcctgttttaatcatgctcagcttaatatggtgacttatctaagtgaaattagtagcgactttcgagcacaagtacagttgtttgatgcgcagggtttaccagtaacagagcccatttgtgcagcctttggtgagcgtatttttgatgagaaaggtggagcacaggatagggctgagcataaaatagcaattatttcgccacacaaatggagtgctgagtcaccctatctatatcgtgcggttatttcgctactcaacagcgatcaagaggtggttgatagagaagcctacgacgtaggtttccgtgttgttgaaattagtgatggtcagcttaaagtaaatggatgcccgctattgatacgaggggttaaccgtcatgagcaccatcctgagaaaggacatgccgttaacgacgacgatatgttaatggatattaagctacttaaacaaaataactttaatgcggtgcgaaccgcacattaccctaatcatcctcgttggtatgagctctgcgaccaatatggattgtatgtcgttgatgaagcgaaccttgaaacgcatgggcaatttcccatgtcgcgcttatccaatgataacagttggttgagtgcctatatgcgtcgtatgacacgcatggtagagcgtgataaaaatcatgcctcgatcattatctggtccctaggtaatgagtctggcattggacataatcatcatgcgatgtatcaatggactaagctcaaagatccaactcgcccggtacaatatgagggaggtggggctgacaccgcggcaaccgatattattgtgccgatgtatgcacgtgttgatgaggatcagttactgcctaatgcacctgatgtggtacctaaaatagcgataaaaaaatggttgtctatgcctaatgaacagcgacctttaatcctgtgtgaatatgcacatgcaatgggtaatagcttgggcagctttgataagtattggcaagcattccgcgactacccgcgtttacagggcgggtttatttgggactgggttgaccaaggcttaaccaaaacagataaaaatggggttgattattggggctatggtggcgattttggcgatcaaatcaacgatcgacagttctgtattaatggtttagttttccccgatagaagcttacatccaggtatttatgaggtgaaaaaagcccagcaattttatcaatttagccttattgaagcggatgccgtcacgattaaagtcgacagtgaacagctgtttattgacagttcagatgaaaacctacgttggacgattactgagaatggcgaggttatggtgagtggtgaagtcgagttagatattgcccctcaatgttcgcaactgcttacgctgctcgaaaatcatcctgatcaaaaagtcggttgtgattattttcttaatatcgaggtagttttaaataaagataaaccttgggcagagaaaggttttgttgttgcaactgagcagtttgttttgccatccatcccacaattagcgcgattaacgccagttgtctcagatgcgccttgtgtgagtgaaagtgaaaacacgctaaccattagtggtgataacttcactgtgaaaatggataagcagcagggcgtaattactgattggttagtggcgggagaaaagaggctattagctgggcctaaagataactttttccgcgcacctttagataatgatattggcaccagtgaagcgaattgtgttgatcccaaggcatgggtttcacgctggcaaagcgctggaataaacgacctagtatgtcgttgcctgagtatagaagcggttaccttaaagcatcaggtattgataaatgtagagtttggccactattcagcggacaagttaattattgcaacgcactggcaatacaaaatcgatcatcatggaaaagtgagcatcgcggtgaatgttgatgtggctaagtcgttgccacctctgccacgtatcggcatggaattgattttaccgaaaacggataaacccgtctcttggtttggtcgaggaccccacgaaaattatcctgatagaacgctgtcagcacacattgggcgttatagttgtcctgttgaagcgctgcacacggattatattttcccctctgaaaacggattacgttgcgatgtgaaagaagcgcaagtggggcctttaatggtaacaggtgattttcatttagccgttagtcgttaccagcaagcaaatattgcacaggcaaaacacaccaatgaactgattgatgagcaacaactttatctgcgtttagatggttttcatatgggagtcgggggagatgattcttggagtccaagtgtgcatcaggagtttctgttaactaaacagcattaccattaccatgtggtactttcatttacttgatagataatataaaaagccaagcttattgataagcttggcttttttagcttgtgctgcgattcgttaagcgctcatttgattgcaatagagttaagttagttatttgctttacaagcggagtctctcagtacaatggtgggtgagaaatttaactgttgtgtctcaacggtttcattattagcccgttttaaagccaagatagctgccttttctgccatcaactctatcgggtaattgaccgttgttaggcgtggataaagataacgtgcaattaaaccattatcaaaacctacgattgaaagttgtttaggtacttggatccctttctcctgcgcaaccgaaagtgcacctgctgccatgtaatcgttgtaagcgagaactgcag

SEQ ID NO: 35846 - protein, 1031 aa, Psychromonas marina
MRTFPEIINARDWENQHVTHQHVLEAHAPLHAFHSQQAALLNQASEFQHTLNGQWRFQLFTKPEVVPCDSIEVDFDDSEWPNITVPSNWQLQGYDKPIYTNVKYPFEDNPPFVPADNPTGIYRLNFDLPDTWQGRKQTITFDGVNSAFHLWCNGVWIGYSQDSRLPAEFDLSEQLQAGNNQLTVMVLRWSDGSYLEDQDMWWLSGIFRDVTLRSKPIISLRDIAISTDLDACFNHAQLNMVTYLSEISSDFRAQVQLFDAQGLPVTEPICAAFGERIFDEKGGAQDRAEHKIAIISPHKWSAESPYLYRAVISLLNSDQEVVDREAYDVGFRVVEISDGQLKVNGCPLLIRGVNRHEHHPEKGHAVNDDDMLMDIKLLKQNNFNAVRTAHYPNHPRWYELCDQYGLYVVDEANLETHGQFPMSRLSNDNSWLSAYMRRMTRMVERDKNHASIIIWSLGNESGIGHNHHAMYQWTKLKDPTRPVQYEGGGADTAATDIIVPMYARVDEDQLLPNAPDVVPKIAIKKWLSMPNEQRPLILCEYAHAMGNSLGSFDKYWQAFRDYPRLQGGFIWDWVDQGLTKTDKNGVDYWGYGGDFGDQINDRQFCINGLVFPDRSLHPGIYEVKKAQQFYQFSLIEADAVTIKVDSEQLFIDSSDENLRWTITENGEVMVSGEVELDIAPQCSQLLTLLENHPDQKVGCDYFLNIEVVLNKDKPWAEKGFVVATEQFVLPSIPQLARLTPVVSDAPCVSESENTLTISGDNFTVKMDKQQGVITDWLVAGEKRLLAGPKDNFFRAPLDNDIGTSEANCVDPKAWVSRWQSAGINDLVCRCLSIEAVTLKHQVLINVEFGHYSADKLIIATHWQYKIDHHGKVSIAVNVDVAKSLPPLPRIGMELILPKTDKPVSWFGRGPHENYPDRTLSAHIGRYSCPVEALHTDYIFPSENGLRCDVKEAQVGPLMVTGDFHLAVSRYQQANIAQAKHTNELIDEQQLYLRLDGFHMGVGGDDSWSPSVHQEFLLTKQHYHYHVVLSFT

SEQ ID NO: 35847 - DNA, 3093 bp, Escherichia coli
  CDS (1)..(3093): transl_table=11
atgaatcgctgggaaaacattcagctcacccacgaaaaccgacttgcgccgcgtgcgtactttttttcatatgattctgttgcgcaagcgcgtacctttgcccgcgaaaccagcagcctgtttctgcccttaagcggtcagtggaatttccacttttttgaccatccgctgcaagtaccagaagccttcacctctgagttaatggctgactgggggcatattaccgtccccgccatgtggcaaatggaaggtcacggcaaactgcaatataccgacgaaggttttccgttccccatcgatgtgccgtttgtccccagcgataacccaaccggtgcctatcaacgtattttcaccctcagcgacggctggcagggtaaacagacgctgattaaatttgacggcgtcgaaacctattttgaagtctatgttaacggtcagtatgtgggtttcagcaagggcagtcgcctgaccgcagagtttgacatcagcgcgatggttaaaaccggcgacaacctgttgtgtgtgcgcgtgatgcagtgggcggactctacctacgtggaagaccaggatatgtggtggtcagcggggatcttccgcgatgtttatctggtcggaaaacacctaacgcatattaacgatttcactgtgcgtaccgactttgacgaagcctattgcgatgccacgctttcctgcgaagtggtgctggaaaatctcgccgcctcccctgtcgtcacgacgctggaatataccctgtttgatggcgaacgcgtggtgcacagcagcgccattgatcatttggcaattgaaaaactgaccagcgccagctttgcttttactgtcgaacagccgcagcaatggtcagcagaatccccttatctttaccatctggtcatgacgctgaaagacgccaacggcaacgttctggaagtggtgccacaacgcgttggcttccgtgatatcaaagtgcgcgacggtctgttctggatcaataaccgttatgtgatgctgcacggcgtcaaccgtcacgacaacgatcatcgcaaaggccgcgccgttggaatggatcgcgtcgagaaagatctccagttgatgaagcagcacaatatcaactccgtgcgtaccgctcactacccgaacgatccgcgtttttacgaactgtgtgatatctacggcctgtttgtgatggcggaaaccgacgtcgaatcgcacggctttgctaatgtcggcgatattagccgtattaccgacgatccgcagtgggaaaaagtctacgtcgagcgcattgttcgccatatccacgcgcagaaaaaccatccgtcgatcatcatctggtcgctgggcaatgaatccggctatggctgtaacatccgcgcgatgtaccatgcggcgaaagcgctggatgacacgcgactggtgcattacgaagaagatcgcgatgctgaagtggtcgatattatttccaccatgtacacccgcgtgccgctgatgaatgagtttggtgaatacccgcatccgaagccgcgcatcatctgtgaatatgctcatgcgatggggaacggaccgggcgggctgacggagtaccagaacgtcttctataagcacgattgcattcagggtcattatgtctgggagtggtgcgaccacgggatccaggcacaggacgaccacggcaatgtctggtataaattcggcggcgactacggcgactatcccaacaactataacttctgtcttgatggtttgatctattccgatcagacgccgggaccgggcctgaaagagtacaaacaggttatcgcgccggtaaaaatccacgcgcgggatctgactcgcggcgagttgaaagtcgaaaataaactgtggtttaccacgcttgatgactacaccctgcacgcagaggtgcgcgccgaaggtgaaacgctcgcgacgcagcagattaaactgcgcgacgttgcgccgaacagcgaagcccccttgcagatcacgctgccgcagctggacgcccgcgaagcgttcctcaacattacggtgaccaaagattcccgcacccgctacagcgaagccggacaccctatcgccacttatcagttcccgctgaaggaaaacaccgcgcagccagtgcctttcgcaccaaataatgcgcgtccgctgacgctggaagacgatcgtttgagctgcaccgttcgcggctacaacttcgcgatcaccttctcaaaaatgagtggcaaaccgacatcctggcaggtgaatggcgaatcgctgctgactcgcgagccaaagatcaacttcttcaagccgatgatcgacaaccacaagcaggagtacgaagggctgtggcaaccgaatcatttgcagatcatgcaggaacatctgcgcgactttgccgtagaacagagcgatggtgaagtgctgatcatcagccgcacagttattgccccgccggtgtttgacttcgggatgcgctgcacctacatctggcgcatcgctgccgatggccaggttaacgtggcgctttccggcgagcgttacggcgactatccgcacatcattccgtgcatcggtttcaccatgggaattaacggcgaatacgatcaggtggcgtattacggtcgtggaccgggcgaaaactacgccgacagccagcaggctaacatcatcgatatctggcgcagcaccgtcgatgccatgttcgagaactatcccttcccgcagaacaacggtaaccgtcagcatgtccgctggacggcactgactaaccgccacggtaacggtctgctggtggttccgcagcgcccaattaacttcagcgcctggcactatacccaggaaaacatccacgctgcccagcactgtaacgagctgcagcgcagtgatgacatcaccctgaacctcgatcaccagctgcttggcctcggctccaactcctggggcagcgaggtgctggactcctggcgcgtctggttccgtgacttcagctacggctttacgttgctgccggtttctggcggagaagctaccgcgcaaagcctggcgtcgtatgagttcggcgcagggttcttttccacgaatttgcacagcgagaataagcaatga

SEQ ID NO: 35848 - protein, 1030 aa, Escherichia coli [sequence omitted]

SEQ ID NO: 35849 - DNA, 3087 bp, Enterobacter cloacae
  CDS (1)..(3087): transl_table=11
atgtctgacactccctcgctgaccctcagcgccctcctggcccgtcgggactgggaaaaccccgtagttacccagtggaaccgtctggccgcacacgccccgttgcacagctggcgcaatgagccttcggccagagatgacgccggatctgccagaaggcaaactctcaacgggctatggcggtttagctactttaccgcgccggagcaggttcctcaggcatgggtaaccgaagattgcgctgatgccgttgcgatgcccgtgccgtctaactggcagatgcaggggttcgacacgcccatctataccaatgtcacctatcccattcccgttaacccaccttttgtgccgcaggaaaacccgaccggttgttactcgctcacatttgaggtggatgacgcctggcttcagagcgggcagacccgcatcatctttgacggcgtgaactcggcgtttcatctgtggtgcaacgggcagtggataggctattcccaggacagccggttgcccgccgaatttgacctctcggcggcactacgccccggacagaaccgcctggcggtcatggtattgcgctggtgtgacggcagctatctggaagatcaggacatgtggcgcatgagcggcatcttccgcgatgtgaccttgctgcataaacccgagacgcagattgccgattatcacgtcgtgacggatctgaatgcggaactggaccgcgcggtgctgaaggttgatgtcacgctggcaggcgctggctttgcggacggcgaggtggtctttaccctgtggcgcaagggggaaaaatgcgccagcgtctcccgacagccgggatctgccattgttgacgagcgcggcagctgggccgagcgcttaacggtaacaatccccgttgagacacctgcgctctggagtgcggaaacgccggagctgtatcgcctgacgatggcgcttcttaacccgcagggtgaggtgcttgagatagaagcgtgcgacgtgggcttccgccgcgttgaaatcagcaatgggctgctgaagctcaacggtaaaccgctgctgatccgcggggttaaccggcacgagcatcactcggaaaacggccaggtgatggacgaagcaaccatgcgtcgcgatatcgaaaccatgaagcagcacagcttcaacgccgtgcgctgctcgcactacccgaaccatccgctgtggtaccagctttgcgatcgctacgggctgtacgtcgttgacgaagccaatatcgaaacgcacggcatggtgccgatgagccgccttgctgacgatccgcgctggctgcccgccatgagcgagcgcgtgacccgcatggtgcagcgcgatcgtaatcacccctcaattatcatctggtccctgggcaatgagtcgggccacggcgcgaatcacgatgcgctgtaccgctggctgaaaaccaccgacccgacacgccctgtgcagtatgaaggcggcggcgcgaacacggcggcgaccgatattgtttgtcctatgtacgcccgggtcgatcgggatcagccgttcccggcagtgcctaaatggtcaatcaagaaatggatcggcatgccggatgaaacgcgcccgctgatcctctgtgaatacgcccacgcgatgggaaatagcttcggtgggtttgcaaaatactggcaggcgtttcgcagccatcctcgcctgcagggtgggtttgtctgggactgggtcgatcaggccctgacgaaacgggacgaagatggcaatacgttctgggcgtacggcggagactttggcgataagccgaacgaccggcagttctgtcttaacgggctggtgttccccgatcgcacgccgcacccggcgctgtacgaggcgcacggcccgcagcagttctttacctttactcgggtcagcacctctccgctggtgattgaggtgcaaagcggctacctgttccgccacaccgataacgaagtgctgaactggacggttgcccgggacggggacgtgctcgttgcgggcgaggtgacgctggcgatggtacctgaaggcactcagcgcctggagattgccctgccggagctgaacgccgggccgggtgaggtctggctgaacgttgaagtgcgccagccgcgggcaacgccgtggtcaccggcagccatcgctgcggctgggagcagtggccgcttccggctccgctctttattgctccgccagccccgtcggcgagccgcggtgttaacgcaaaccgatcgcatcctggagatcgcccatcgccaacagcgctggcagttcgatcgcgcatccggaaacctgacccaatggtggcgaaatggcgttgaaacgctgctttcacctctgacggataacgtcagccgcgcgccgctggacaacgacattggcgtgagcgaagcgacgaagatcgatccgaacgcctgggttgaacgctggaaagcggcgggcatgtacgatctcaccccgcgcgtgctgcactgtgaggcagagcagcacgcaggcgaggtggtggtcacaacccagcatgtccttgagtatcgcggcaaggcgctgttcctgagtcgtaaggtctggcggatagacgagcagggggttctgcatggcgatattcaggtcgatatggcgtctgatatccctgaacccgcacggattggcctgagcgttcatctcgccgaaacgccggaaaacgttcgctggctggggctggggccgcatgagaactacccggacagaaagctggcggcgcagcagggacgctggacgttacctctcgaagccatgcacacgccgtatatcttcccgacggaaaatggtttgcgctgcgatacccgggaacttgtggtgggaatgcatcagctgaacggccatttccacttctcggtgagccgctatagccagcagcagctacgagagacaacccatcatcacctgctgcgggaagaaccgggatgctggctcaacctcgatgcgttccatatgggtgtgggcggcgacgactcctggagccccagcgtctcgccggaattcatcctgcagacacgtcagcttcgctataccttcagctggcagcagaacccttaa

SEQ ID NO: 35850 - protein, 1028 aa, Enterobacter cloacae
MSDTPSLTLSALLARRDWENPVVTQWNRLAAHAPLHSWRNEPSARDDAGSARRQTLNGLWRFSYFTAPEQVPQAWVTEDCADAVAMPVPSNWQMQGFDTPIYTNVTYPIPVNPPFVPQENPTGCYSLTFEVDDAWLQSGQTRIIFDGVNSAFHLWCNGQWIGYSQDSRLPAEFDLSAALRPGQNRLAVMVLRWCDGSYLEDQDMWRMSGIFRDVTLLHKPETQIADYHVVTDLNAELDRAVLKVDVTLAGAGFADGEVVFTLWRKGEKCASVSRQPGSAIVDERGSWAERLTVTIPVETPALWSAETPELYRLTMALLNPQGEVLEIEACDVGFRRVEISNGLLKLNGKPLLIRGVNRHEHHSENGQVMDEATMRRDIETMKQHSFNAVRCSHYPNHPLWYQLCDRYGLYVVDEANIETHGMVPMSRLADDPRWLPAMSERVTRMVQRDRNHPSIIIWSLGNESGHGANHDALYRWLKTTDPTRPVQYEGGGANTAATDIVCPMYARVDRDQPFPAVPKWSIKKWIGMPDETRPLILCEYAHAMGNSFGGFAKYWQAFRSHPRLQGGFVWDWVDQALTKRDEDGNTFWAYGGDFGDKPNDRQFCLNGLVFPDRTPHPALYEAHGPQQFFTFTRVSTSPLVIEVQSGYLFRHTDNEVLNWTVARDGDVLVAGEVTLAMVPEGTQRLEIALPELNAGPGEVWLNVEVRQPRATPWSPAAIAAAGSSGRFRLRSLLLRQPRRRAAVLTQTDRILEIAHRQQRWQFDRASGNLTQWWRNGVETLLSPLTDNVSRAPLDNDIGVSEATKIDPNAWVERWKAAGMYDLTPRVLHCEAEQHAGEVVVTTQHVLEYRGKALFLSRKVWRIDEQGVLHGDIQVDMASDIPEPARIGLSVHLAETPENVRWLGLGPHENYPDRKLAAQQGRWTLPLEAMHTPYIFPTENGLRCDTRELVVGMHQLNGHFHFSVSRYSQQQLRETTHHHLLREEPGCWLNLDAFHMGVGGDDSWSPSVSPEFILQTRQLRYTFSWQQNP

SEQ ID NO: 35851 - DNA, 4812 bp, Klebsiella pneumoniae
  CDS (1259)..(4363): transl_table=11
aagcttctccaccagcgctttcagctgcgccagggtctgctgccggtcctccgcggcggcgacaggccaggccgactggcgcacgatgagccgggtcggcagcagctcgcggatccgcagctgcggggccgccatcagggcaatcagccgctccaccgcccttttgcccaacagatcgaagtcctgcgccaccgtggtgagcggcggctggaagtaaaggctgtcggcggtgtcatcgtagccggtcaccgataccgcctggctgccgctgcgattgagctgggccagcgcgctgagcacgccgagcgccatctgatcgtttgccaccactatggcgctgatccgcggctgcaggtggaggagctcgaaagttttctgccagccgctggcggcgctccagtcgccaaacaccgtagtagagcgggcaatattcagactgtgcaacgcctcgcgccagctggcgagacgcagacgggcggaaaccgaactttccggtcccgccagcagaccaaattcgcgatgccccatctcccacaggtggcgcacgcaggccccgcagccgtcgcggtggtcgaagcgcacgcagcagacatcggcctccggggagacatcgagaaacaggcaggccatatccggattgtcttgcaccagccgctcggcagtggcgctctccagcggcagactgacgatcaccccgcgaatatgctgggcgcgcagctcgtccagccgggcctgcagcgcgacaaaatcggcctgcgccggcatcgctatcgccacttccagctgatgcaggctggcatggctctttatcgcggcggcgatctgcgagggggcgtgcagcgtcacggaggcggtaatcagcccgatggagggcgccgctttgccggcaagcagctgcgccgagcggttaggcacatagtgcagcgcctgcatcgcgcggatcacctgctcgcgggtacgggctgagaccacctcaggacggttcagcacccggcggagaccgtctgctgggacacgcccgcggcgcgcgacatcctccagggttgcggtacgacgcggcatcttttctcctcagtaataacaatgtcgtgcgctaacattttatgtttaacgcgcgacaaaaaacagcgcttcgcccccgctttcgtgatcgtctgttaatttcgattcccccgagattgctggacaaaacaaattacccgataacgttaaccatcctgtttagcgaacgacaatttctgacttaccggggtttaatatgcaaattagcgataccggccgcagccacactcctgactttcacgccgtcctcgcccgtgaagactggcacaaccagaccattacccaccttaaccgcctgccagcgcatcccgttttcgccagctggcgcgatgagcttgccgcccgcgataacctaccttcatcccgccgccgtcaactggacgggagtggcagttctcttacgcccgcagcccgtttgccgtcgatgcgagtggtgacgcaggatctaccggactgccgcggcacgcctgtgccttccaactggcagatggagggctatgacgcgccgatctacaccaacgtccgctatcccatcgacaccaccccaccgcgggtgccggaggataacccgaccggctgctactccctgcactttacggttgaggacacatggcgtgagaacgggcaaacgcagattattttcgatggcgtcaactcggcgtttcatctgtggtgcaatggcgtgtgggtcggctattcgcaggacagtcgcctgccggcggcgttcgatctcagccccttcctgcgtccgggcgacaaccgcctgtgcgtgatggtcatgcgctggagcgccggcagctggctggaagaccaggatatgtggcggatgagcggcattttccgctcggtatggctgctgaataagccgcagcaacggctatgcgacgtgcagttgacgccagcccttgacgccctctatcgcgacggcactctgcaggtccaggcgaccatcgaagcgactgaggcggcgcttgccgggctcagcgtcggggttagcctgtggcgcggcgaggagcagttcgccgccgggcggcagccgttaggtaccccgacggtggatgagcgcggccactacgcggaacgggtcgatttctccctggcggtggcgacgccggcgcactggagcgcggaaaccccgaactgttatcgcgccgtggtcaccctgtggcgcggcgacgaactgctggaggccgaagcgtgggacatcggttttcgccgcatcgagattgccgatggcctgctgcgtctcaacggtaaaccgctgctgatccgcggcgttaaccgccatgagcatcatcatttgcgcgggcaggtggtcaccgaggcggatatggtgcaggacattctgttgatgaagcagaacaactttaacgccgtgcgctgctcgcactatcccaacgcgccgcgctggtatgaactctgcaaccgctacggtctgtacgtggtcgatgaagccaatattgaaacccacgggatggtgccgatgaatcggctgtccgacgatccggcgtggctaccagccttcagcgcccgcgtcacccggatggtacagagcaaccgcaaccatccgtgcattatcatctggtcgctgggcaacgagtccggcggcggcggcaaccacgaagcgctgtaccactggctgaaacgcaacgatccgagccgtccggtgcagtacgagggcggcggcgcggataccaccgccaccgatattatctgtccgatgtacgcccgcgtcgaacgcgaccagccgatcccggcggtacccaaatgggggatcaaaaaatggatcagcctgcccggtgagcagaggccgctgatcctttgcgagtacgcccacgcgatgggcaacagcctcggcaacttcgccgattactggcaggcctttcgcgagtatccgcggctgcagggcgggtttatctgggactgggccgaccaggcgatccgcaaaacctttgccgacggcagcgtcggctgggcctatggcggcgactttggtgataagcctaacgatcgccagttctgtatgaacggtctggtgtttcccgatcgcacgccgcatccgtcgctggtggaggcgaagcacgcccagcaatattttcagttcacgctgctgtcgacctcgccgctgcgggtgcgcatcatcagcgaatacctgttccgcccaaccgataacgaagtcgtgcgctggcaggtgcaggcggccggtgaacccctgtatcacggcgacctgaccctggcgctgccccctgagggcagcgacgagataacgctgctcgatagcctgatcctgcctgaaggcgcccgcgcggtgtggctgacgctggaggtgacccagccccaggcgaccgcctggtcagaagcggagcaccgcgtcgcctggcaacagtttcccctgcccgccccgctcggctgccggcgcccaccgtgtctgccggcgctcccggatcttatcgtcagcgatgaggtctggcagatccgcgccggttcgcaatgctggaccatcgatcgccggacgggtctgctgagccgctggtcggttggcggtcaggagcagctgttgactcccctgcgtgaccagtttattcgcgcgccgctcgacaacgacatcggggtcagcgaagtagagcgtatcgaccccaacgcctgggtggagcgctggagaagcgccggcctgtacgatcttgaggcgcactgcgtccagtgcgatgcgcagcgcctggcaaatgaaaccctcgtcgactgccgctggcactacctgcgcggcgaagaggtagtgattgtcagccactggcgcatgcacttcactgctgacggaaccctgcggttggcagtggacggcgaacgggcggaaaccctgccgccgctgccgcgggtcgggctgcacttccaggtggcggatcagcaggcgccggtgagctggctgggtctggggccgcatgagaactaccccgaccggcggagcagcgcctgcttcgcccgctgggagcagccgctggcggcgatgaccaccccctacatcttcccgacggaaaacggcctgcgctgtgatacccaggcgctggactgggggcgctggcacatcagcggtcatttccacttctccgttcagccatggagcacccgtcagctgatggagaccgaccactggcacaagatgcaggccgaagacggcgtgtggatcaccctcgacggcctgcatatgggggtgggaggcgatgactcctggacccccagcgtgctgccgcagtggctcctgagccaaacgcgctggcagtacgaggtctcattgcgtagcctttaatccgtgggggcgacagcccccaccccacaaacagaataacaagggatcatggtgatgaaattctcagaactggcgccacgagaacggcataatttcgtctatttcctgctgttctttttcttttaccatttcattatgtcggcctacttcccgttttttccggtgtggctggcggacgttaaccatctaactaaaacggaaaccgggatcgttttctcgtctatctcgttattcgccattatttttcagccggtgttcggcctgatgtcggataagctcggcctgcgcaaacatctgctgtggaccattacggtactgttaattctgttcgcgccattctttattttcgttttctccccgctgctgcagatgaatattatcgctggttcgctggtaggcgggatctacctggggattgttttctcgacggctccgggcgtcggaagctt

SEQ ID NO: 35852 - protein, 1034 aa, Klebsiella pneumoniae
MQISDTGRSHTPDFHAVLAREDWHNQTITHLNRLPAHPVFASWRDELAARDNLPSSRRRQLDGSGSSLTPAARLPSMRVVTQDLPDCRGTPVPSNWQMEGYDAPIYTNVRYPIDTTPPRVPEDNPTGCYSLHFTVEDTWRENGQTQIIFDGVNSAFHLWCNGVWVGYSQDSRLPAAFDLSPFLRPGDNRLCVMVMRWSAGSWLEDQDMWRMSGIFRSVWLLNKPQQRLCDVQLTPALDALYRDGTLQVQATIEATEAALAGLSVGVSLWRGEEQFAAGRQPLGTPTVDERGHYAERVDFSLAVATPAHWSAETPNCYRAVVTLWRGDELLEAEAWDIGFRRIEIADGLLRLNGKPLLIRGVNRHEHHHLRGQVVTEADMVQDILLMKQNNFNAVRCSHYPNAPRWYELCNRYGLYVVDEANIETHGMVPMNRLSDDPAWLPAFSARVTRMVQSNRNHPCIIIWSLGNESGGGGNHEALYHWLKRNDPSRPVQYEGGGADTTATDIICPMYARVERDQPIPAVPKWGIKKWISLPGEQRPLILCEYAHAMGNSLGNFADYWQAFREYPRLQGGFIWDWADQAIRKTFADGSVGWAYGGDFGDKPNDRQFCMNGLVFPDRTPHPSLVEAKHAQQYFQFTLLSTSPLRVRIISEYLFRPTDNEVVRWQVQAAGEPLYHGDLTLALPPEGSDEITLLDSLILPEGARAVWLTLEVTQPQATAWSEAEHRVAWQQFPLPAPLGCRRPPCLPALPDLIVSDEVWQIRAGSQCWTIDRRTGLLSRWSVGGQEQLLTPLRDQFIRAPLDNDIGVSEVERIDPNAWVERWRSAGLYDLEAHCVQCDAQRLANETLVDCRWHYLRGEEVVIVSHWRMHFTADGTLRLAVDGERAETLPPLPRVGLHFQVADQQAPVSWLGLGPHENYPDRRSSACFARWEQPLAAMTTPYIFPTENGLRCDTQALDWGRWHISGHFHFSVQPWSTRQLMETDHWHKMQAEDGVWITLDGLHMGVGGDDSWTPSVLPQWLLSQTRWQYEVSLRSL

SEQ ID NO: 35853 - DNA, 3078 bp, Kluyveromyces lactis
  CDS (1)..(3078)
atgtcttgccttattcctgagaatttaaggaaccccaaaaaggttcacgaaaatagattgcctactagggcttactactatgatcaggatattttcgaatctctcaatgggccttgggcttttgcgttgtttgatgcacctcttgacgctccggatgctaagaatttagactgggaaacggcaaagaaatggagcaccatttctgtgccatcccattgggaacttcaggaagactggaagtacggtaaaccaatttacacgaacgtacagtaccctatcccaatcgacatcccaaatcctcccactgtaaatcctactggtgtttatgctagaacttttgaattagattcgaaatcgattgagtcgttcgagcacagattgagatttgagggtgtggacaattgttacgagctttatgttaatggtcaatatgtgggtttcaataaggggtcccgtaacggggctgaatttgatatccaaaagtacgtttctgagggcgaaaacttagtggtcgtcaaggttttcaagtggtccgattccacttatatcgaggaccaagatcaatggtggctctctggtatttacagagacgtttctttactaaaattgcctaagaaggcccatattgaagacgttagggtcactacaacttttgtggactctcagtatcaggatgcagagctttctgtgaaagttgatgtccagggttcttcttatgatcacatcaatttcacactttacgaacctgaagatggatctaaagtttacgatgcaagctctttgttgaacgaggagaatgggaacacgactttttcaactaaagaatttatttccttctccaccaaaaagaacgaagaaacagctttcaagatcaacgtcaaggccccagaacattggaccgcagaaaatcctactttgtacaagtaccagttggatttaattggatctgatggcagtgtgattcaatctattaagcaccatgttggtttcagacaagtggagttgaaggacggtaacattactgttaatggcaaagacattctctttagaggtgtcaacagacatgatcaccatccaaggttcggtagagctgtgccattagattttgttgttagggacttgattctaatgaagaagtttaacatcaatgctgttcgtaactcgcattatccaaaccatcctaaggtgtatgacctcttcgataagctgggcttctgggtcattgacgaggcagatcttgaaactcatggtgttcaagagccatttaatcgtcatacgaacttggaggctgaatatccagatactaaaaataaactctacgatgttaatgcccattacttatcagataatccagagtacgaggtcgcgtacttagacagagcttcccaacttgtcctaagagatgtcaatcatccttcgattattatctggtccttgggtaacgaagcttgttatggcagaaaccacaaagccatgtacaagttaattaaacaattggatcctaccagacttgtgcattatgagggtgacttgaacgctttgagtgcagatatctttagtttcatgtacccaacatttgaaattatggaaaggtggaggaagaaccacactgatgaaaatggtaagtttgaaaagcctttgatcttgtgtgagtacggccatgcaatgggtaacggtcctggctctttgaaagaatatcaagagttgttctacaaggagaagttttaccaaggtggctttatctgggaatgggcaaatcacggtattgaattcgaagatgttagtactgcagatggtaagttgcataaagcttatgcttatggtggtgactttaaggaagaggttcatgacggagtgttcatcatggatggtttgtgtaacagtgagcataatcctactccgggccttgtagagtataagaaggttattgaacccgttcatattaaaattgcgcacggatctgtaacaatcacaaataagcacgacttcattacgacagaccacttattgtttatcgacaaggacacgggaaagacaatcgacgttccatctttaaagccagaagaatctgttactattccttctgatacaacttatgttgttgccgtgttgaaagatgatgctggtgttctaaaggcaggtcatgaaattgcctggggccaagctgaacttccattgaaggtacccgattttgttacagagacagcagaaaaagctgcgaagatcaacgacggtaaacgttatgtctcagttgaatccagtggattgcattttatcttggacaaattgttgggtaaaattgaaagcctaaaggtcaagggtaaggaaatttccagcaagtttgagggttcttcaatcactttctggagacctccaacgaataatgatgaacctagggactttaagaactggaagaagtacaatattgatttaatgaagcaaaacatccatggagtgagtgtcgaaaaaggttctaatggttctctagctgtagtcacggttaactctcgtatatccccagttgtattttactatgggtttgagactgttcagaagtacacgatctttgctaacaaaataaacttgaacacttctatgaagcttactggcgaatatcagcctcctgatttcccaagagttgggtacgaattctggctaggagatagttatgaatcatttgaatggttaggtcgcgggcccggcgaatcatatccggataagaaggaatctcaaagattcggtctttacgattccaaagatgtagaggaattcgtatatgactatcctcaagaaaatggaaatcatacagatacccactttttgaacatcaaatttgaaggtgcaggaaaactatcgatcttccaaaaggagaagccatttaacttcaagatttcagacgaatacggggttgatgaagctgcccacgcttgtgacgttaaaagatacggcagacactatctaaggttggaccatgcaatccatggtgttggtagcgaagcatgcggacctgctgttctggaccagtacagattgaaagctcaagatttcaactttgagtttgatctcgcttttgaataa

SEQ ID NO: 35854 - protein, 1025 aa, Kluyveromyces lactis
MSCLIPENLRNPKKVHENRLPTRAYYYDQDIFESLNGPWAFALFDAPLDAPDAKNLDWETAKKWSTISVPSHWELQEDWKYGKPIYTNVQYPIPIDIPNPPTVNPTGVYARTFELDSKSIESFEHRLRFEGVDNCYELYVNGQYVGFNKGSRNGAEFDIQKYVSEGENLVVVKVFKWSDSTYIEDQDQWWLSGIYRDVSLLKLPKKAHIEDVRVTTTFVDSQYQDAELSVKVDVQGSSYDHINFTLYEPEDGSKVYDASSLLNEENGNTTFSTKEFISFSTKKNEETAFKINVKAPEHWTAENPTLYKYQLDLIGSDGSVIQSIKHHVGFRQVELKDGNITVNGKDILFRGVNRHDHHPRFGRAVPLDFVVRDLILMKKFNINAVRNSHYPNHPKVYDLFDKLGFWVIDEADLETHGVQEPFNRHTNLEAEYPDTKNKLYDVNAHYLSDNPEYEVAYLDRASQLVLRDVNHPSIIIWSLGNEACYGRNHKAMYKLIKQLDPTRLVHYEGDLNALSADIFSFMYPTFEIMERWRKNHTDENGKFEKPLILCEYGHAMGNGPGSLKEYQELFYKEKFYQGGFIWEWANHGIEFEDVSTADGKLHKAYAYGGDFKEEVHDGVFIMDGLCNSEHNPTPGLVEYKKVIEPVHIKIAHGSVTITNKHDFITTDHLLFIDKDTGKTIDVPSLKPEESVTIPSDTTYVVAVLKDDAGVLKAGHEIAWGQAELPLKVPDFVTETAEKAAKINDGKRYVSVESSGLHFILDKLLGKIESLKVKGKEISSKFEGSSITFWRPPTNNDEPRDFKNWKKYNIDLMKQNIHGVSVEKGSNGSLAVVTVNSRISPVVFYYGFETVQKYTIFANKINLNTSMKLTGEYQPPDFPRVGYEFWLGDSYESFEWLGRGPGESYPDKKESQRFGLYDSKDVEEFVYDYPQENGNHTDTHFLNIKFEGAGKLSIFQKEKPFNFKISDEYGVDEAAHACDVKRYGRHYLRLDHAIHGVGSEACGPAVLDQYRLKAQDFNFEFDLAFE

SEQ ID NO: 35855 - DNA, 3120 bp, Pseudoalteromonas haloplanktis
  CDS (1)..(3120): transl_table=11
atgacctctttacagcacataattaatcgtcgcgattgggaaaatccaattacagtacaagttaatcaagtaaaagcacatagcccacttaacggctttaaaacaattgaagacgcccgtgaaaatacacagtcgcagaagaaaagtttaaacgggcagtgggattttaaattatttgataagcccgaagcggtcgatgagtcgttattgtatgagaagataagtaaagagctaagcggcgactggcaaagtattactgtgccttctaactggcaactacacggctttgataaacccatttactgtaatgttaaatacccatttgcagtaaacccgccatttgtaccaagcgataaccctactggttgttaccgcactgaatttacaatcacacctgagcagttaacgcagcgtaaccatataatttttgaaggcgttaactcggcttttcatctttggtgtaacgggcagtgggtggggtattcacaagatagccgcttaccgagcgaatttgatttaagtgagcttttagttgtcggtactaaccgtattgccgttatggttattcgttggagtgatggcagttatttagaagatcaggatatgtggtggctaagcggtatttttcgcgatgttaacttacttacaaaaccgcaaagccaaatacgcgatgtgtttataacccccgatttagacgcttgctatcgcgatgcaacgctacatataaaaactgcgataaatgcgccaaataactaccaagtagcagtacagatttttgatggtaaaacatcactgtgcgagccgaaaattcaaagcactaacaataaacgtgttgatgaaaaaggggggtggagcgatgtcgtatttcaaacaatagcaatacgaagccctaaaaagtggaccgccgaaacgccgtacttatatcgttgcgtagtaagcctgcttgatgaacaaggcaatacagtcgacgttgaagcctataacattggttttagaaaagtagaaatgcttaacgggcagctgtgtgtaaatggcaaaccgttacttatacggggtgttaaccgacacgaacatcacccagaaaacggccatgctgttagcactgccgatatgattgaagatattaagctgatgaagcaaaataactttaatgccgtacgtacagctcattaccctaaccatccacttttttacgagctatgtgacgagctaggtttatacgtggttgatgaagcgaatatagaaacccatggcatgtttcctatggggcgtttagcaagcgatccgctatgggcaggtgcatttatgtcgcgttatacgcaaatggttgagcgcgataaaaaccacgcctcaattattatttggtcacttggaaacgaatgcgggcacggcgcaaatcatgatgctatgtatggctggtcaaaaagctttgacccttctcgcccagtgcaatacgagggcggcggtgcaaacacgacagctaccgatattatttgcccaatgtactcccgtgtagataccgatattaaagacgatgcggtacctaagtattcaattaaaaaatggctgagcttaccgggtgaaactcgtccacttattttatgtgagtacgcccatgctatgggtaatagcttaggtagctttgacgattactggcaggcatttagagaatacccacggctgcaaggcggctttatttgggattgggtagatcaaggtttatctaaaattgacgagaacggcaagcattattgggcttacggcggcgactttggtgatgaactaaacgaccgccagttttgtataaacggcttattgttcccggatcgtacaccgcatcctagcctatttgaagctaaatacagccagcaacatttacaatttacactgcgcgagcaaaatcaaaatcaaaaccaaaaccaatacagcattgatgtatttagcgattacgtatttaggcacaccgataacgaaaaactcgtttggcaattaatacaaaatggcgtgtgtgttgagcaaggcgaaatggcacttaatattgctccgcaaagtacgcacactttaaccattaaaactaaaacagcgtttgagcatggtgcgcaatattaccttaatttagatgtagcactaattaacgactcacactttgcaaacgctaatcacgttatggattcagaacagtttaagcttataaatagtaataatttaaacagtaaatcatttgcatcagctacagagaaaagcgttataagtgttaatgaaaccgactcccacctaagtattgaaaacaatacatttaaacttgtttttaatcaacaatcaggacttatagagcagtggttacaagacgatacacaggttattagtagcccactggttgataacttttatcgtgccccacttgataacgacattggtgtaagcgaagtggacaacctagaccctaatgcatgggaagcacgctggtcgcgcgcaggtatagggcaatggcagcgcacatgtagctcaatcaatgctgtgcaatcaagcgttgatgtccgtattacttgtgtatttaattacgaatttaatggcgtgctacaagcacaaacacagtggctatatacgctcaataatacaggtactattagcttaaatgttgatgtgaacttaaacgacaccctaccaccaatgccgcgaatagggttaagtacaacgattaacaagcaaagcgatacaaaagtaaactggctagggttaggtccttttgaaaactacccagatcgtaaatccgctgcacgttttggttattacagcttgagcttaaatgagctatatacaccgtatatattcccaactgataacggtctgcgtagcgattgccaattactgagcattaataacttaatcgtgactggcgcgtttttgtttgccgccagtgagtattcgcaaaatatgctaacgcaagctaaacacactaacgaactaattgctgatgattgcattcatgtacatattgatcatcaacatatgggtgtaggtggcgatgattcgtggagtccaagtacccataaagagtatttattagagcaaaaaaattataattactcgcttacacttactggggggattacaacttaa

SEQ ID NO: 35856 - protein, 1039 aa, Pseudoalteromonas haloplanktis
MTSLQHIINRRDWENPITVQVNQVKAHSPLNGFKTIEDARENTQSQKKSLNGQWDFKLFDKPEAVDESLLYEKISKELSGDWQSITVPSNWQLHGFDKPIYCNVKYPFAVNPPFVPSDNPTGCYRTEFTITPEQLTQRNHIIFEGVNSAFHLWCNGQWVGYSQDSRLPSEFDLSELLVVGTNRIAVMVIRWSDGSYLEDQDMWWLSGIFRDVNLLTKPQSQIRDVFITPDLDACYRDATLHIKTAINAPNNYQVAVQIFDGKTSLCEPKIQSTNNKRVDEKGGWSDVVFQTIAIRSPKKWTAETPYLYRCVVSLLDEQGNTVDVEAYNIGFRKVEMLNGQLCVNGKPLLIRGVNRHEHHPENGHAVSTADMIEDIKLMKQNNFNAVRTAHYPNHPLFYELCDELGLYVVDEANIETHGMFPMGRLASDPLWAGAFMSRYTQMVERDKNHASIIIWSLGNECGHGANHDAMYGWSKSFDPSRPVQYEGGGANTTATDIICPMYSRVDTDIKDDAVPKYSIKKWLSLPGETRPLILCEYAHAMGNSLGSFDDYWQAFREYPRLQGGFIWDWVDQGLSKIDENGKHYWAYGGDFGDELNDRQFCINGLLFPDRTPHPSLFEAKYSQQHLQFTLREQNQNQNQNQYSIDVFSDYVFRHTDNEKLVWQLIQNGVCVEQGEMALNIAPQSTHTLTIKTKTAFEHGAQYYLNLDVALINDSHFANANHVMDSEQFKLINSNNLNSKSFASATEKSVISVNETDSHLSIENNTFKLVFNQQSGLIEQWLQDDTQVISSPLVDNFYRAPLDNDIGVSEVDNLDPNAWEARWSRAGIGQWQRTCSSINAVQSSVDVRITCVFNYEFNGVLQAQTQWLYTLNNTGTISLNVDVNLNDTLPPMPRIGLSTTINKQSDTKVNWLGLGPFENYPDRKSAARFGYYSLSLNELYTPYIFPTDNGLRSDCQLLSINNLIVTGAFLFAASEYSQNMLTQAKHTNELIADDCIHVHIDHQHMGVGGDDSWSPSTHKEYLLEQKNYNYSLTLTGGITT

SEQ ID NO: 35857 - DNA, 2985 bp, Staphylococcus xylosus
  CDS (1)..(2985): transl_table=11
atgttaaagcaacagtttcacgaaaatttagaggttcaacatgttaatttattgccaagacgtgcattttatataccatatcaacaaggggaagcggattaccattttgaaacaaggtataatactcgaaatgcgacattgttaaatggagaatggtattttcaatactttgagtcactcgaagcatatctaaatcattcaaataaacaagaaagcaaaacactaacggtcccatcggtttggaatttatatggctatgatcaaatacaatatttaaacacccagtatccaataccttttaacccgccatatgtacctaaagataatccatgtggacactatacgcgaaaattcactatcgatgagtatgatcaacaatacgattaccatttgaactttgaaggtgtagatagtgcgttttatgtatggattaataatgaatttataggttatagtcaaatttcacatgctatttctgaatttgatatttccaattttgtaaaacaaggtgagaataatatcgaagtacttgtacttaaatattctgatggtacctatcttgaagatcaggacatgttccgacactcgggcatttttagagatgtttatatcttaaaacgtgcaactgaacgtgttgatgattttaaagtagaaacaaatctaagtgacgatttaaatgcagcacagatagacgtaaaaattgaacgagcacacaatctaaaatcagtagaatttcaattatataatcctaagggtgaagaggtagcaagcatatctggcgtgaatgaacatcaatttgatgtccataatcctcatttatggtctacagaaaatcctgttttatacacactatacattttgacggatcaagaagtgattacacaaaaagttggaatacgtgaagtggctattcaaaataatcaattctatattaatggtcaatccatcaaaatacgtggcacaaattaccatgatagccatccagaaactggttacgttatgacggaatcccattttaaaaaagacttagaattaatgaaacaagggaactttaacgccattcgtacggcacattacccaaaatctccattattttacgaaatgacggaccaatatggcttttacgtaatgagtgaggctgatattgagacgcatggtgttgttagattatatggtgaagacaataatgaagattttaatattatagctgacgatagtaaatttgaaacggctattatagagcgtattgaagcttctattatgccactgaaaaattatagctctatcgtatcttggtcattagggaatgaatcaggatttggtaagaatatggttaaaggtgcagcacgtgccaaatcactagacaatacaaggccaattcattacgaaggtacattgtatcgagataagcagcaacactatgatttatctaatatagatatgattagtagaatgtatccttctcctgaagaaattgaggagacttatttgagtaacccggatttggataaaccgttcatcttatgtgaatatgcacatgcaatgggtaattctcctggagatttacacgcttaccaaacgctagttgagcaatacgatagctttatcggaggatttgtttgggaatggtgcgatcacgccattcaaactggcatgaaagacggtaatcctattttcaggtatggtggagattttggagaaaaactacatgacggaaatttttgtgtcgatggtattgtgtttccaaatagggtgccccatgaaggttattatgaattcaaacaagagcatagaccattaaatcttgtgtcacaagaagattttaaaatcgtgctacgtaaccaattggattttatacctgcagagaaatatatgtttgtagaggctacagtgacaaatttgaatgggggaaaaacgataagtgaaatacctctgtcaaacttcttgccacacactgctcaaacaattgatttgagcgattatattaatatacaacatatcagtgatgttatattacgatataaattaaaatatgacgatatatttcgtcatgaaaattttgaattaggacatgatcaaatcgtatatcaacgtcgaacattgaaagagcagaatgagcaatctgatgaaactgaaattctagtaactcaaactgataaattaatcaaagtttcagtaggtaaaagtgaaacgtacgtttttaataaagataatgcaagccttgagtcagttctcaagcataatcatatagtaattagccaaaacacaacaaataacatttggagagctccgactgataatgatacgaatataaaaaatgattgggcttactctggttataaagatatcactacacgcgtgcacgattatcaaattgtagaaaatgagacagaggtcagtcttatttttaatatagctatggtcaatgacgcagtgcctcccgtactatttgggacagtaacttggcatgttcaacgtaatggcacacttaatgtaacttatgatttagaaagagatatgaaggcaccttatttaccaagatttggtttaggtttgaccttacctaaagcatttgaacaggtgaaatattatggcaaaggtcctttcagtagttaccaagacaaaggcgtagccaattatttagatgattttggaacgactgttacagacaatggtgaaatccatattagacctcaagaaacaggaagtcataatgaaactacatttgttgaaattagtgatggatgtaaaaaggtcatcgtgacaagtgacaatacattcagttttaatacaacgcattattcattaaaacagctgacggaaacaactcataaagatgcactagaacctgaagatcaaacctatttatatatagattatgcacaaagtggaataggttcaaatagttgtggtccagaattaaatgaggcatatcgattaaataatcgacatatcgagtttagctttaatttgaaatttgtctaa

SEQ ID NO: 35858 - protein, 994 aa, Staphylococcus xylosus
MLKQQFHENLEVQHVNLLPRRAFYIPYQQGEADYHFETRYNTRNATLLNGEWYFQYFESLEAYLNHSNKQESKTLTVPSVWNLYGYDQIQYLNTQYPIPFNPPYVPKDNPCGHYTRKFTIDEYDQQYDYHLNFEGVDSAFYVWINNEFIGYSQISHAISEFDISNFVKQGENNIEVLVLKYSDGTYLEDQDMFRHSGIFRDVYILKRATERVDDFKVETNLSDDLNAAQIDVKIERAHNLKSVEFQLYNPKGEEVASISGVNEHQFDVHNPHLWSTENPVLYTLYILTDQEVITQKVGIREVAIQNNQFYINGQSIKIRGTNYHDSHPETGYVMTESHFKKDLELMKQGNFNAIRTAHYPKSPLFYEMTDQYGFYVMSEADIETHGVVRLYGEDNNEDFNIIADDSKFETAIIERIEASIMPLKNYSSIVSWSLGNESGFGKNMVKGAARAKSLDNTRPIHYEGTLYRDKQQHYDLSNIDMISRMYPSPEEIEETYLSNPDLDKPFILCEYAHAMGNSPGDLHAYQTLVEQYDSFIGGFVWEWCDHAIQTGMKDGNPIFRYGGDFGEKLHDGNFCVDGIVFPNRVPHEGYYEFKQEHRPLNLVSQEDFKIVLRNQLDFIPAEKYMFVEATVTNLNGGKTISEIPLSNFLPHTAQTIDLSDYINIQHISDVILRYKLKYDDIFRHENFELGHDQIVYQRRTLKEQNEQSDETEILVTQTDKLIKVSVGKSETYVFNKDNASLESVLKHNHIVISQNTTNNIWRAPTDNDTNIKNDWAYSGYKDITTRVHDYQIVENETEVSLIFNIAMVNDAVPPVLFGTVTWHVQRNGTLNVTYDLERDMKAPYLPRFGLGLTLPKAFEQVKYYGKGPFSSYQDKGVANYLDDFGTTVTDNGEIHIRPQETGSHNETTFVEISDGCKKVIVTSDNTFSFNTTHYSLKQLTETTHKDALEPEDQTYLYIDYAQSGIGSNSCGPELNEAYRLNNRHIEFSFNLKFV

SEQ ID NO: 35859 - DNA, 3234 bp, Streptococcus thermophilus
  CDS (154)..(3234): transl_table=11
tcaccaattattgagaaaaatggtcttgatgacacagtacttgtcactgtaactaattcagaaaaattcagtgctttccatcttgaacaaaaagttggagaaaaggtagaagctttgtctgaagttattaccttcaaaaaaggagaataatctatgaacatgactgaaaaaattcaaacttatttaaacgatccaaagattgttagcgttaatactgttgatgctcactcagatcataagtattttgaatctcttgaagaattttctgaaggggagatgaagttaagacaatctcttaatggaaaatggaaaattcactatgctcagaatacaaatcaggttttaaaagacttttataaaacagaatttgatgaaactgatttgaatttcatcaatgtaccaggtcatttagagcttcaaggttttggttctccacaatatgtgaatacccaatatccttgggatggtaaagaattccttcgtccacctcaagttcctcaagaatcaaatgctgttgcatcatacgttaaacattttaccttgaatgatgcattaaaagataaaaaagtatttatctcattccaaggggttgctacttccatctttgtatgggtcaatggtaacttcgtaggatacagtgaagattcatttacacctagtgaatttgaaattagtgattaccttgttgaaggtgataacaagttggcggtagctgtttatcgttactctacagcaagctggttggaagaccaagacttctggagactttacggtatttttagagatgtttacttgtatgctattccaaaagttcacgttcaagatctctttgttaagggagattatgattaccaaacaaaagcaggtcaattggatattgatttgaagactgttggtgattatgaagacaagaagattaaatatgttctttcagattatgaaggcatcgttacagaaggtgatgcatctgttaatggtgacggtgaactatctgtaagtcttgaaaatcttaaaatcaaaccttggagtgctgaaagtcctaaactttacgatttgatccttcatgttttggatgatgaccaagttgttgaagtcgttccagttaaagttggatttagacgctttgaaattaaagataaacttatgcttttgaatggtaagagaattgtctttaaaggggttaacagacacgaatttaacgctagaacaggacgttgtatcactgaagaagatatgctttgggatatcaaagtgatgaaacaacataacatcaatgctgttcgtacttcacactatcctaaccaaacacgttggtatgaattgtgtgatgaatatggactttatgttatcgatgaagccaaccttgaaacacacggtacatggcaaaaacttggtctatgcgaaccttcatggaatatcccagctagtgaaccagaatggttgcctgcttgtttggatcgtgccaataacatgttccaacgcgataagaaccacgctagtgttatcatttggtcttgtggtaatgaatcatatgctggtaaagatattgctgacatggctgattacttccgtagtgttgacaatactcgtccagttcactatgaaggtgttgcatggtgtcgtgagtttgattacattacagacatcgaaagtcgtatgtatgcgaaaccagctgatatcgaagaatacctcacaactggtaaactagttgatctttcaagcgttagtgataaacactttgcttcaggtaacctaactaacaaacctcaaaaaccttatatttcatgtgaatacatgcacacaatgggtaactctggtggtggattgcaactctacactgacttagagaaatatccagaataccaaggtggatttatttgggacttcattgaccaagctatttacaaaacacttccaaatggtagcgaattcctatcatatggtggtgactggcatgatagaccttctgactacgaattttgtggaaatggtatcgtctttgcagatcgtaccctaactccaaaacttcaaacagttaaacatctttactctaatattaagattgctgttgatgaaaaatcagtaactatcaagaatgataatctcttcgaagatctttctgcttatactttcctagctagagtttacgaagatggtagaaaagttagtgaaagtgaatatcactttgatgttaaaccaggcgaagaagcaacattcccagttaactttgtagtcgaggcttcaaattctgaacaaatttacgaagttgcttgtgttctgagggaagcaactgaatgggctcctaaaggtcatgaaattgttcgtggtcaatatgttgttgaaaagattagcactgaaacaccagttaaagcacctttgaatgttgttgaaggcgacttcaacatcggtattcaaggacaaaacttctcaatcttgctttcacgtgcacaaaatactttagtatctgctaagtataatggtgttgaattcattgagaaaggtcctaaacttagcttcactcgtgcttacactgacaacgatcgtggtgctggatatccattcgaaatggcaggctggaaggttgctggaaattatagtaaagttacagatactcaaattcaaatcgaagacgactctgttaaagtgacttatgttcatgaattgccaggcttgtctgatgtcgaagttaaggtaacttatcaagttgattacaagggtcgaatctttgttactgcaaactatgatggtaaagcaggtttgccaaacttccctgaatttggtctagaatttgctatcggttcacaatttacaaaccttagctattatggatacggtgcagaagaaagctaccgtgataaacttcctggtgcctatcttggtcgatatgaaacatctgttgaaaagacatttgctccatatctaatgccacaagaatctggtaatcactatggtactcgtgaattcacagtatctgatgataaccataatggtcttaaattcaccgcacttaataaagcattcgaattcagtgctttgcgtaacagtactgaacaaattgaaaatgctcgtcaccaatatgagttgcaagaatctgatgctacatggattaaagttcttgctgctcaaatgggtgtaggtggtgacgacacatggggtgctccagttcatgacgaattcttgcttagctcagcagatagctatcaattaagcttcatgattgaaccactaaattag

SEQ ID NO: 35860 - protein, 1026 aa, Streptococcus thermophilus
MNMTEKIQTYLNDPKIVSVNTVDAHSDHKYFESLEEFSEGEMKLRQSLNGKWKIHYAQNTNQVLKDFYKTEFDETDLNFINVPGHLELQGFGSPQYVNTQYPWDGKEFLRPPQVPQESNAVASYVKHFTLNDALKDKKVFISFQGVATSIFVWVNGNFVGYSEDSFTPSEFEISDYLVEGDNKLAVAVYRYSTASWLEDQDFWRLYGIFRDVYLYAIPKVHVQDLFVKGDYDYQTKAGQLDIDLKTVGDYEDKKIKYVLSDYEGIVTEGDASVNGDGELSVSLENLKIKPWSAESPKLYDLILHVLDDDQVVEVVPVKVGFRRFEIKDKLMLLNGKRIVFKGVNRHEFNARTGRCITEEDMLWDIKVMKQHNINAVRTSHYPNQTRWYELCDEYGLYVIDEANLETHGTWQKLGLCEPSWNIPASEPEWLPACLDRANNMFQRDKNHASVIIWSCGNESYAGKDIADMADYFRSVDNTRPVHYEGVAWCREFDYITDIESRMYAKPADIEEYLTTGKLVDLSSVSDKHFASGNLTNKPQKPYISCEYMHTMGNSGGGLQLYTDLEKYPEYQGGFIWDFIDQAIYKTLPNGSEFLSYGGDWHDRPSDYEFCGNGIVFADRTLTPKLQTVKHLYSNIKIAVDEKSVTIKNDNLFEDLSAYTFLARVYEDGRKVSESEYHFDVKPGEEATFPVNFVVEASNSEQIYEVACVLREATEWAPKGHEIVRGQYVVEKISTETPVKAPLNVVEGDFNIGIQGQNFSILLSRAQNTLVSAKYNGVEFIEKGPKLSFTRAYTDNDRGAGYPFEMAGWKVAGNYSKVTDTQIQIEDDSVKVTYVHELPGLSDVEVKVTYQVDYKGRIFVTANYDGKAGLPNFPEFGLEFAIGSQFTNLSYYGYGAEESYRDKLPGAYLGRYETSVEKTFAPYLMPQESGNHYGTREFTVSDDNHNGLKFTALNKAFEFSALRNSTEQIENARHQYELQESDATWIKVLAAQMGVGGDDTWGAPVHDEFLLSSADSYQLSFMIEPLN

SEQ ID NO: 35861 - DNA, 3342 bp, Zea mays
  CDS (1)..(3342)
atggctttagctcatgccagcgccatgtttcctccctcgagcccctcacataaaacttgggaggacccgtcattcttcaagtggagaaagcgtgaggcgcatgtaccactgcgctcacaggacacgctggaagcggctctgaagtattggcatgaacggaggaatgtgaactatcacaatgctgacactgctgtctggaacgatgacgctgttcgcggtgctctggaaagtgctgccttttggtccaagggcttaccgtacgccaaatctctaagcggatactggaaattccttctgtcgccttcagcggaaagtattccggagagattctattatgctcattttgatgattcgaactggtcgggtttgccagttccctcaaattggcaaatgcatgggtttgaccgtccaatctacacaaatgtcacatatcctttcccattgaacccaccatttgtgccggctgataatcccacaggttgttacaggacagtctttcacatcccaaaagagtggaaaggtcggaggatcttgctgcactttgaagctgttgattctgcattctttgcttgggtaaatggagtactagttgggtatagccaggatagcagacttcctgctgagtttgaaattactgattgctgccatccttgtgattcggacaaggaaaatgttcttgctgttcaagttatgaggtggagtgatggctcttatcttgaagatcaggatcactggaggttgtctggtattcacagggatgtgctcctactatcaaagccacagatttttatcacagattacttcttcaaagcaaccttggatgaaaatttcagtttagccgatattgaggttgaggtggagattgactcacacaagcaagaccaggagcacgtcccaactttgtctattgaagcaacactcattgataactctggactatctaacagtatagatgctgatctttcatccgctaatgcagtcaatttgaaaccgaagccaaaacgaactcgaagcccttgtcttggttttcatggttatgtacttggtggaaaaatagaaaatccaaaactttggtctagtgagcatcctaacttatacacgcttgttgttctccttaaagatgccaatgggaagcttattgactgtgaatcatgccaagtgggcattcgtaatgtggtcatggcacacaagcaaatgctcgtcaatggatgtcctgttgtgctaagaggtgtcaacagacatgagcaccatccacgccttggaaagacaaatttagaagcatgcatgatcaaggacctgattttgatgaggcaaaacaatatcaatgctgttagaaatagccattacccacagcacccaaggtggtatgagttatgtgacatttttggtctttatgtcatagatgaagccaacattgagacacatggttttgatgaatctaacactttcaaacatcctacacttgaacctatttgggcaaatgcaatgcttgatcgaattgttagcatggtggagagagataagaatcatgcatgcattattgtttggtctccaggaaatgaatcttcatatggacctaatcatgcttccatgtctggttggattcgtgaaagggatccaacaagactcctccattatgagggaggtggttccagaacatcatccacagatattgtgtgccccatgtatatgcgtgtctgggatgttggtaagatagcaaaagatccatctgaaacaaggcctctaattctttgcgaatattcacatgctatgggaaacagtaatgggaatattgatgcgtattggatggccatagacaacacttttggactccaaggaggttttatatgggactgggctgatcagggtttactgaaggaggactcagatgggtctaaattttgggcatatggcggcgactttggagatactccaaatgactccaatttttgcctcaatggcattgtgtggcctgatcggacgattcacccagctgttcatgaagtaaaataccttcaccagcctatcaaaatatcatcagcagataatatgcttaagattgaaaatggacacttttttgagacaacagaagctttggacttcagttgggttcttcatggagatggttgtgtcttgggctctggtccattgaatattccaactttggcaccacaaactagtcagctcatcaacatggaatcatcaccttggtttgccctttggagtgcctgtgcagcaaaagaagtatttttgtctgtgaatgtgaaacaaaggcatgaaacacgatgggctaaagctggtcatctcttggcttcagcacaactgtgtttgcctcagaaaaatggctttgtccccagcgtgatagcattgtccagtagccctttggtctgtgaacgcattggtgataatgtaaccatctgcaagaataatgcctggaaaattaaagtaaacagtcagttgggaacaatcgacagctggaaggtcaacgacgttgagcttatgagcaaggggatactcccatgcttttggcgcgcaccaactgacaacgacaaaggaggtttcttcaccaagccatatgactcgcgatggagagaagccttcctcgacaatgtctcgttccacagcagccagttctctgtcaaggagttgccggacaacaccgtggagttctccaccctctactacggtgttcccgggcacctacccaagcctgacgacgaagcctccgagtccattctcttccgggtgaagatggtctgccggatccacgggtcaggcgacgtggttctcgactacgaggtaaaccccaggagcgacctccctccccttccccgggtgggcgtcgtgttcagcgccgggaggtccctgagccacgtcacgtggtacgggcgcgggcccttcgagtgctacccggaccgcaaggcggcggcgcacgtcggcgtgtacgagagcagcgtggaggagctgcacgtgccgtacattgcccccgtggagtgcggcgggcgggcggacgtcaggtgggtggcactccgcgacgccggcgggctcggcctgtacgcgtcggcgcacggcggctccccgccgatgcagatgagcgcgagctactacggcgccgcggagctggacagggcaacgcacgtccacaggctggtgaagggggacgacatcgaggtgcatcttgaccacaggcacatggggctgggcggcgacgacagctggtcgccgtgcgtgcacgagcagtacctgctgccgccgacgcggtacgccttctccctgcggctctgccccctgctgccgtcgtcgtcgtgccatgacatctacaggtctcagctccccagctga

SEQ ID NO: 35862 - protein, 1113 aa, Zea mays
MALAHASAMFPPSSPSHKTWEDPSFFKWRKREAHVPLRSQDTLEAALKYWHERRNVNYHNADTAVWNDDAVRGALESAAFWSKGLPYAKSLSGYWKFLLSPSAESIPERFYYAHFDDSNWSGLPVPSNWQMHGFDRPIYTNVTYPFPLNPPFVPADNPTGCYRTVFHIPKEWKGRRILLHFEAVDSAFFAWVNGVLVGYSQDSRLPAEFEITDCCHPCDSDKENVLAVQVMRWSDGSYLEDQDHWRLSGIHRDVLLLSKPQIFITDYFFKATLDENFSLADIEVEVEIDSHKQDQEHVPTLSIEATLIDNSGLSNSIDADLSSANAVNLKPKPKRTRSPCLGFHGYVLGGKIENPKLWSSEHPNLYTLVVLLKDANGKLIDCESCQVGIRNVVMAHKQMLVNGCPVVLRGVNRHEHHPRLGKTNLEACMIKDLILMRQNNINAVRNSHYPQHPRWYELCDIFGLYVIDEANIETHGFDESNTFKHPTLEPIWANAMLDRIVSMVERDKNHACIIVWSPGNESSYGPNHASMSGWIRERDPTRLLHYEGGGSRTSSTDIVCPMYMRVWDVGKIAKDPSETRPLILCEYSHAMGNSNGNIDAYWMAIDNTFGLQGGFIWDWADQGLLKEDSDGSKFWAYGGDFGDTPNDSNFCLNGIVWPDRTIHPAVHEVKYLHQPIKISSADNMLKIENGHFFETTEALDFSWVLHGDGCVLGSGPLNIPTLAPQTSQLINMESSPWFALWSACAAKEVFLSVNVKQRHETRWAKAGHLLASAQLCLPQKNGFVPSVIALSSSPLVCERIGDNVTICKNNAWKIKVNSQLGTIDSWKVNDVELMSKGILPCFWRAPTDNDKGGFFTKPYDSRWREAFLDNVSFHSSQFSVKELPDNTVEFSTLYYGVPGHLPKPDDEASESILFRVKMVCRIHGSGDVVLDYEVNPRSDLPPLPRVGVVFSAGRSLSHVTWYGRGPFECYPDRKAAAHVGVYESSVEELHVPYIAPVECGGRADVRWVALRDAGGLGLYASAHGGSPPMQMSASYYGAAELDRATHVHRLVKGDDIEVHLDHRHMGLGGDDSWSPCVHEQYLLPPTRYAFSLRLCPLLPSSSCHDIYRSQLPS

SEQ ID NO: 35863 - DNA, 24 bp, Artificial sequence
  primer
atgaccatgattacggattcactg

SEQ ID NO: 35864 - DNA, 25 bp, Artificial sequence
  primer
ttatttttgacaccagaccaactgg

SEQ ID NO: 35865 - protein, 1252 aa, Artificial sequence
  consensus sequence
  Variant (2)..(2): Xaa in position 2 is any amino acid
  Variant (4)..(4): Xaa in position 4 is any amino acid
  Variant (6)..(6): Xaa in position 6 is any amino acid
  Variant (8)..(25): Xaa in position 8 to 25 is any amino acid
  Variant (26)..(46): Xaa in position 26 to 46 is any or no amino acid
  Variant (49)..(50): Xaa in position 49 to 50 is any amino acid
  Variant (52)..(54): Xaa in position 52 to 54 is any amino acid
  Variant (56)..(58): Xaa in position 56 to 58 is any amino acid
  Variant (59)..(64): Xaa in position 59 to 64 is any or no amino acid
  Variant (66)..(66): Xaa in position 66 is any amino acid
  Variant (68)..(68): Xaa in position 68 is any amino acid
  Variant (70)..(71): Xaa in position 70 to 71 is any amino acid
  Variant (74)..(77): Xaa in position 74 to 77 is any amino acid
  Variant (78)..(84): Xaa in position 78 to 84 is any or no amino acid
  Variant (87)..(88): Xaa in position 87 to 88 is any amino acid
  Variant (90)..(92): Xaa in position 90 to 92 is any amino acid
  Variant (93)..(109): Xaa in position 93 to 109 is any or no amino acid
  Variant (111)..(111): Xaa in position 111 is any amino acid
  Variant (113)..(113): Xaa in position 113 is any amino acid
  Variant (115)..(117): Xaa in position 115 to 117 is any amino acid
  Variant (119)..(131): Xaa in position 119 to 131 is any amino acid
  Variant (132)..(135): Xaa in position 132 to 135 is any or no amino acid
  Variant (137)..(137): Xaa in position 137 is any amino acid
  Variant (140)..(140): Xaa in position 140 is any amino acid
  Variant (142)..(147): Xaa in position 142 to 147 is any amino acid
  Variant (150)..(152): Xaa in position 150 to 152 is any amino acid
  Variant (154)..(154): Xaa in position 154 is any amino acid
  Variant (155)..(157): Xaa in position 155 to 157 is any or no amino acid
  Variant (159)..(162): Xaa in position 159 to 162 is any amino acid
  Variant (165)..(174): Xaa in position 165 to 174 is any amino acid
  Variant (175)..(178): Xaa in position 175 to 178 is any or no amino acid
  Variant (180)..(182): Xaa in position 180 to 182 is any amino acid
  Variant (184)..(184): Xaa in position 184 is any amino acid
  Variant (186)..(186): Xaa in position 186 is any amino acid
  Variant (187)..(187): Xaa in position 187 is any or no amino acid
  Variant (189)..(192): Xaa in position 189 to 192 is any amino acid
  Variant (194)..(194): Xaa in position 194 is any amino acid
  Variant (199)..(199): Xaa in position 199 is any amino acid
  Variant (201)..(203): Xaa in position 201 to 203 is any amino acid
  Variant (204)..(205): Xaa in position 204 to 205 is any or no amino acid
  Variant (208)..(208): Xaa in position 208 is any amino acid
  Variant (212)..(212): Xaa in position 212 is any amino acid
  Variant (214)..(268): Xaa in position 214 to 268 is any amino acid
  Variant (269)..(316): Xaa in position 269 to 316 is any or no amino acid
  Variant (318)..(318): Xaa in position 318 is any amino acid
  Variant (321)..(321): Xaa in position 321 is any amino acid
  Variant (323)..(323): Xaa in position 323 is any amino acid
  Variant (326)..(340): Xaa in position 326 to 340 is any amino acid
  Variant (341)..(347): Xaa in position 341 to 347 is any or no amino acid
  Variant (351)..(361): Xaa in position 351 to 361 is any amino acid
  Variant (362)..(372): Xaa in position 362 to 372 is any or no amino acid
  Variant (375)..(380): Xaa in position 375 to 380 is any amino acid
  Variant (386)..(390): Xaa in position 386 to 390 is any amino acid
  Variant (391)..(391): Xaa in position 391 is any or no amino acid
  Variant (393)..(402): Xaa in position 393 to 402 is any amino acid
  Variant (403)..(403): Xaa in position 403 is any or no amino acid
  Variant (405)..(407): Xaa in position 405 to 407 is any amino acid
  Variant (410)..(411): Xaa in position 410 to 411 is any amino acid
  Variant (413)..(413): Xaa in position 413 is any amino acid
  Variant (416)..(416): Xaa in position 416 is any amino acid
  Variant (418)..(419): Xaa in position 418 to 419 is any amino acid
  Variant (423)..(424): Xaa in position 423 to 424 is any amino acid
  Variant (426)..(427): Xaa in position 426 to 427 is any amino acid
  Variant (429)..(429): Xaa in position 429 is any amino acid
  Variant (431)..(431): Xaa in position 431 is any amino acid
  Variant (433)..(434): Xaa in position 433 to 434 is any amino acid
  Variant (436)..(437): Xaa in position 436 to 437 is any amino acid
  Variant (439)..(440): Xaa in position 439 to 440 is any amino acid
  Variant (442)..(444): Xaa in position 442 to 444 is any amino acid
  Variant (446)..(446): Xaa in position 446 is any amino acid
  Variant (448)..(456): Xaa in position 448 to 456 is any amino acid
  Variant (457)..(488): Xaa in position 457 to 488 is any or no amino acid
  Variant (490)..(490): Xaa in position 490 is any amino acid
  Variant (492)..(497): Xaa in position 492 to 497 is any amino acid
  Variant (499)..(504): Xaa in position 499 to 504 is any amino acid
  Variant (506)..(507): Xaa in position 506 to 507 is any amino acid
  Variant (510)..(514): Xaa in position 510 to 514 is any amino acid
  Variant (521)..(523): Xaa in position 521 to 523 is any amino acid
  Variant (525)..(525): Xaa in position 525 is any amino acid
  Variant (527)..(535): Xaa in position 527 to 535 is any amino acid
  Variant (536)..(537): Xaa in position 536 to 537 is any or no amino acid
  Variant (539)..(539): Xaa in position 539 is any amino acid
  Variant (540)..(543): Xaa in position 540 to 543 is any or no amino acid
  Variant (545)..(547): Xaa in position 545 to 547 is any amino acid
  Variant (550)..(555): Xaa in position 550 to 555 is any amino acid
  Variant (556)..(565): Xaa in position 556 to 565 is any or no amino acid
  Variant (567)..(569): Xaa in position 567 to 569 is any amino acid
  Variant (570)..(570): Xaa in position 570 is any or no amino acid
  Variant (573)..(587): Xaa in position 573 to 587 is any amino acid
  Variant (588)..(612): Xaa in position 588 to 612 is any or no amino acid
  Variant (614)..(614): Xaa in position 614 is any amino acid
  Variant (616)..(616): Xaa in position 616 is any amino acid
  Variant (620)..(620): Xaa in position 620 is any amino acid
  Variant (626)..(627): Xaa in position 626 to 627 is any amino acid
  Variant (629)..(632): Xaa in position 629 to 632 is any amino acid
  Variant (634)..(642): Xaa in position 634 to 642 is any amino acid
  Variant (643)..(647): Xaa in position 643 to 647 is any or no amino acid
  Variant (652)..(652): Xaa in position 652 is any amino acid
  Variant (654)..(654): Xaa in position 654 is any amino acid
  Variant (656)..(656): Xaa in position 656 is any amino acid
  Variant (658)..(667): Xaa in position 658 to 667 is any amino acid
  Variant (668)..(690): Xaa in position 668 to 690 is any or no amino acid
  Variant (697)..(700): Xaa in position 697 to 700 is any amino acid
  Variant (701)..(703): Xaa in position 701 to 703 is any or no amino acid
  Variant (705)..(706): Xaa in position 705 to 706 is any amino acid
  Variant (708)..(710): Xaa in position 708 to 710 is any amino acid
  Variant (713)..(715): Xaa in position 713 to 715 is any amino acid
  Variant (717)..(720): Xaa in position 717 to 720 is any amino acid
  Variant (722)..(722): Xaa in position 722 is any amino acid
  Variant (724)..(724): Xaa in position 724 is any amino acid
  Variant (726)..(749): Xaa in position 726 to 749 is any amino acid
  Variant (750)..(779): Xaa in position 750 to 779 is any or no amino acid
  Variant (781)..(837): Xaa in position 781 to 837 is any amino acid
  Variant (838)..(871): Xaa in position 838 to 871 is any or no amino acid
  Variant (873)..(874): Xaa in position 873 to 874 is any amino acid
  Variant (876)..(896): Xaa in position 876 to 896 is any amino acid
  Variant (897)..(937): Xaa in position 897 to 937 is any or no amino acid
  Variant (939)..(947): Xaa in position 939 to 947 is any amino acid
  Variant (948)..(966): Xaa in position 948 to 966 is any or no amino acid
  Variant (968)..(970): Xaa in position 968 to 970 is any amino acid
  Variant (974)..(979): Xaa in position 974 to 979 is any amino acid
  Variant (980)..(1002): Xaa in position 980 to 1002 is any or no amino acid
  Variant (1004)..(1039): Xaa in position 1004 to 1039 is any amino acid
  Variant (1040)..(1069): Xaa in position 1040 to 1069 is any or no amino acid
  Variant (1071)..(1088): Xaa in position 1071 to 1088 is any amino acid
  Variant (1089)..(1095): Xaa in position 1089 to 1095 is any or no amino acid
  Variant (1097)..(1097): Xaa in position 1097 is any amino acid
  Variant (1099)..(1112): Xaa in position 1099 to 1112 is any amino acid
  Variant (1113)..(1115): Xaa in position 1113 to 1115 is any or no amino acid
  Variant (1117)..(1117): Xaa in position 1117 is any amino acid
  Variant (1120)..(1120): Xaa in position 1120 is any amino acid
  Variant (1122)..(1122): Xaa in position 1122 is any amino acid
  Variant (1124)..(1124): Xaa in position 1124 is any amino acid
  Variant (1126)..(1143): Xaa in position 1126 to 1143 is any amino acid
  Variant (1144)..(1148): Xaa in position 1144 to 1148 is any or no amino acid
  Variant (1150)..(1151): Xaa in position 1150 to 1151 is any amino acid
  Variant (1153)..(1155): Xaa in position 1153 to 1155 is any amino acid
  Variant (1157)..(1157): Xaa in position 1157 is any amino acid
  Variant (1159)..(1206): Xaa in position 1159 to 1206 is any amino acid
  Variant (1207)..(1244): Xaa in position 1207 to 1244 is any or no amino acid
  Variant (1246)..(1248): Xaa in position 1246 to 1248 is any amino acid
  Variant (1249)..(1249): Xaa in position 1249 is any or no amino acid
  Variant (1251)..(1251): Xaa in position 1251 is any amino acid
LXGXWXFXXXXXXXXXXXXXXXXXXXXXXXXXXXXXXXXXXXXXXXVPXXWXXXGXXXXXXXXXPXYXNXXYPXXXXXXXXXXXPPXXPXXXXXXXXXXXXXXXXXXXXPXGXYXXXFXXXXXXXXXXXXXXXXXFXGVXSXXXXXXNGXXXGXXXXSXXXXEFXXXXXXXXXXXXXXNXXXVXVXXWXXXXYXEDQDXWXXXXXGIXRDVXLXXXXXXXXXXXXXXXXXXXXXXXXXXXXXXXXXXXXXXXXXXXXXXXXXXXXXXXXXXXXXXXXXXXXXXXXXXXXXXXXXXXXXXXXXXXXXXXXXXXXXXXWXAEXPXLYXXXXXXXXXXXXXXXXXXXXXXGFRXXXXXXXXXXXXXXXXXXXXXXNGXXXXXXGVNRHXXXXXXGXXXXXXXXXXXDXXXMKXXNXNAXRXXHYPXXPXXYXLXDXXGXXVXXEXXXEXHXXXXXXXXXXXXXXXXXXXXXXXXXXXXXXXXXXXXXXXXXPXWXXXXXXRXXXXXXRXXNHXXXXXWSLGNEXXXGXNXXXXXXXXXXXDXXXXXRXXXYEXXXXXXXXXXXXXXXXDXXXXMYXXXXXXXXXXXXXXXXXXXXXXXXXXXXXXXXXXXXXXXXPXIXCEYXHAMGNXXGXXXXYXXXXXXXXXXXXXXQGGFXWXWXDXXXXXXXXXXXXXXXXXXXXXXXXXXXXXXXXXYGGDFGXXXXXXXDXXFXXXGLXXXDXXXXPXLXEXXXXXXXXXXXXXXXXXXXXXXXXXXXXXXXXXXXXXXXXXXXXXXXXXXXXXXFXXXXXXXXXXXXXXXXXXXXXXXXXXXXXXXXXXXXXXXXXXXXXXXXXXXXXXXXXXXXXXXXXXXXXXXXXXXXXXXXXXXXXXXXXXXQXXLXXXXXXXXXXXXXXXXXXXXXXXXXXXXXXXXXXXXXXXXXXXXXXXXXXXXXXXXXXXXXXGXXXXXXXXXXXXXXXXXXXXXXXXXXXXRXXXDNDXXXXXXXXXXXXXXXXXXXXXXXXXXXXXWXXXXXXXXXXXXXXXXXXXXXXXXXXXXXXXXXXXXXXXXXXXXXXXXXXXXXXXXXXXXXXXXXXGXXXXXXXXXXXXXXXXXXXXXXXXXRXGXXXXXXXXXXXXXXXXXGXGPXEXYXDXXXXXXXXXXXXXXXXXXXXXXXYXXPXXXGXRXXXXXXXXXXXXXXXXXXXXXXXXXXXXXXXXXXXXXXXXXXXXXXXXXXXXXXXXXXXXXXXXXXXXXXXXXXXXXXXXXXXXXXDXXXXGXG

SEQ ID NO: 35866 - protein, 45 aa, Artificial sequence
  protein pattern
  Variant (2)..(4): Xaa in position 2 to 4 is any amino acid
  Variant (5)..(5): Xaa in position 5 is any or no amino acid
  Variant (8)..(9): Xaa in position 8 to 9 is any amino acid
  Variant (11)..(11): Xaa in position 11 is Phe, Ile, Leu or Val
  Variant (13)..(13): Xaa in position 13 is any amino acid
  Variant (14)..(14): Xaa in position 14 is Ile, Leu or Val
  Variant (16)..(16): Xaa in position 16 is any amino acid
  Variant (17)..(17): Xaa in position 17 is Ala, Cys or Ser
  Variant (21)..(27): Xaa in position 21 to 27 is any amino acid
  Variant (28)..(28): Xaa in position 28 is Leu, Met or Val
  Variant (29)..(29): Xaa in position 29 is any amino acid
  Variant (30)..(30): Xaa in position 30 is Asp or Asn
  Variant (31)..(32): Xaa in position 31 to 32 is any amino acid
  Variant (34)..(34): Xaa in position 34 is Phe, Ile, Leu or Met
  Variant (35)..(35): Xaa in position 35 is Phe, Trp or Tyr
  Variant (36)..(36): Xaa in position 36 is Ile, Leu, Met or Val
  Variant (37)..(38): Xaa in position 37 to 38 is any amino acid
  Variant (40)..(40): Xaa in position 40 is Ala, Cys, Ser or Thr
  Variant (41)..(41): Xaa in position 41 is Asp or Asn
  Variant (42)..(42): Xaa in position 42 is Ile, Leu or Val
  Variant (44)..(44): Xaa in position 44 is any amino acid
DXXXXMKXXNXNXXRXXHYPXXXXXXXXXXXXGXXXXXEXXXEXH

SEQ ID NO: 35867 - protein, 43 aa, Artificial sequence
  protein pattern
  Variant (2)..(2): Xaa in position 2 is any amino acid
  Variant (4)..(5): Xaa in position 4 to 5 is any amino acid
  Variant (6)..(12): Xaa in position 6 to 12 is any or no amino acid
  Variant (15)..(15): Xaa in position 15 is any amino acid
  Variant (16)..(16): Xaa in position 16 is Ala, Cys or Ser
  Variant (17)..(17): Xaa in position 17 is Ile or Val
  Variant (18)..(18): Xaa in position 18 is Phe, Ile, Leu or Val
  Variant (19)..(19): Xaa in position 19 is any amino acid
  Variant (22)..(22): Xaa in position 22 is any amino acid
  Variant (26)..(26): Xaa in position 26 is Ala, Cys or Ser
  Variant (27)..(28): Xaa in position 27 to 28 is any amino acid
  Variant (30)..(30): Xaa in position 30 is any amino acid
  Variant (31)..(31): Xaa in position 31 is Ala, Gly, Asn or Thr
  Variant (32)..(42): Xaa in position 32 to 42 is any amino acid
  Variant (43)..(43): Xaa in position 43 is Asp or Val
VXRXXXXXXXXXNHXXXXXWSXGNEXXXGXXXXXXXXXXXXXX

SEQ ID NO: 35868 - protein, 20 aa, Artificial sequence
  protein pattern
  Variant (2)..(2): Xaa in position 2 is Ala, Cys or Ser
  Variant (3)..(3): Xaa in position 3 is any amino acid
  Variant (4)..(4): Xaa in position 4 is Ala, Gly or Ser
  Variant (5)..(5): Xaa in position 5 is Ser or Thr
  Variant (6)..(6): Xaa in position 6 is Phe, His, Trp or Tyr
  Variant (7)..(7): Xaa in position 7 is Phe, Ile, Leu or Val
  Variant (12)..(12): Xaa in position 12 is any amino acid
  Variant (14)..(16): Xaa in position 14 to 16 is any amino acid
  Variant (17)..(18): Xaa in position 17 to 18 is any or no amino acid
WXXXXXXEDQDXWXXXXXGI

SEQ ID NO: 35869 - protein, 21 aa, Artificial sequence
  protein pattern
  Variant (2)..(2): Xaa in position 2 is any amino acid
  Variant (3)..(3): Xaa in position 3 is Ile, Leu or Val
  Variant (4)..(4): Xaa in position 4 is any amino acid
  Variant (8)..(8): Xaa in position 8 is any amino acid
  Variant (14)..(14): Xaa in position 14 is Gly or Ser
  Variant (15)..(15): Xaa in position 15 is any amino acid
  Variant (17)..(20): Xaa in position 17 to 20 is any amino acid
PXXXCEYXHAMGNXXGXXXXY

SEQ ID NO: 35870 - protein, 32 aa, Artificial sequence
  protein pattern
  Variant (2)..(2): Xaa in position 2 is any amino acid
  Variant (3)..(3): Xaa in position 3 is Ala, Gly or Ser
  Variant (4)..(4): Xaa in position 4 is Cys or Val
  Variant (5)..(5): Xaa in position 5 is any amino acid
  Variant (6)..(6): Xaa in position 6 is Ala, Asn, Ser or Thr
  Variant (7)..(10): Xaa in position 7 to 10 is any amino acid
  Variant (11)..(11): Xaa in position 11 is Phe, Trp or Tyr
  Variant (12)..(12): Xaa in position 12 is any amino acid
  Variant (15)..(17): Xaa in position 15 to 17 is any amino acid
  Variant (19)..(21): Xaa in position 19 to 21 is any amino acid
  Variant (22)..(22): Xaa in position 22 is Asp or Gly
  Variant (23)..(23): Xaa in position 23 is Ala, Ser or Thr
  Variant (24)..(27): Xaa in position 24 to 27 is any amino acid
  Variant (28)..(28): Xaa in position 28 is Ala, Asp or Glu
  Variant (29)..(29): Xaa in position 29 is Phe or Tyr
  Variant (30)..(30): Xaa in position 30 is any amino acid
  Variant (31)..(31): Xaa in position 31 is Ile, Leu or Val
  Variant (32)..(32): Xaa in position 32 is Ala, Gly, Gln, Ser or Thr
FXXXXXXXXXXXNGXXXGXXXXXXXXXXXXXX

SEQ ID NO: 35871 - protein, 28 aa, Artificial sequence
  protein pattern
  Variant (2)..(2): Xaa in position 2 is Phe, Ile or Leu
  Variant (3)..(3): Xaa in position 3 is Lys or Arg
  Variant (4)..(13): Xaa in position 4 to 13 is any amino acid
  Variant (14)..(14): Xaa in position 14 is Phe, Ile, Leu or Val
  Variant (16)..(18): Xaa in position 16 to 18 is any amino acid
  Variant (19)..(19): Xaa in position 19 is Ile, Leu or Val
  Variant (20)..(20): Xaa in position 20 is any amino acid
  Variant (21)..(21): Xaa in position 21 is Phe, Ile, Leu or Val
  Variant (22)..(22): Xaa in position 22 is any amino acid
  Variant (28)..(28): Xaa in position 28 is Asp or Glu
GXXXXXXXXXXXXXNXXXXXXXGVNRHX

SEQ ID NO: 35872 - protein, 11 aa, Artificial sequence
  protein pattern
  Variant (3)..(3): Xaa in position 3 is any amino acid
  Variant (4)..(4): Xaa in position 4 is Ala, Ile or Val
  Variant (6)..(6): Xaa in position 6 is Asp or Glu
  Variant (8)..(8): Xaa in position 8 is any amino acid
  Variant (9)..(9): Xaa in position 9 is Asp or Asn
  Variant (10)..(10): Xaa in position 10 is any amino acid
  Variant (11)..(11): Xaa in position 11 is Ala, Gly, Asn or Ser
GGXXWXWXXXX

SEQ ID NO: 35873 - protein, 10 aa, Artificial sequence
  protein pattern
  Variant (2)..(2): Xaa in position 2 is any amino acid
  Variant (5)..(5): Xaa in position 5 is any amino acid
  Variant (7)..(7): Xaa in position 7 is Cys, Asn or Ser
  Variant (9)..(9): Xaa in position 9 is any amino acid
GXGPXEXYXD

SEQ ID NO: 35874 - protein, 9 aa, Artificial sequence
  protein pattern
  Variant (2)..(2): Xaa in position 2 is Asn, Ser or Thr
  Variant (5)..(5): Xaa in position 5 is any amino acid
  Variant (7)..(7): Xaa in position 7 is any amino acid
WXAEXPXLY

SEQ ID NO: 35875 - DNA, 354 bp, Escherichia coli
  CDS (1)..(354): transl_table=11
atgaagtatgttgatggttttgtggttgccgttcctgccgataaaaaggatgcctatcgggaaatggccgctaaggctgcgccattgtttaaagagtttggcgcgcttcgtattgtcgaatgctgggccagcgatgtaccggatggcaaagtgaccgattttcgtatggcggtgaaagcggaagagaatgaagaggttgtctttagctggattgaatacccttcaaaagaggtccgcgacgctgctaatcaaaagatgatgtcggacccacggatgaaagagttcggcgagtccatgccgtttgacggcaagcgaatgatctatggcggattcgagtcaatcatcgacgaataa

SEQ ID NO: 35876 - protein, 117 aa, Escherichia coli
MKYVDGFVVAVPADKKDAYREMAAKAAPLFKEFGALRIVECWASDVPDGKVTDFRMAVKAEENEEVVFSWIEYPSKEVRDAANQKMMSDPRMKEFGESMPFDGKRMIYGGFESIIDE

SEQ ID NO: 35877 - DNA, 366 bp, Legionella pneumophila
  CDS (1)..(366): transl_table=11
atggaggtttttatgagttatgttgatggatttgtcgctgcagtcccaaaggctaataaagaaaaatacgttgagcatgcaacaaaagctgccgtggtattcaaagagcatggtgctttgcgattggttgaatgttggggagatgatgtacctgaaggcaaaatcacttcttttcctatggctgtccagtgcaaagaagatgaaacggttgttttttcctggatcctttggccctccaggcaagttcgtgacgcaggaatgaaaaaagtcatggaagatcctcgtttaaaacctgacattaaccccatgccttttgatggcaaacgtttgatttatggaggattcaacatagtggttgatatctag

SEQ ID NO: 35878 - protein, 121 aa, Legionella pneumophila
MEVFMSYVDGFVAAVPKANKEKYVEHATKAAVVFKEHGALRLVECWGDDVPEGKITSFPMAVQCKEDETVVFSWILWPSRQVRDAGMKKVMEDPRLKPDINPMPFDGKRLIYGGFNIVVDI

SEQ ID NO: 35879 - DNA, 354 bp, Legionella pneumophila
  CDS (1)..(354): transl_table=11
atgagttatgttgatggatttgtcgctgcagtcccaaaggctaataaagaaaaatacgttgagcatgcaacaaaagctgccgtggtattcaaagagcatggtgctttgcgattggttgaatgttggggagatgatgtacctgaaggcaaaatcacttcttttcctatggctgtccagtgcaaagaagatgaaacggttgttttttcctggatcctttggccctccaggcaagttcgtgacgcaggaatgaaaaaagtcatggaagatcctcgtttaaaacctgacattaaccccatgccttttgatggcaaacgtttgatttatggaggattcaacatagtggttgatatctag

SEQ ID NO: 35880 - protein, 117 aa, Legionella pneumophila
MSYVDGFVAAVPKANKEKYVEHATKAAVVFKEHGALRLVECWGDDVPEGKITSFPMAVQCKEDETVVFSWILWPSRQVRDAGMKKVMEDPRLKPDINPMPFDGKRLIYGGFNIVVDI

SEQ ID NO: 35881 - DNA, 372 bp, Mesorhizobium loti MAFF303099
  CDS (1)..(372): transl_table=11
atgtcctatgtcgacggtttcgtgcttgccgtgccaaaggccaaactcgatgactacaagaagctggccaacctcgcaggccccatatggatggaacacggcgcgctggcttatgtcgaatgcatcggcgatgacgtgccctatggcgagctgacctcgtttccgcgtgccgttcaggcaaaggacgacgagatcgtcgtcttcgcctgggcggtctatgaatccaggcaaagccgcgacgcggtgatggccaaggtgatggccgatccgcgtttgacacccgatttgggacccatgcccttcgatatgaagcgcatgatcttcggcggcttccagcctttcatcgagctgcagtcgcccgctgccgcgtaa

SEQ ID NO: 35882 - protein, 123 aa, Mesorhizobium loti MAFF303099
MSYVDGFVLAVPKAKLDDYKKLANLAGPIWMEHGALAYVECIGDDVPYGELTSFPRAVQAKDDEIVVFAWAVYESRQSRDAVMAKVMADPRLTPDLGPMPFDMKRMIFGGFQPFIELQSPAAA

SEQ ID NO: 35883 - DNA, 714 bp, Mesorhizobium loti MAFF303099
  CDS (1)..(714): transl_table=11
atgaactatatcgcaggatttgtcgccgccgtccccgccgccagcaaggaagcctatcgcaggcatgtcaccgaggcggcatcggtgctgaaggaattcggcacgacccggatggtcgaagcctggggtgacgacgtgcccggcggcaagaccaccgacttcaagcgcgccgtgaaggcaacgtcggacgaggtcgtcatcttttcgtggcacgaatatcccgacaaggcagcagcggacgccgcctaccacacgatgatgagcgatccgcgtctggcgaagatcgtcgcaaccatgcccttcgacggccagcgcatgatgacaggcggcttcgcatcgatcatcgacgagggaatttccggcaagcccggctatattgacggctcgctggtgccggttcccatcgccaacaaggccgcctacctggccgtggcgtcaaagcatgccgccgtgatcaaggaattcggcgccacccgcatcgtcgaagcctggggcgaagacatctccgacggcgaggtcaccgactacaggacagcggtgaaggcgacggacggggaagccatcgtctactcctgggtggaatggccgtcgaagcaggttcgtgacgaaggctggaagaaggtgatttccgatccgcgcatgtatgccgacatcaagccctatgacaacggacgaagggtccatggcggcttcgcgccgatcctcgacgcctga

SEQ ID NO: 35884 - protein, 237 aa, Mesorhizobium loti MAFF303099
MNYIAGFVAAVPAASKEAYRRHVTEAASVLKEFGTTRMVEAWGDDVPGGKTTDFKRAVKATSDEVVIFSWHEYPDKAAADAAYHTMMSDPRLAKIVATMPFDGQRMMTGGFASIIDEGISGKPGYIDGSLVPVPIANKAAYLAVASKHAAVIKEFGATRIVEAWGEDISDGEVTDYRTAVKATDGEAIVYSWVEWPSKQVRDEGWKKVISDPRMYADIKPYDNGRRVHGGFAPILDA

SEQ ID NO: 35885 - DNA, 354 bp, Sinorhizobium meliloti 1021
  CDS (1)..(354): transl_table=11
atggcgtatgtggacggttttctcgttgcagtaccgacggccaacatagaggcctacaagaagctggcgagcgcggcgggcgcggtgtggaaggagcatggcgcgctcaattacgtcgaatgcctcgcagacgacgtgccctatggcgaactcacatcattcccgcgcgcggttcaggcaaaggacgacgagaccgtcgtcttctcgtggatcgtctaccggtcgcgtcaggaccgggacgcgatcgtcgccaaggtaatggcggatccgagactccagggcgacgaatggaagtccatcttcgatggaaaacgcatgatctatggcgggttcgagccctttctcgaattatag

SEQ ID NO: 35886 - protein, 117 aa, Sinorhizobium meliloti 1021
MAYVDGFLVAVPTANIEAYKKLASAAGAVWKEHGALNYVECLADDVPYGELTSFPRAVQAKDDETVVFSWIVYRSRQDRDAIVAKVMADPRLQGDEWKSIFDGKRMIYGGFEPFLEL

SEQ ID NO: 35887 - DNA, 366 bp, Methanosarcina mazei Go1
  CDS (1)..(366): transl_table=11
atggaaaagtacgtggacggatttttgattcctatcgctaaagacaaggtaaacaaatacagagaaattgcccaaaaatcaagtcagatatggaaagatcttggcgctttagagtattacgaatgtataggggacgacctggacatagaagaactggtttcttttaaaaaagtagttaatgcctctgaagaagaaaccgtaattttctcatggattgtctacgaatcaaaagagcagagagacaaagtaaatgaagcagttatgaatgacccgagaatgaaagaaatgatggaaaccagcgaatatgatctgtttgattacaggcgcatgtcatatggggggttcaaaacactggtgagtctttaa

SEQ ID NO: 35888 - protein, 121 aa, Methanosarcina mazei Go1
MEKYVDGFLIPIAKDKVNKYREIAQKSSQIWKDLGALEYYECIGDDLDIEELVSFKKVVNASEEETVIFSWIVYESKEQRDKVNEAVMNDPRMKEMMETSEYDLFDYRRMSYGGFKTLVSL

SEQ ID NO: 35889 - DNA, 369 bp, Xanthomonas campestris pv. campestris str. ATCC 33913
  CDS (1)..(369): transl_table=11
atgtcgtatatcgatgggtttgtgcttgccgtgcccactgccaacaaagagaagtttctcgaacacgcccgtaccggcgatgcgatctgcctggagcatggcgcgctgcgggtggtggaatgctggggcgacgatgtggcccatgggaagcagaccgacttctaccgcgccgtggaagccagcgcggacgaaaccgtggtgttttcctggatcgaatggccagacaaggccacccgcgatgccggcatgcagaagatgatggacgacccgcgcatggatccggagaacaacccgatgccgttcgacggcaggcgcatgatctacggcggcttcgtgccggtcgtcacgctgggcaaggcggcccgctga

SEQ ID NO: 35890 - protein, 122 aa, Xanthomonas campestris pv. campestris str. ATCC 33913
MSYIDGFVLAVPTANKEKFLEHARTGDAICLEHGALRVVECWGDDVAHGKQTDFYRAVEASADETVVFSWIEWPDKATRDAGMQKMMDDPRMDPENNPMPFDGRRMIYGGFVPVVTLGKAAR

SEQ ID NO: 35891 - DNA, 366 bp, Xanthomonas axonopodis pv. citri str. 306
  CDS (1)..(366): transl_table=11
atgtcgtatatcgatggtttcgtgcttgccgtccccacggccaacaaagaagcctttatcgcgcatgcccgcatgggcgatgcggtcatcatggagtacggtgccctgcgggtggtggagtgttggggtgacgatgtccaagcggggcaatggaccgacttctatcgcgcagtggatgccaccgccgaagagaccgtggtgttttcctggatcgaatggccggacaaggccacccgggatgaaggcatgcgcaagatgatggaagacccacgcatggacccgtcggtcaatccgatgccgttcgatggcaagcgcatggtctacggtggcttcgtaccgatcgtggcgctgggtcaatcggcttga

SEQ ID NO: 35892 - protein, 121 aa, Xanthomonas axonopodis pv. citri str. 306
MSYIDGFVLAVPTANKEAFIAHARMGDAVIMEYGALRVVECWGDDVQAGQWTDFYRAVDATAEETVVFSWIEWPDKATRDEGMRKMMEDPRMDPSVNPMPFDGKRMVYGGFVPIVALGQSA

SEQ ID NO: 35893 - DNA, 366 bp, Bradyrhizobium japonicum USDA 110
  CDS (1)..(366): transl_table=11
gtgatgccctatgtcgatggtttcgtgctggccgtgccgaaggacaagatcgaggcctacaaggcgctggcgaagaccgcctgcgcggtctggatggagcacggcgcgctcgattatgtcgaatgcatcggcgacgacgttccctatggcgagctgacatcgtttccgcgcgcggtgatggcgaaggaggatgagctcgtggtgttctcctggatcgtctatcgcgaccggaagacgcgcgatgccgtcaacaagaaggtgatggcggaccctcggctgaaattggacggcatgccattcgacggcaagcgcatgatctatggcggcttcacgacgctgctgcgcgcgagcgatgttatcagttga

SEQ ID NO: 35894 - protein, 121 aa, Bradyrhizobium japonicum USDA 110
MMPYVDGFVLAVPKDKIEAYKALAKTACAVWMEHGALDYVECIGDDVPYGELTSFPRAVMAKEDELVVFSWIVYRDRKTRDAVNKKVMADPRLKLDGMPFDGKRMIYGGFTTLLRASDVIS

SEQ ID NO: 35895 - DNA, 363 bp, Bradyrhizobium japonicum USDA 110
  CDS (1)..(363): transl_table=11
atgtatatcgcaggcttcgttattcccgtgccggaggacaagatggaggcctatcgccgatgggccgagaatggctcagctctgttcagggaatacgggtgtctggagatcgtcgagtcctgggaggacaacgtccccagtggcacgcacaccgactttcgccgcgccgtgaatgcgaaggacggcgagaagatcgtcttcacctggcaggtctggcccgacaaggcaacgctcgaggccgccgaagccgggatgggcgacgacaagcgatttgaggctgcgggcgacattccgttcgatccgaagcgcctgatcctgggctgcttcagcccgatacacgtcatggggcgccaggaccggtaa

SEQ ID NO: 35896 - protein, 120 aa, Bradyrhizobium japonicum USDA 110
MYIAGFVIPVPEDKMEAYRRWAENGSALFREYGCLEIVESWEDNVPSGTHTDFRRAVNAKDGEKIVFTWQVWPDKATLEAAEAGMGDDKRFEAAGDIPFDPKRLILGCFSPIHVMGRQDR

SEQ ID NO: 35897 - DNA, 387 bp, Nitrosomonas europaea ATCC 19718
  CDS (1)..(387): transl_table=11
atgacttacgtagatggatttgttttacctgtgccggaaggcaaaattgacgcttaccgtcaaatggcagaaagcgcaggaaaaatctggatggaacacggtgcgctccaatacaaggaatgcgtgctggaagatgccaaaccggaaatgcccgaagacgcacctgaaacatgcaaaataacgccgttcggcaaactggcggggacaaaagatggagagactgttatttttgcctttatcgtctataaatcacgcgaacaccgggatgaagtgaacaaaaaagtgatggccgacccgcgcatgcaagaagcttgtgatgaaaacaacatgccgttcgatccctcacggatggcctacggtggatttaaggcccttgtggatttatag

SEQ ID NO: 35898 - protein, 128 aa, Nitrosomonas europaea ATCC 19718
MTYVDGFVLPVPEGKIDAYRQMAESAGKIWMEHGALQYKECVLEDAKPEMPEDAPETCKITPFGKLAGTKDGETVIFAFIVYKSREHRDEVNKKVMADPRMQEACDENNMPFDPSRMAYGGFKALVDL

SEQ ID NO: 35899 - DNA, 357 bp, Bordetella pertussis Tohama I
  CDS (1)..(357): transl_table=11
atggatcaatacgtagacggtttcctgctgtcggtgcccaacgacaagctggacacctaccggcagatggccaccaaggccggcgcgatctggaaagagcatggcgcgctggcctattgcgaatgcacgggcgacgacctggacatcgaaggcatggtgtcgttcaagacctcggccgcggcgcgcgagggcgaaaccgtggtgttcgcctggatcgtctacccgagccgggccgagcgcgaccgcatcaatgcggcggtcatggccgacccgcgcctgaaggagcagtgcgtcgacggcgtgttcgattgcaagcgcatggcctacggcgggttcaagacgctggtcaatctatga

SEQ ID NO: 35900 - protein, 118 aa, Bordetella pertussis Tohama I
MDQYVDGFLLSVPNDKLDTYRQMATKAGAIWKEHGALAYCECTGDDLDIEGMVSFKTSAAAREGETVVFAWIVYPSRAERDRINAAVMADPRLKEQCVDGVFDCKRMAYGGFKTLVNL

SEQ ID NO: 35901 - DNA, 357 bp, Bordetella bronchiseptica RB50
  CDS (1)..(357): transl_table=11
atggatcagtacgtagacggtttcctgctgtcggtgcccaacgacaagctggacacctaccggcagatggccaccaaggccggcgcgatctggaaagagcatggcgcgctggcctattgcgaatgcacgggcgacgacctggacatcgaaggcatggtgtcgttcaagacctcggccgcggcgcgcgagggcgaaaccgtggtgttcgcctggatcgtctacccgaaccgggccgagcgcgaccgcatcaatgcggcggtcatggccgacccgcgcctgaaggaacagtgcgtcgagggcgtgttcgatttcaagcgcatggcctacggcgggttcaagacgctggtcaatctatga

SEQ ID NO: 35902 - protein, 118 aa, Bordetella bronchiseptica RB50
MDQYVDGFLLSVPNDKLDTYRQMATKAGAIWKEHGALAYCECTGDDLDIEGMVSFKTSAAAREGETVVFAWIVYPNRAERDRINAAVMADPRLKEQCVEGVFDFKRMAYGGFKTLVNL

SEQ ID NO: 35903 - DNA, 360 bp, Bdellovibrio bacteriovorus HD100
  CDS (1)..(360): transl_table=11
atggcaaaatacgttgatggatttgtactgactgttcccaaaaaaaacatggcgcagtatcgcaagatggcgatgcaggcctcaaaaatatttttgaagcacggagccctggaatacaaggaatgtgtcggggatgacatgaatatcgattgggcgctgccgtttccaaagctgaccaaggcgaaatccgatgaagtgattgtgttttcctggatcacttacaaatcccgtgctgcccgggatcgcgccaacaaagcgatgatgaacgatccgaaaatgaaagaaatgagtccggacaagatgccattcaatatgaagcgcatggcctacggtggattcaaaacgatcgtggacaagtag

SEQ ID NO: 35904 - protein, 119 aa, Bdellovibrio bacteriovorus HD100
MAKYVDGFVLTVPKKNMAQYRKMAMQASKIFLKHGALEYKECVGDDMNIDWALPFPKLTKAKSDEVIVFSWITYKSRAARDRANKAMMNDPKMKEMSPDKMPFNMKRMAYGGFKTIVDK

SEQ ID NO: 35905 - DNA, 354 bp, Pseudomonas fluorescens PfO-1
  CDS (1)..(354): transl_table=11
atggcttacatcgatgttttcgtggcgcccgtgccgaatgccaaccgggaacagtacaaaaaacactgcgaaatcgccgcgaagctgttcaaggaatacggcgcgctggaggtgattcagggctggggcgatgacgtgccggacggcaaggtcacctctttcccgatggcagtgaaactcaaggaaggcgaaaccgtatccgccggctggctggtctggccggacaaggccacccgcgacaccggcatggcgaaaatgatggaagacccgcgcatgcaaccggacgccaatccgatgccgtttgatgggcagcggatgatcttcggtggcttcaaggacattctcgagccttga

SEQ ID NO: 35906 - protein, 117 aa, Pseudomonas fluorescens PfO-1
MAYIDVFVAPVPNANREQYKKHCEIAAKLFKEYGALEVIQGWGDDVPDGKVTSFPMAVKLKEGETVSAGWLVWPDKATRDTGMAKMMEDPRMQPDANPMPFDGQRMIFGGFKDILEP

SEQ ID NO: 35907 - DNA, 348 bp, Rhodobacter sphaeroides 2.4.1
  CDS (1)..(348): transl_table=11
atgccctatgtcgacggattcgtctgcgccgtcccggtcgagaaccggcagaaatacatcgaccatgcgctgttcgcggcccggaagttcaaggaactgggggcgctgcaggtggtggaatgctggggcgacgatgtgcccgagggcaagctcacctcgttccgcatggcggtgaagcaggaggagggcgaggcggccatcttctcctgggtggtctggccctcgaaggaggtgcgcaacgcggcctggcagaagatgatggaagacaccgagatggcgggcatggagatgccgttcgatggcaagcggatgatctacggcggcttcgagcaggtcgtggaggtctga

SEQ ID NO: 35908 - protein, 115 aa, Rhodobacter sphaeroides 2.4.1
MPYVDGFVCAVPVENRQKYIDHALFAARKFKELGALQVVECWGDDVPEGKLTSFRMAVKQEEGEAAIFSWVVWPSKEVRNAAWQKMMEDTEMAGMEMPFDGKRMIYGGFEQVVEV

SEQ ID NO: 35909 - DNA, 354 bp, Saccharophagus degradans 2-40
  CDS (1)..(354): transl_table=11
atgacttacattgatggatttgtggccgctgtgccaaccgctaataaagacaaatatatcgctcactcaaaattgtctatcgcggtatttaaagatcacggtgcgcttaaggttattgaagcatggggggaaaacgtgccagatggcgaggtaacgtcctttcctagggccgtgcagtgtaaaagtaatgagacagttgtcttctctacggttatttggccatccaaagccgccagagatgctggctgggaagctattatggccgatgaaagaatggacccaaataacaatcccatgccctttgatggcaagcgcctaatttttggcggcttcgatgttattgccgaagaatag

SEQ ID NO: 35910 - protein, 117 aa, Saccharophagus degradans 2-40
MTYIDGFVAAVPTANKDKYIAHSKLSIAVFKDHGALKVIEAWGENVPDGEVTSFPRAVQCKSNETVVFSTVIWPSKAARDAGWEAIMADERMDPNNNPMPFDGKRLIFGGFDVIAEE

SEQ ID NO: 35911 - DNA, 738 bp, Myxococcus xanthus DK 1622
  CDS (1)..(738): transl_table=11
atggcctacatcgacggattcgtgatcgcagtcccctcggcgaacaaggaggcgtaccggcaggccgctattgctgccgcgccgctgtacaaggagtttggtgcgacgcgcttcgttgagaactggggggacgacgtccctgaaggcaaggtcaccgacctgcggcgcgcggtgaaggccgagccggatgaggtcatcgtcttctcctggattgagtaccccagcaaggcggtgcgcgacgaagcgaacgcgaaggcaatgcgtgacccaaggatgcaggcgatgggcgcgaacatatccttcgatgggaagcggatgatcttcggcggcttcgttcccagcctccatgagggcggagcgggcaggcccggctatgtcgatggctccctcgtgccggtgccggttggaaacaaagaggcctaccatgtcatcgcctcccgtctcgcggcggtgctgctggagcatggtgccacgcgcgtcgtcgacgcgtggggagacgacgtccccgacgggaaggtcactgacttcaaaggcgcggtgaaggccaccgcggatgagcaggttgtcttcgcttggattgagtggccgtcgaaggaggcgcgcaacgccgggtgggggaaggccatggccgatccgcgcatgcacccgggcagcatgccctttgacgagggccgcaggtcccacggcggtttcgtgccgatgctggttgagacggcggcgacggacacgggcgcatag

SEQ ID NO: 35912 - protein, 245 aa, Myxococcus xanthus DK 1622
MAYIDGFVIAVPSANKEAYRQAAIAAAPLYKEFGATRFVENWGDDVPEGKVTDLRRAVKAEPDEVIVFSWIEYPSKAVRDEANAKAMRDPRMQAMGANISFDGKRMIFGGFVPSLHEGGAGRPGYVDGSLVPVPVGNKEAYHVIASRLAAVLLEHGATRVVDAWGDDVPDGKVTDFKGAVKATADEQVVFAWIEWPSKEARNAGWGKAMADPRMHPGSMPFDEGRRSHGGFVPMLVETAATDTGA

SEQ ID NO: 35913 - DNA, 348 bp, Mesorhizobium sp. BNC1
  CDS (1)..(348): transl_table=11
atggcgtatgtagatggcttcatcatcccgctgccaaacgacagggtcgacgattacaagcggcaggctcaacttggtgagcaggtttggcgtgagcacggtgcaatcggatatgtagaatgtctcggcgacgacgtaccatatggcgaggtgacgtcatttccgcgggcggtgcaggcaaaggaggacgagattgtcgttttctcctggatcatctacaagtcgcgcgagcaccgcgacgaggttttggccaaggtaatggctgacccccgcatgaatgcccaagagatgccttttgatgggaaacgactgatcttcggtggcttccagccgtttcttggcctttga

SEQ ID NO: 35914 - protein, 115 aa, Mesorhizobium sp. BNC1
MAYVDGFIIPLPNDRVDDYKRQAQLGEQVWREHGAIGYVECLGDDVPYGEVTSFPRAVQAKEDEIVVFSWIIYKSREHRDEVLAKVMADPRMNAQEMPFDGKRLIFGGFQPFLGL

SEQ ID NO: 35915 - DNA, 354 bp, Shewanella sp. MR-4
  CDS (1)..(354): transl_table=11
atgtcatatgtcgatggatttgtagtggcagtaccaacagcgaataaagagctgtacatggcacacattgaaatagcagcagaaatgttcaaagattttggagccttaaaggttgtggaaacttggggaagtgaagtcccagatggtgaagtaacatcatttccaatggcagttaaagctcaagacaacgaaaccgtcgtgttctcttggattatctggccttcaaaagaagtccgtgactctgcttggcaacgcataatggatgaccctcgaatgagccccgaaaataaccccatgccatttgatggtaagcgcatcatttatggcggttttgatgtgattttggacaaatag

SEQ ID NO: 35916 - protein, 117 aa, Shewanella sp. MR-4
MSYVDGFVVAVPTANKELYMAHIEIAAEMFKDFGALKVVETWGSEVPDGEVTSFPMAVKAQDNETVVFSWIIWPSKEVRDSAWQRIMDDPRMSPENNPMPFDGKRIIYGGFDVILDK

SEQ ID NO: 35917 - DNA, 717 bp, Hyphomonas neptunium ATCC 15444
  CDS (1)..(717): transl_table=11
gtgacatatgtaagtggatttcttctggccgtgccgacggccaacaaggacgcctatcgcaagcaggccgaagaggcctggccgatgttcaagggctatggcgcggtggctatggtggaaggctggggggatgacgtgccccagggcaaggtcaactgcatcaactcggccgtgaagcggaagccggacgagaccgccatgttctcatgggtggtctggccggacaagaagaccagcgatgaagccgagcagaagatgatggccgacatggagggcaaggaatttccagaaatgccgtttgatggcaagcggatgattgtcggcggctttgaaaccatcgtgggcgatgcaacggtcaagaccggctatatcgacgggacggttatcccggtgccggcggacaagcggggcgcctataccgccgcctcacacaagatggcggagctgttccaggagtttggcgccatttcggtcgtcgatgcctggggggataacctgcctgagggcaaggtcaatgatttccacactgccaccctgcgcaagcccgaagaagcggtggtgttctcctggatcaactggaaggacaaggccacgcgcgatgcgggctgggaaaagatcatggaagacccgcgcatgcaggagtttggtccgcatacggtcggggccgacatgggccgcatgatcttcggcagctttgttccccttgtggatgtctga

SEQ ID NO: 35918 - protein, 238 aa, Hyphomonas neptunium ATCC 15444
MTYVSGFLLAVPTANKDAYRKQAEEAWPMFKGYGAVAMVEGWGDDVPQGKVNCINSAVKRKPDETAMFSWVVWPDKKTSDEAEQKMMADMEGKEFPEMPFDGKRMIVGGFETIVGDATVKTGYIDGTVIPVPADKRGAYTAASHKMAELFQEFGAISVVDAWGDNLPEGKVNDFHTATLRKPEEAVVFSWINWKDKATRDAGWEKIMEDPRMQEFGPHTVGADMGRMIFGSFVPLVDV

SEQ ID NO: 35919 - DNA, 354 bp, Rhizobium leguminosarum bv. viciae 3841
  CDS (1)..(354): transl_table=11
atgtcctatgtcgatggtttcatcgtggcggtgccgaaggagaatatcgaggcctacaaggaattctcgacctttgcaggctcgatctggaaggaatatggcgccctcgaatatgtcgaatgcgtcggcgacgacgtgccttacggcgagttgacctcttttccacgcgccgtgcaggcgaaggaggacgaggtggtggtgttttcctggatcgtatacggctcgcgccaggagcgtgacgatatcaatgccaaggtgatggacgattcccggcttaagggcgaccaatggcagatgccattcgacggcaagcggatgatctatggcggcttcgagatgctgctcaagctctga

SEQ ID NO: 35920 - protein, 117 aa, Rhizobium leguminosarum bv. viciae 3841
MSYVDGFIVAVPKENIEAYKEFSTFAGSIWKEYGALEYVECVGDDVPYGELTSFPRAVQAKEDEVVVFSWIVYGSRQERDDINAKVMDDSRLKGDQWQMPFDGKRMIYGGFEMLLKL

SEQ ID NO: 35921 - DNA, 354 bp, Acidovorax sp. JS42
  CDS (1)..(354): transl_table=11
atggaacccgacagctacatcgacggcttcgtgcttgccgtccccactgccaacaaggaaacctttcgccagcacgccagcgaggccgcgcagatcttcaagaagcacggcgccctggagatcgtggaatgctggggcgacgacgtgcccgagggcaagctcacctccatgcccctggccgtgcagcgcaaggacgacgagaccgtggtcttttcctgggtcgtgtggccctcgcgcgcggtacgcgatgccggcatgcaggccgtcatggacgacccgctctgccccaaggacatgcctttcgacggccagcgtgtgatttacggcggttttcgcgtgctggtacacgcgtaa

SEQ ID NO: 35922 - protein, 117 aa, Acidovorax sp. JS42
MEPDSYIDGFVLAVPTANKETFRQHASEAAQIFKKHGALEIVECWGDDVPEGKLTSMPLAVQRKDDETVVFSWVVWPSRAVRDAGMQAVMDDPLCPKDMPFDGQRVIYGGFRVLVHA

SEQ ID NO: 35923 - DNA, 360 bp, Erythrobacter sp. NAP1
  CDS (1)..(360): transl_table=11
atgtatgtggcaatcgctgcgctttccgtgtccgaagaaaacaaggatgcctacataaaggccgctgaattcatggcggactggtccatgaagcatggcgcgcttgaagtgatggaggcatgggaagccttcgtccccgaggggaaaaacaccgaccttcgcaaagcagttgccgcgcctgagggcgagaaaatcgtcacaggttgggttatctggcccgacaaggagaccctcgaaaatgccaaagtcgcgatgggcaagggtgagggatttgagggatacccagagggcgatcctcccttcgatggctctcgcctgatctttggcgagttcgagccgctcatcacaaaggggcgctga

SEQ ID NO: 35924 - protein, 119 aa, Erythrobacter sp. NAP1
MYVAIAALSVSEENKDAYIKAAEFMADWSMKHGALEVMEAWEAFVPEGKNTDLRKAVAAPEGEKIVTGWVIWPDKETLENAKVAMGKGEGFEGYPEGDPPFDGSRLIFGEFEPLITKGR

SEQ ID NO: 35925 - DNA, 354 bp, Pseudoalteromonas tunicata D2
  CDS (1)..(354): transl_table=11
atgtcatatgtcgattgttttgttgccccagtaccttgcgaaaacaaagataagtatattgagcatgcgaaagtatccgcagaagtattcaaagaatatggtgcgttagaaatagtagaaaattggggtgatgacattcctcaaggaaaaataacatcgctgcctaaagcggtcaaagcagagcagaatgaaaccattgtattttcttgggtgatatggccctcaaaagaagttcgagattctggttggggcgcaatgatggaagatcccagaatgtcaccagaaaataatccaatgccttttgatggtaagcgtctaatttatggaggttttactacactccttaagtcttag

SEQ ID NO: 35926 - protein, 117 aa, Pseudoalteromonas tunicata D2
MSYVDCFVAPVPCENKDKYIEHAKVSAEVFKEYGALEIVENWGDDIPQGKITSLPKAVKAEQNETIVFSWVIWPSKEVRDSGWGAMMEDPRMSPENNPMPFDGKRLIYGGFTTLLKS

SEQ ID NO: 35927 - DNA, 354 bp, Oceanobacter sp. RED65
  CDS (1)..(354): transl_table=11
atgtcatacgtagattgttttgtagcagccgtaccaagtgaaaataaggaaaagtatattgagcacgctaaaattgcttctgagcttttcaaagaatatggtgcgttagaagtcgtcgagaattggggcgatgatgttcctgagggtgaagtgacgtcacttcccttagcggtaaaagcccaagaaaacgaagtggttgtcttttcgtgggtagtttggccgtcaaaggaaattcgagatgcggggtggggggcaatgatggaagatccaagaatgtcaccagataataacccaatgccctttgatggtaagcgactaatttatggtggttttaatacggtattaaaagtctag

SEQ ID NO: 35928 - protein, 117 aa, Oceanobacter sp. RED65
MSYVDCFVAAVPSENKEKYIEHAKIASELFKEYGALEVVENWGDDVPEGEVTSLPLAVKAQENEVVVFSWVVWPSKEIRDAGWGAMMEDPRMSPDNNPMPFDGKRLIYGGFNTVLKV

SEQ ID NO: 35929 - DNA, 354 bp, Vibrio sp. Ex25
  CDS (1)..(354): transl_table=11
atgtcatacattgatgggtttgtcgctgcagtaccgacagcgaataaagaaaagtatatcgcacacgcaaaaattgcagcagaaatgtttagggagtttggggcattaaaggttattgagacgtggggaagtgaagtaccagacggtgagatcacatcatttcccatggcagttaaagctgaaagcaacgaaaccgttgtgttttcatgggtagtctggccttcaaaagaagttagagactcagggtggcagcggatcatgggggatcctcgaatgagtcctgagaataacccaatgccgtttgatggaaagcgtctcatttatggtggatttgatgttattttggagcagtaa

SEQ ID NO: 35930 - protein, 117 aa, Vibrio sp. Ex25
MSYIDGFVAAVPTANKEKYIAHAKIAAEMFREFGALKVIETWGSEVPDGEITSFPMAVKAESNETVVFSWVVWPSKEVRDSGWQRIMGDPRMSPENNPMPFDGKRLIYGGFDVILEQ

SEQ ID NO: 35931 - DNA, 25 bp, Artificial sequence
  primer
atgaagtatgttgatggttttgtgg

SEQ ID NO: 35932 - DNA, 26 bp, Artificial sequence
  primer
ttattcgtcgatgattgactcgaatc

SEQ ID NO: 35933 - protein, 121 aa, Artificial sequence
  consensus sequence
  Variant (2)..(2): Xaa in position 2 is any amino acid
  Variant (6)..(8): Xaa in position 6 to 8 is any amino acid
  Variant (11)..(16): Xaa in position 11 to 16 is any amino acid
  Variant (18)..(20): Xaa in position 18 to 20 is any amino acid
  Variant (22)..(31): Xaa in position 22 to 31 is any amino acid
  Variant (35)..(37): Xaa in position 35 to 37 is any amino acid
  Variant (39)..(40): Xaa in position 39 to 40 is any amino acid
  Variant (42)..(42): Xaa in position 42 is any amino acid
  Variant (44)..(46): Xaa in position 44 to 46 is any amino acid
  Variant (48)..(49): Xaa in position 48 to 49 is any amino acid
  Variant (50)..(58): Xaa in position 50 to 58 is any or no amino acid
  Variant (60)..(63): Xaa in position 60 to 63 is any amino acid
  Variant (66)..(70): Xaa in position 66 to 70 is any amino acid
  Variant (72)..(74): Xaa in position 72 to 74 is any amino acid
  Variant (76)..(76): Xaa in position 76 is any amino acid
  Variant (78)..(85): Xaa in position 78 to 85 is any amino acid
  Variant (88)..(93): Xaa in position 88 to 93 is any amino acid
  Variant (95)..(95): Xaa in position 95 is any amino acid
  Variant (97)..(97): Xaa in position 97 is any amino acid
  Variant (99)..(104): Xaa in position 99 to 104 is any amino acid
  Variant (105)..(109): Xaa in position 105 to 109 is any or no amino acid
  Variant (113)..(114): Xaa in position 113 to 114 is any amino acid
  Variant (116)..(118): Xaa in position 116 to 118 is any amino acid
YXDGFXXXVPXXXXXXYXXXAXXXXXXXXXXGALXXXEXXGXDXXXGXXXXXXXXXXXTXXXXAVXXXXXEXXXFXWXXXXXXXXRDXXXXXXMXDXRXXXXXXXXXXXPFDXXRXXXGGF

SEQ ID NO: 35934 - protein, 31 aa, Artificial sequence
  protein pattern
  Variant (2)..(6): Xaa in position 2 to 6 is any amino acid
  Variant (7)..(9): Xaa in position 7 to 9 is any or no amino acid
  Variant (11)..(11): Xaa in position 11 is any or no amino acid
  Variant (13)..(13): Xaa in position 13 is Ala or Ser
  Variant (14)..(14): Xaa in position 14 is any amino acid
  Variant (15)..(15): Xaa in position 15 is Ala, Ile or Val
  Variant (16)..(16): Xaa in position 16 is any amino acid
  Variant (17)..(17): Xaa in position 17 is Trp or Tyr
  Variant (18)..(18): Xaa in position 18 is any amino acid
  Variant (19)..(19): Xaa in position 19 is Asp, Asn or Ser
  Variant (20)..(20): Xaa in position 20 is Lys or Arg
  Variant (21)..(22): Xaa in position 21 to 22 is any amino acid
  Variant (24)..(24): Xaa in position 24 is Asp or Asn
  Variant (25)..(25): Xaa in position 25 is any amino acid
  Variant (26)..(26): Xaa in position 26 is Ala, Gly, Ile or Val
  Variant (27)..(30): Xaa in position 27 to 30 is any amino acid
AXXXXXXXXVXFXXXXXXXXXXRXXXXXXXM

SEQ ID NO: 35935 - protein, 15 aa, Artificial sequence
  protein pattern
  Variant (3)..(4): Xaa in position 3 to 4 is any amino acid
  Variant (6)..(6): Xaa in position 6 is Leu or Met
  Variant (7)..(8): Xaa in position 7 to 8 is any amino acid
  Variant (12)..(14): Xaa in position 12 to 14 is any amino acid
  Variant (15)..(15): Xaa in position 15 is Ala, Ile, Leu or Val
FDXXRXXXGGFXXXX

SEQ ID NO: 35936 - DNA, 1668 bp, Escherichia coli
  CDS (1)..(1668): transl_table=11
atgatccacgcctttattaaaaaagggtgttttcaggattcggtcagtttaatgattatttcacgaaaactcagcgaatcagaaaatgttgatgatgtttccgtaatgatgggtacgcccgccaataaagcgttattagataccacaggtttctggcatgacgattttaataacgccacgccgaacgatatttgcgtggcaattcgtagcgaagcggcggatgcggggatcgcgcaggcgattatgcagcagcttgaagaggcgctaaaacaactggcgcaggggtcaggcagcagccaggcgttgacgcaggtgcgtcgctgggacagtgcctgtcagaaattacccgatgccaatctggcgctgatttcagtggctggcgagtatgcggcggagctggcaaaccaggcgctggatcgcaacctcaacgtgatgatgttctccgataacgtcacgctggaagatgaaatccaacttaaaacccgcgcgcgggaaaaaggcttgctggtgatggggccggactgcggtacgtcgatgattgccggcacaccgctggcttttgctaacgtgatgccggaaggcaatattggcgtcattggcgcttccggtaccgggattcaggagctgtgttcgcagattgcgctggcaggggagggaattactcacgcgattggccttggcgggcgcgacctcagccgtgaagtgggcggcatcagtgcgctaacagcgctggaaatgctcagtgcagacgagaaaagcgaagtgctggcatttgtttcaaaaccacctgccgaagctgtgcgtctgaaaattgttaatgccatgaaagcaaccggcaaaccgacggtggcgctgtttttaggttataccccggcggtggcccgcgacgagaatgtctggtttgcctcctcgctggatgaggccgcacgcctggcttgcctgctttcacgcgtcacggcgcgacgtaacgcaatagcgcctgtcagcagcggatttatttgcggtttgtataccggcggtacgctggctgccgaagcggcgggattacttgccggacaccttggcgtggaagccgacgatacccatcaacatggcatgatgctggacgccgatagccaccagattattgacctcggcgatgatttctacaccgtcgggcgtccccatccgatgatcgacccaaccttacgcaaccagttaattgccgatctcggcgctaaaccgcaagtgcgcgtgttgctgcttgatgtcgtgattggcttcggtgcgaccgccgatcctgccgcctcgctggtgagcgcctggcaaaaagcctgtgccgcgcgtttagataatcaaccactgtatgccattgccacggtgacaggcactgaacgtgacccgcaatgccgctcgcagcaaatcgccacgctggaagatgcggggattgcggtcgtgagttcgctaccggaagccaccttgctggcggcagcgttaattcatccgctctcgcctgccgcacagcaacacacaccgtcattactggaaaacgtcgccgtgattaacatcggattacgcagctttgcgctggagctacaaagcgccagcaaaccggttgtgcattaccaatggtcgccagtcgccggtggcaataaaaaactggctcgtttattagaacgtttgcaataa

SEQ ID NO: 35937 - protein, 555 aa, Escherichia coli [sequence omitted]

SEQ ID NO: 35938 - DNA, 1665 bp, Salmonella typhimurium LT2
  CDS (1)..(1665): transl_table=11
atgatccacgcctttattaaaaaagggtgttttcaggactctgtcagcttaatgattatttctcgaaagctgagtgagtccgaaaatgttgatgatgtatcggtaatgatgggaacgcctgcgaataagtcgctgctggaaactaccggtttctggcatgacgattttcatggcgctacgcccaatgacatttgcgtggcgattcgtaccgaagcggtagatgacggcattacgcaagtgattgtgcaacagctcgaagaagcattgcagcagttggcgcagggaagcagcggcagccagtcgttaatccaggtcagacgctgggaaagcgcctgtcagaaactgccagaggcgagtctggcgctggtatcggtggccggcgaatatgcggcggaactggcagagcaggcgctggatcgttcgttgaacgtgatgatcttctccgataatgtcacgctggacgatgaaatcagactaaaacgccgggcgcgtgataaaggactgctggtcatggggccggattgcggcaccgctatgatcgccaatacgccgctggctttcgctaacgtcatgccagagggcaacatcggggtgattggcgcttccggcaccggtattcaggagctctgttcacagattgcgctggcgggggaagggattacccatgccatcgggcttggcggacgcgatttgagcgccgaagtcggcgggatcagcgcgctaacggcactggagatactcagcgcggatgaaaagagccaggtgctggcctttgtctccaaaccgcctgccgatgcggttcgtcagcatattatcgcggcgatgaaagccgccgggaaacccgttgtagcgctgttcttagggttttcctcccccgttgcgcgtgaggaaaacgtctggtttgcctcgacgctggatgaagccgcccgactggcatgtttattgtctcgcgtgacgtcgcagcgtaaagaaatggtttcaacaggcggcgtgattcgtggtctctataccggcggaacgctggcggcggaagcggcggggctgctggccggctatctgggcgtcgcggcggatacggaacatcaccatggcatgatgcttgacgctgacggccaccagattatcgatctgggcgatgacttttataccgttgggcgaccacatccgatgattgacccggcgttacgtaatcagcttatcgccgggcttggcgcacagccgcaggtacgcgtgttattagtggacgtcgttattggttttggcgcgaccgccgatcccgccgcatcgctgattcaggcctggcagaaggcatgcgacgcacgcgccagagaccagccgctgttcgccatcgcaaccgtcaccggaacggaacgcgatcctcagtgccgctcgcaacaaatcgccgcgctcgaagatgccggcatcacggtagtggattcccttcccgaagccactctgttggccgcggaactgattcgacccactctctcttctactcatccatcagccccccggttactggaagcggtggcggtgattaatgccgggttacgtagcttcgcgctggatttacaggctgccggtatgcccgtggtgcactaccagtgggcgcctgtcgctggcggtaataaaaaactggctcgtctgttagaacgtttgcaataa

SEQ ID NO: 35939 - protein, 554 aa, Salmonella typhimurium LT2
MIHAFIKKGCFQDSVSLMIISRKLSESENVDDVSVMMGTPANKSLLETTGFWHDDFHGATPNDICVAIRTEAVDDGITQVIVQQLEEALQQLAQGSSGSQSLIQVRRWESACQKLPEASLALVSVAGEYAAELAEQALDRSLNVMIFSDNVTLDDEIRLKRRARDKGLLVMGPDCGTAMIANTPLAFANVMPEGNIGVIGASGTGIQELCSQIALAGEGITHAIGLGGRDLSAEVGGISALTALEILSADEKSQVLAFVSKPPADAVRQHIIAAMKAAGKPVVALFLGFSSPVAREENVWFASTLDEAARLACLLSRVTSQRKEMVSTGGVIRGLYTGGTLAAEAAGLLAGYLGVAADTEHHHGMMLDADGHQIIDLGDDFYTVGRPHPMIDPALRNQLIAGLGAQPQVRVLLVDVVIGFGATADPAASLIQAWQKACDARARDQPLFAIATVTGTERDPQCRSQQIAALEDAGITVVDSLPEATLLAAELIRPTLSSTHPSAPRLLEAVAVINAGLRSFALDLQAAGMPVVHYQWAPVAGGNKKLARLLERLQ

SEQ ID NO: 35940 - DNA, 1548 bp, Escherichia coli CFT073
  CDS (1)..(1548): transl_table=11
atgtcagttaaaatagtcattaaaccgaatacctattttgattctgtctcgctgatgtctatctccacgcgtgcaaataaactcgacggcgtcgagcaggcatttgtggcgatggcgaccgaaatgaacaaaggcgtgttgaagaatttaggactgctgacgccggagctggagcaggcgaaaaacggcgacctgatgattgtcatcaatggtaaatcgggtgtggacaacgagcagttgctggcggagattgaagaactgttcaacaccaaagcgcaaagcggctcgcacgaggcgcgttacgccactattgccagcgccaaaaagtatatcccggaaagtaacctggcagtgatttcggtcaacggtctgtttgccgctcgcgaagcgcgtcaggcgctgcaaaatgacctcaacgtgatgctgttttccgataatgtctcagttgaagatgaactggcgctcaaacagttggcccatgaaaaagggctgctgatgatggggccagactgcggcacggcgattatcaacggcgcggcgctctgctttggtaacgccgtgcgtcgcggcaacatcggtattgttggcgcatctggcaccggcagccaggaattgagcgtccgtatctatgaatttggtggcggcgtttcacaactgatcggcaccggcgggcgcgacctgagcgagaaaatcggtggcctgatgatgctcgatgccatcgggatgctggaaaacgatccgcaaactgaaatcattgtgcttatctccaaaccgcctgcgcctgcggtggcccgcaaagtgctggaacgcgcacgcgcctgccgcaagccagtggtggcctgcttcctcggtcgtggcgaaacgccagtggatgagcaggggctacagtttgctcgcggcagcaaagaggcggcattgaaagcggtgatgctctccggcgtgaaacaagaacatctcgacctgcatacgcttaaccagccgttgattgcggatgtgcgtgcgcgtctgcaaccgcagcagaaatacattcgtggtctgttctgcggcggtacgctgtgtgacgaaaccctgttcgcggtgatggaaaaacatggcgatgtctacagcaatatccagcccgatcctgaattccgcctgcaagatatcaaccgcagcatcaaacacaccttcctcgattttggcgatgatgacttcaccaacggcaagccgcatccaatgattgacccgaccaaccgtatcagccgcttgatcgaagaagcgcgcgatccagaagtggcggtgatcgtgatggattttgtgctcggatttggatcgcatgaagatccggtcggttccaccatcgaggcgatcaaagaagcgaaagcgatcgccgctgccgaaggacgcgagttgatcattctcgcctatgtgctgggcaccgatctcgatacgccatcattagaacaacaaagccagatgctgcttgatgccggagtgattctggcgagcagcagcaccaataccggattgctggcgcgtgaatttatctgcaaaggggaggaagcctga

SEQ ID NO: 35941 - protein, 515 aa, Escherichia coli CFT073
MSVKIVIKPNTYFDSVSLMSISTRANKLDGVEQAFVAMATEMNKGVLKNLGLLTPELEQAKNGDLMIVINGKSGVDNEQLLAEIEELFNTKAQSGSHEARYATIASAKKYIPESNLAVISVNGLFAAREARQALQNDLNVMLFSDNVSVEDELALKQLAHEKGLLMMGPDCGTAIINGAALCFGNAVRRGNIGIVGASGTGSQELSVRIYEFGGGVSQLIGTGGRDLSEKIGGLMMLDAIGMLENDPQTEIIVLISKPPAPAVARKVLERARACRKPVVACFLGRGETPVDEQGLQFARGSKEAALKAVMLSGVKQEHLDLHTLNQPLIADVRARLQPQQKYIRGLFCGGTLCDETLFAVMEKHGDVYSNIQPDPEFRLQDINRSIKHTFLDFGDDDFTNGKPHPMIDPTNRISRLIEEARDPEVAVIVMDFVLGFGSHEDPVGSTIEAIKEAKAIAAAEGRELIILAYVLGTDLDTPSLEQQSQMLLDAGVILASSSTNTGLLAREFICKGEEA

SEQ ID NO: 35942 - DNA, 1560 bp, Escherichia coli CFT073
  CDS (1)..(1560): transl_table=11
atgaaagttaaatataaagttttcagtaatctttatcaggactcagtttctctgatgcagatttccgcgcaaatcagcaagttgcccggtattcaacaggcctcggtcgtcatgggaacgcccaataatctcgaacaattgcgcgatgcgggtctgggtaacgaaatcaacgccagtcccaatgatttagtgattgcagtcatgggtgaagaagatatttgcaatgaagcactggtactggcccagcaacgtctgaccagcaaacccgatgatgaaacggatagtggcattaaaacaccggaaaaggtcagcctggaaatggcactggaagccgaacccgaagccaacctggcactcatttctgtaccgggagactacgccgccgccgaagcaatgaaagcgttaaacctcggaatgaacgtgatgatgttcagcgataacgtcagtatcgggcaggaaaaatccatcaaaacgcttgcccgagaacgtcagcgcatcgtaatgggacctgactgtggaaccgccattgttaacggcattccgttaggcttcgctaatgtggtgaaacgcggagcaattggtgttattggcgcgtcaggcaccgggctacaggaagtgacttgccgaatcgaccagctcggagcgggtatttctcaggcgttgggaacaggcggacatgatctcagtgaagagattggtggaatatcgatgctcttcgctttagatgcgctggcgcaagacgatgaaactcgcgtgattgtgcttatatcaaaaccgccttcaccgatcgttgcccggactattctggagcgtgccgaggcttgtggaaaacccgtagtggtgaatttcctcggtgcgaatccgcatgatctggcacgtcccaatatcaccgcggccaccacacttgccagcgccgccaacatcgccgtggcgttactgaatgatcaaccacttccggctgtcgagaccgagatttcctgcgacgatctcacaatgttacaaaacgcctgccagcgtctgccagcccatcgccaggcgatacgcggtgttttcgccggaggaaccttctgctacgaagcgcaacttatctgccaacaaaagggattcagcgcagcttccaatacgccagttgcgggtaatcgtgctctggcaaatatctggcaaagcgaagatcacacgttgatcgatatgggcgacgatgatttcacccgtggcaaaccgcatccaatgatcgacccgactctgcgcaatcaacgtctgctcaacgaactcaacgactcacacactgccgtcgtgttattcgacctggtacttggttatggcgcttccacgacgcctgccagcgaattactggaccaactttcacacatcgacatgaataacgcaccgttgctgattgcgcacgtttgcggaacggaagctgatccgcaaatacgcagtcagcagataagcgcactacaaaatgcgggcgtcatcatcgccagcagcaatgcacaggcggcgctatgggccagcaccgttgcacagactcagttgcagaaaaaggggctaaacgtatga

SEQ ID NO: 35943 - protein, 519 aa, Escherichia coli CFT073
MKVKYKVFSNLYQDSVSLMQISAQISKLPGIQQASVVMGTPNNLEQLRDAGLGNEINASPNDLVIAVMGEEDICNEALVLAQQRLTSKPDDETDSGIKTPEKVSLEMALEAEPEANLALISVPGDYAAAEAMKALNLGMNVMMFSDNVSIGQEKSIKTLARERQRIVMGPDCGTAIVNGIPLGFANVVKRGAIGVIGASGTGLQEVTCRIDQLGAGISQALGTGGHDLSEEIGGISMLFALDALAQDDETRVIVLISKPPSPIVARTILERAEACGKPVVVNFLGANPHDLARPNITAATTLASAANIAVALLNDQPLPAVETEISCDDLTMLQNACQRLPAHRQAIRGVFAGGTFCYEAQLICQQKGFSAASNTPVAGNRALANIWQSEDHTLIDMGDDDFTRGKPHPMIDPTLRNQRLLNELNDSHTAVVLFDLVLGYGASTTPASELLDQLSHIDMNNAPLLIAHVCGTEADPQIRSQQISALQNAGVIIASSNAQAALWASTVAQTQLQKKGLNV

SEQ ID NO: 35944 - DNA, 1665 bp, Salmonella enterica subsp. enterica serovar Typhi Ty2
  CDS (1)..(1665): transl_table=11
atgatccacgcctttattaaaaaagggtgttttcaggactctgtcagcttaatgattatttctcgaaagctgagtgagtccgaaaatgttgatgatgtatcggtaatgatgggtacgcctgcgaataagtcgctgctggaaactaccggtttctggcatgacgattttcatggcgctacgcccaatgacatttgcgtggcgattcgtaccgaagcggtagatgacggcattacgcaggtgattgtgcgacagctcgaagaagcattgcagcagttggcgcagggaagcagcggcagccagtcgttaatccaggtcagacgctgggaaagcgcctgtcagaaactgccagaggcgaatctggcgctggtatcggtggccggcgaatatgcggcggaactggcggagcaggcgctggctcgttcgttgaacgtgatgatcttctccgataatgtcacgctggacgacgaaatcagactaaaacgccgggcgcgtgataagggactgctggtcatggggccagattgcggcaccgctatgatcgccaatacgccgctggctttcgctaacgtcatgccagagggcaacatcggggtgattggcgcttccggcaccggtattcaggagctctgttcacagattgcgctggcgggggaagggattacccatgccatcgggcttggcggacgcgatttgagcgccgaggtcggcgggatcagcgcgctaacggcactggacatactcagcgcggatgaaaagagccaggtgctggcctttgtctccaaaccgcctgctgatgcggttcgtcagcatattatcgcggcgatgaaagccaccgggaaacccgttgtagcgctgttcttagggttttcctctcccgttgcgcgtgaggaaaacgtctggtttgcctcgacgctggatgaagctgcccgactggcatgtttattgtctcgcgtgacgtcgcagcgtaaagaaatggtttcaacaggcggcgtgattcgtggtctctataccggcggaacgctggcggcggaagcggcgggactgctggccggctatctgggcgtcgcgacggatacggaacatcaccatggcatgatgcttgacgctgacggccaccagattatcgatctgggcgatgacttttataccgttgggcgaccacatccgatgattgacccggcgttacgtaatcagcttatcgccgggcttggcgcacaaccgcaggtacgcgtgttattagtggacgtcgttattggttttggcgcgaccgccgatcccgccgcatcgctgattcaggcctggcagaaggcatgcgccgcacgcgccagcgaccagccgctgttcgccatcgcaaccgtcaccggaacggaacgcgatcctcagtgccgctcgcaacaaatcgccgcgctcgaagatgccggcatcacggtagtggattctcttcccgaagccactctgttggccgcggaactgattcgacccactctctcttctactcatccatcagctccccggttactggaagcagtagcggtgattaatgccgggttacgtagcttcgcgctggatttacaggctgccggtatgcccgtggtgcactaccagtgggcgcctgtcgctggcggtaataaaaaactggctcgtctgttagaacgtttgcaataa

SEQ ID NO: 35945 - protein, 554 aa, Salmonella enterica subsp. enterica serovar Typhi Ty2
MIHAFIKKGCFQDSVSLMIISRKLSESENVDDVSVMMGTPANKSLLETTGFWHDDFHGATPNDICVAIRTEAVDDGITQVIVRQLEEALQQLAQGSSGSQSLIQVRRWESACQKLPEANLALVSVAGEYAAELAEQALARSLNVMIFSDNVTLDDEIRLKRRARDKGLLVMGPDCGTAMIANTPLAFANVMPEGNIGVIGASGTGIQELCSQIALAGEGITHAIGLGGRDLSAEVGGISALTALDILSADEKSQVLAFVSKPPADAVRQHIIAAMKATGKPVVALFLGFSSPVAREENVWFASTLDEAARLACLLSRVTSQRKEMVSTGGVIRGLYTGGTLAAEAAGLLAGYLGVATDTEHHHGMMLDADGHQIIDLGDDFYTVGRPHPMIDPALRNQLIAGLGAQPQVRVLLVDVVIGFGATADPAASLIQAWQKACAARASDQPLFAIATVTGTERDPQCRSQQIAALEDAGITVVDSLPEATLLAAELIRPTLSSTHPSAPRLLEAVAVINAGLRSFALDLQAAGMPVVHYQWAPVAGGNKKLARLLERLQ

SEQ ID NO: 35946 - DNA, 3012 bp, Enterococcus faecalis V583
  CDS (1)..(3012): transl_table=11
atgttacacacagtaattttgaaaaacaattaccaagactccatcaacttaatgttattgaccaataaaatcaatgcattagatggtgtaaccatgagtcaaatcatgatgggaacagatgccaacaaagacatccttaacaacacgaacttgttaacggatgaggccaatagtgcatctgcaaacgacatgatgattgtggttgacagtgaaaaagaaaacatcatggaagaagttatgccagcgattgatgaattcttagatgatttatcagcaaagggaactagtgaagaagcacaagcagcaacttcttggtcagaagcgtttgatcttttaccagaggcgaatgtagcgctattcagtattcctggtgaatatggtgcgccagaaatggaacgtgccttaaaaaatgatttacacgtgttctctttcacggataatgtgtcaattgaagatgaagtacgtttgaaaaaattagcgcatgaaaaaggcttactaatgatggggcctgactgtggaactggtattatctcaagtattccaatcgcctttacaaatgttgtttctccaggaaacattggcgttgttggtgcttcaggaacagggattcaagaagttacaacgattattgaccgcttaggtggcggagttgttcacgccattggtactggtggtcgtgacctaagcgacaaagtaggcgctatcacagtgaaagatgctattgtggccttagaaaatcacgaaccaaccgatgtgattacagttatttctaaaccacctgcaaaagaagttcgtgatgaagtggttgaattattacaaagcatttcaaaaccagtcgttgcgattttcttaggagaaaaaccaacaagtcacgaaggcaaagtttatctagctcatacattagaagaaacagctaaaattgctgttgatttagcaaatgatgtggccgtgaagaaaaattactttgaagcattagcaaaaccagctgtaccaacattaccagaagataaagttgtaaaaggcttatattcaggtggtacattagcttctgaagcaggtatgttaatttcagaagctttagatcttggcggtttagtgaaagcagaaggttatgtcttgaaatctcacggttatgaagtcattgacttaggcgatgatatgtatacacaaggtcgtccgcacccaatgattgacccagatgttcgtatcgaaaaaattcgtgaatacgcacaggatgaaaaaacggggattatcttattcgatgtggtgttaggctatggtgctcatgaagacatggttggtgcattgttaccagcaattgaagaagcgcgtgccacagccaaagaagcaggacgtgatctttactttgttgcaactgtctgtgggacgacgaaagatccgcaaaattaccaatcgtctgttgatcgtttgaaagaaggcggcgttttagtagcagaaagcaatactaaagctgttcaattagctttattactaaaaggaatcgaaatttcagaagacgataaagaagtggttgcttacaacggaccaactgtcgatgtaccaaaaccaggcgaaaaagtaatggaactattaacaaccaaaccaagaatcattaacgttgggttgcaaagctttacagaatcaatcgttgattacggtggcgaaactgttcaatttaactggcgtccacgtgctaacggcaataaaaaaatgattaaaattttggatgctttggaagattacagtgaacaaatcgaagctgaaaatcacaaagtaacagacaaaattaaaaatgcacaaccattcttagtagatgtggtacctgcgaaatcagtgattccagaattaaatgatgacgcacaaaaaacattacttcatgctggaccaccaatccaatggtctgaaatgactggaccaatgaaaggtgcttgtatcggagctgcattattcgaacgttgggcagacaatgaagaagatgctttgaagatttttgaagctggcgaagtacgtttcattccttgtcaccatgtaaaagcagtaggaccaatgggcggtattacttctggtaatatgccagtctttgttgtggaaaatcgcttagaaggtaacgaagcatactgtatcttgaatgaaggtatcggtaaagtattgcgttttggtgcttattcacaagaagtggttgatcgtttagattggattaaagatgttttaggaccaactattgcgaaagccttgaaactttctgaagaaggcttgaacttaaacgtattgattgcgcgctctattacaatgggtgacgagttccaccaaagaaatattgccgcatctttgaacttcttaaaagaattgtctccattaattatcaaaacagatattccagaagatcaaaaatacgaagtaatcaaattcttagctgacacagatcaattcttcttaaatgtcatgatggcaactggaaaagcaattgttgatggtgcccgtaaagataccaacggaacaattgtcacaacgatgactcgtaacggcgtgaactttggggtccggattgcagaaacaggcgatcaatggcataccgcaccagtaaatacaccaaaaggtctttacttcactggtttcagcgaagaagacggaaatcctgatgtcggggatagtgcaattactgaaacagtaggtgttggagcaatggctatggtagctgcacctggcgtaacacggtttgttggtgcaggtggctttgaagatgcgttagcaacctcaaatgaaatggcaaaaatctgtgaaggaaacaacccaacattctcaattccaacttgggatttccaaggaacttgtttaggaattgatatccgtaaagtggtggaattaggaattacaccaatcatcaatacagggattgcacacaaaaatgccggtgttggtcaaattggtgcagggacagttagagcacctctaggctgttttgaaaaagccctagaagcgtatgctgagaaactaggcattacggttgaataa

SEQ ID NO: 35947 - protein, 1003 aa, Enterococcus faecalis V583
MLHTVILKNNYQDSINLMLLTNKINALDGVTMSQIMMGTDANKDILNNTNLLTDEANSASANDMMIVVDSEKENIMEEVMPAIDEFLDDLSAKGTSEEAQAATSWSEAFDLLPEANVALFSIPGEYGAPEMERALKNDLHVFSFTDNVSIEDEVRLKKLAHEKGLLMMGPDCGTGIISSIPIAFTNVVSPGNIGVVGASGTGIQEVTTIIDRLGGGVVHAIGTGGRDLSDKVGAITVKDAIVALENHEPTDVITVISKPPAKEVRDEVVELLQSISKPVVAIFLGEKPTSHEGKVYLAHTLEETAKIAVDLANDVAVKKNYFEALAKPAVPTLPEDKVVKGLYSGGTLASEAGMLISEALDLGGLVKAEGYVLKSHGYEVIDLGDDMYTQGRPHPMIDPDVRIEKIREYAQDEKTGIILFDVVLGYGAHEDMVGALLPAIEEARATAKEAGRDLYFVATVCGTTKDPQNYQSSVDRLKEGGVLVAESNTKAVQLALLLKGIEISEDDKEVVAYNGPTVDVPKPGEKVMELLTTKPRIINVGLQSFTESIVDYGGETVQFNWRPRANGNKKMIKILDALEDYSEQIEAENHKVTDKIKNAQPFLVDVVPAKSVIPELNDDAQKTLLHAGPPIQWSEMTGPMKGACIGAALFERWADNEEDALKIFEAGEVRFIPCHHVKAVGPMGGITSGNMPVFVVENRLEGNEAYCILNEGIGKVLRFGAYSQEVVDRLDWIKDVLGPTIAKALKLSEEGLNLNVLIARSITMGDEFHQRNIAASLNFLKELSPLIIKTDIPEDQKYEVIKFLADTDQFFLNVMMATGKAIVDGARKDTNGTIVTTMTRNGVNFGVRIAETGDQWHTAPVNTPKGLYFTGFSEEDGNPDVGDSAITETVGVGAMAMVAAPGVTRFVGAGGFEDALATSNEMAKICEGNNPTFSIPTWDFQGTCLGIDIRKVVELGITPIINTGIAHKNAGVGQIGAGTVRAPLGCFEKALEAYAEKLGITVE

SEQ ID NO: 35948 - DNA, 1560 bp, Enterococcus faecalis V583
  CDS (1)..(1560): transl_table=11
atgacaattcaaacagtaattaaagagaacgcctattttgattcagttactttaatgaccatttcaacacgagccaatgaactggctggagttaaaactgcaatgattgggatgggaaccgacatgaatcttgaagtgattcggaatgttggtttatatacacccgccttggatcatgttacaacaggtgatttattaattgttttagatcttgatgaccaagcgaactcagaagaaattttacagcaagtcgacgagttatttacgaagaaaaagaaaaccgcttcttctgaagtaacctataagacgttagattcagcccttcatgaagagcctgatgccaacttagttgtaatttctgtcaatggaaaatttgctgcacgagaagcgcataaagctttagatcagcaaaaacacgtcatgctctttagtgataacgtgacggttgacgaggaattagcgttaaaacaaaaagcacacgaaaaagaactgtttgtgatgggccctgattgtggaacagcgattattaatggcgtcgggttatgttttgctaacgaagtacgttcaggagatattggaattgtcggcgcttctggtacaggcagccaagaagttagtgtccaaatccataaatatggttatgggatttcacaattaattggtactggtggccgtgatttgtctgctgaaattggtgggctgatgatgcttgacggtctggatactttaatggttgacgaacaaactaaggcaattttgcttatttctaaaccgcctgctccagaagtaacagagaaaattttaaaaaaattagctgtttcaactaaaccagttgttatttattttatcggcagtgaacaaacggaacgaaaaatagacaacgtcacttttgctacttcttctctggatgcagttcaaaaggtgattcaatttagtcaaacacaggaagcggaaaccagcctctatcaaaatccgacaggcgcaacgttaacagccatccaacagcaacaagccccttctcaaaaatttgttcgtgggttgttctgtggtggcactctttgtgatgaacttttatatgctttaacagaagtctctgatgatgtttatagtaatattcataaaatttctgaacggcaattagcaaatcctgaccacagccaagcacatacattgattgatttcggtgatgatcgtttcacagaaggccgcccacatccaatgatcgatccgacttctcggattactcgcattcttcaagaagccaaagatcctgaagtggcggttttagcgttagattttgaattaggttatggttctcacgaaaatcccgttggcgtgttagcggaggcgttaaaggaagccaaagcaatagcgaaagcagatggtcgtgagttagccattattggctatgttttagggaccgaagaagatccacaagatattcatgaacagcggaaaattttagaagatttagaggttctcgttgtcgacagcagtcatcaactttgcgaagccaccaaaacttttgtaaaaggagcgaacgaacatgagcagaaatga

SEQ ID NO: 35949 - protein, 519 aa, Enterococcus faecalis V583
MTIQTVIKENAYFDSVTLMTISTRANELAGVKTAMIGMGTDMNLEVIRNVGLYTPALDHVTTGDLLIVLDLDDQANSEEILQQVDELFTKKKKTASSEVTYKTLDSALHEEPDANLVVISVNGKFAAREAHKALDQQKHVMLFSDNVTVDEELALKQKAHEKELFVMGPDCGTAIINGVGLCFANEVRSGDIGIVGASGTGSQEVSVQIHKYGYGISQLIGTGGRDLSAEIGGLMMLDGLDTLMVDEQTKAILLISKPPAPEVTEKILKKLAVSTKPVVIYFIGSEQTERKIDNVTFATSSLDAVQKVIQFSQTQEAETSLYQNPTGATLTAIQQQQAPSQKFVRGLFCGGTLCDELLYALTEVSDDVYSNIHKISERQLANPDHSQAHTLIDFGDDRFTEGRPHPMIDPTSRITRILQEAKDPEVAVLALDFELGYGSHENPVGVLAEALKEAKAIAKADGRELAIIGYVLGTEEDPQDIHEQRKILEDLEVLVVDSSHQLCEATKTFVKGANEHEQK

SEQ ID NO: 35950 - DNA, 1758 bp, Bacillus licheniformis ATCC 14580
  CDS (1)..(1758): transl_table=11
atgttatacacaattataaaagaaaacacctatcaagattctatcgtgttaatgcttttatcaaacaagttatctgcaatagatggtataaacaaagtttctatcatgatgggaacaccagctaacaaagacatttttaaatcttcgggtttgggcacagatgaattggaaaaagcaaacccaaatgatatcgtcatcgttatagatacaaaccaagaagaaaaggtatcggaagtgaaagaagaagtagaagcagctttaaaaggagactctgcttcacaagacagagctaaagaccaagaagcacataactggaagcgtgcaatggagcttgcgaacaaccctaatctggcattgatctccattcctggtcagtatgcagcaatggaagcggaaaatgcattgaatgaagggttacatgtatttctattcagcgacaatgtatctaaagaagatgaggttaagttgaaacaaaaggcgcatgaaaaaggattattagtcatgggaccagactgcggtactggaattattcacggcgtgccactggcatttacaaatatcgtgaataaaggagatattggcgttgtgggtgcatcaggtacagggattcaggaagtgacatgcatcattgaccgtcttggtaaaggtgtaacaaacgcaattggtacaggtggtcgggatttatcaacagaggttggtgctaccatggttttagatagtatcaaagcattaaatcaagatccacaagtaaaagtgattacagtaatttctaaaccgcctgcaaaggaagtgcagcaaaaagtattaaatgtgttaagaaatattgaaaaaccggttgttacgttatttttaggagataaaccaacttatcaggaagaaaatatttatcatgcgtatacacttgaagaagcagcggttgtatctgttcaattatccaatggcgacaaaccgaattttaaaccgacagtggctgaaaatgtaaacgtgtcgttaaaagattcacaagttggtattaaaggttattactcgggcggcaccttggcatctgaagcagctgtgttagtgaaagaggcattcaaagaagaagtacctgaagagaagaaaggtgcctatattctaaaaacaaaacatcatgaaattattgacttaggcgatgatatttatacccaggggaagccacacccgatgattgatcctgaaaaacgcatcgaaatgcttgaaacatctggaaacgatcctgaaacagcagtcatcatgattgataacgtcattggctatggcagtcatgatgatatggcaaatgaattagcaccagccattaaacgtattttagccaatgcacatcaggatggccgtgaacttgcagtgcttgtaacagttgtaggtacagataaagatcctcaaggttacgaaaagcaaattgaaaccttaaaagaaagtggtgcaatgatttgtgagacaaacgatcaaatggttcgtacagcgattaaactggcaggaggaaaagtggaacagccagtccttgacatacaaaaatttgaatatacccaagaagacttgacagtagacgaaaaaattatgtccttaatcaatacgaaaccaagtgtcatcaatattgggctgaaaagttttacagcagctgttcagaagagcggatcagagtgtgttcaatttaactggcggccaattgctggcggtgatgaaaagctaatgaaagtgcttcaatatctaaactactatgaaggagagacaatctaa

SEQ ID NO: 35951 - protein, 585 aa, Bacillus licheniformis ATCC 14580
MLYTIIKENTYQDSIVLMLLSNKLSAIDGINKVSIMMGTPANKDIFKSSGLGTDELEKANPNDIVIVIDTNQEEKVSEVKEEVEAALKGDSASQDRAKDQEAHNWKRAMELANNPNLALISIPGQYAAMEAENALNEGLHVFLFSDNVSKEDEVKLKQKAHEKGLLVMGPDCGTGIIHGVPLAFTNIVNKGDIGVVGASGTGIQEVTCIIDRLGKGVTNAIGTGGRDLSTEVGATMVLDSIKALNQDPQVKVITVISKPPAKEVQQKVLNVLRNIEKPVVTLFLGDKPTYQEENIYHAYTLEEAAVVSVQLSNGDKPNFKPTVAENVNVSLKDSQVGIKGYYSGGTLASEAAVLVKEAFKEEVPEEKKGAYILKTKHHEIIDLGDDIYTQGKPHPMIDPEKRIEMLETSGNDPETAVIMIDNVIGYGSHDDMANELAPAIKRILANAHQDGRELAVLVTVVGTDKDPQGYEKQIETLKESGAMICETNDQMVRTAIKLAGGKVEQPVLDIQKFEYTQEDLTVDEKIMSLINTKPSVINIGLKSFTAAVQKSGSECVQFNWRPIAGGDEKLMKVLQYLNYYEGETI

SEQ ID NO: 35952 - DNA, 1563 bp, Moorella thermoacetica ATCC 39073
  CDS (1)..(1563): transl_table=11
gtggttattcgctggctaattaaacctaagatgtatcaggattctgtaaaactcatgaagttatctgctgaactccgtaagcaggacggggtaaagcaagcatctgtgattatggcgacggagatgaataagagcactttacaggatataggtatgttggtgccagaagtagctgctgccaatgccgatgatctggcgataatcgtggcggcagatacagaagagcaggcacaaaaggctgtggagttggcggaaaaacttctcaaccgtgctgaagtgcaacagggtgagactaaacagcaatttcctaagaccttacgaagcgcagtagaggctttacctggtgcaaatctggcccttatctctgtaccaggaacatatgcggcagctgaggcgcttaaagcactgaacctgggacttaacgtgcatctatttagtgataacgttacgcttgaagatgaggtccggctcaagcaaatcggaactaagaaaggactgctggtaatggggccggattgtggcacggcaattattgatggggtgccccttgcctttgccaacgttgttgctcgtggcaagatagggattgttggcgcttcaggaaccggtatccaagaagccactgttctgatcgagcgtttgggaggaggtatttcccacgccataggcactggaggcagggacctcttagatgaagttggcgggcaaatgatgcttctcggtattgatcttcttgaagatgaccctgcgacagaggttattttattgatctcaaaacctgccggaccacggacggcaaataaaatactggatagggttaagcagtgtaagaaacctgtagtagtgaatttgcttaaaggcgatttaaatgccatccagtcagctggtgttgtgggtgccgcaaccatcgaagatgcggcttacaaggcagtcgctttggccaatggagaagaagcagttgccatgccggaaaattactggggagattactcaaaacagatcgccatgctggaaagccagctgggcccgaaccagcgttatattcgtggcctgtttacagggggcaccctagccgacgaggcaatggtgatactcagcgatatcgtcggtgatatcttctccaatatcccattaaaaccagaactaaaattaccttcagcaaggaaaagccacaagcataccattgtggatttaggggatgacgagtttacaagagggcgtccccatcctatgatagatccccttcctcgcaacgaacgtttaatgcaggagtatgctgatccggaagtaggcgttatcctttgtgatgtagttacaggttatgggagtcacgctgacccggcaggggaactggcccgcgcagtggcccgtgcccgggatgcttatccgagcaataatccggcagtaattgcctttgtgtgtggtaccgaagccgacccgcaacctcttagtgaacaggtcaaagtcctcgaaaaagaagggattttcgtcttaccatccaatgcggaagcagcacgggcggcgggaaggattatcaagttacacgaaagccggagggtttaa

SEQ ID NO: 35953 - protein, 520 aa, Moorella thermoacetica ATCC 39073
MVIRWLIKPKMYQDSVKLMKLSAELRKQDGVKQASVIMATEMNKSTLQDIGMLVPEVAAANADDLAIIVAADTEEQAQKAVELAEKLLNRAEVQQGETKQQFPKTLRSAVEALPGANLALISVPGTYAAAEALKALNLGLNVHLFSDNVTLEDEVRLKQIGTKKGLLVMGPDCGTAIIDGVPLAFANVVARGKIGIVGASGTGIQEATVLIERLGGGISHAIGTGGRDLLDEVGGQMMLLGIDLLEDDPATEVILLISKPAGPRTANKILDRVKQCKKPVVVNLLKGDLNAIQSAGVVGAATIEDAAYKAVALANGEEAVAMPENYWGDYSKQIAMLESQLGPNQRYIRGLFTGGTLADEAMVILSDIVGDIFSNIPLKPELKLPSARKSHKHTIVDLGDDEFTRGRPHPMIDPLPRNERLMQEYADPEVGVILCDVVTGYGSHADPAGELARAVARARDAYPSNNPAVIAFVCGTEADPQPLSEQVKVLEKEGIFVLPSNAEAARAAGRIIKLHESRRV

SEQ ID NO: 35954 - DNA, 1416 bp, Nocardioides sp. JS614
  CDS (1)..(1416): transl_table=11
atgaccacgcccagtcccacccatgtcgagctccgccccggcgcgtacgccgactccgtgacgctgctccaggtcagccgggtcgtccaggggctgcccggcgtgctcgccgcccaggtcgcgatggcgaccccgctcaacgtcgaggtgctcaccgggatgggcttcgaggtcccggcgcaggcgggccccaacgacctcgtggtggcgctccggctcgaggcggcggacgcgctgccggccgcgctcgccggggtcgaccaggcgctgcgcgacgcgaaccgtcgcgacgagggtgccgccacgatcgccccgccgcggaccacggcgagcgcgctgcggcgtactcccgatgctgtcgccctcgtctcggtgccgggcgcgcacgccttcgtcgaggcgatggacgccgtcgaggcgggccgcgacgtgatggtcttcagcgacaacgtcccgctcgagcaggagctggccctcaagcgggctgccgccgagcgcggcgtgctggtgatggggcccgactgcggcacggcggtggtcgacggcgtcggcctcggcttcgccaacgtcgtcgagcccggcccggtcggcatcgtcgcggcctcgggcaccggctgccagcagctcctcgccctgctcgaccacgccggcgtcggggtcacctccgcactcggcgtcggcgggcgcgacctctccgccgaggtccgtggcctggccacccgcgaggcgctgcgccgcctcgacgaggacccgggcgtcgagctgatcgtgctgatctccaagccgccggcggcggacgtgaccgccgagatcgaggcgtacgccgccgccctggccacgccggtcgagctcgcgctgctcggcccgggccggcccgacctcacggccgcggccgaggcggtgctgcggcggctcggtcgcgaggtgcccgcctggccggtcgacccacccgatgtctccccgcgggtcaacccaggggcgctgcgcgggctgttcgtcggcggcacgctcgccagcgaggccgccctggtcgccggtgagctgctcggcgaggccgacggccacacgttcgtggacttcggcgacgacgagtacacgaccggtcgggcgcacccgatgatcgacccgtcgatccgcctcgagcacctcgcccgggccgcagcggacccgacgaccggggtgctgctgctcgacgtcgtgctcggtcacggcgccgagcccgaccccgccgcgtcgctggccccggccctcgccggggtcgcgcaaccggtggtggtcgcggtcgtcggcaccgcaggcgacccgcagggacgcgaccggcaggtccgcgccctggtggacgccggcgccgaggtgcacctgtccaacgccggcgcgacccgccgtgcgatcgagctgctgggagggacccgatga

SEQ ID NO: 35955 - protein, 471 aa, Nocardioides sp. JS614
MTTPSPTHVELRPGAYADSVTLLQVSRVVQGLPGVLAAQVAMATPLNVEVLTGMGFEVPAQAGPNDLVVALRLEAADALPAALAGVDQALRDANRRDEGAATIAPPRTTASALRRTPDAVALVSVPGAHAFVEAMDAVEAGRDVMVFSDNVPLEQELALKRAAAERGVLVMGPDCGTAVVDGVGLGFANVVEPGPVGIVAASGTGCQQLLALLDHAGVGVTSALGVGGRDLSAEVRGLATREALRRLDEDPGVELIVLISKPPAADVTAEIEAYAAALATPVELALLGPGRPDLTAAAEAVLRRLGREVPAWPVDPPDVSPRVNPGALRGLFVGGTLASEAALVAGELLGEADGHTFVDFGDDEYTTGRAHPMIDPSIRLEHLARAAADPTTGVLLLDVVLGHGAEPDPAASLAPALAGVAQPVVVAVVGTAGDPQGRDRQVRALVDAGAEVHLSNAGATRRAIELLGGTR

SEQ ID NO: 35956 - DNA, 26 bp, Artificial sequence
  primer
atgatccacgcctttattaaaaaagg

SEQ ID NO: 35957 - DNA, 26 bp, Artificial sequence
  primer
ttattgcaaacgttctaataaacgag

SEQ ID NO: 35958 - protein, 507 aa, Artificial sequence
  consensus sequence
  Variant (2)..(7): Xaa in position 2 to 7 is any amino acid
  Variant (11)..(11): Xaa in position 11 is any amino acid
  Variant (14)..(15): Xaa in position 14 to 15 is any amino acid
  Variant (17)..(24): Xaa in position 17 to 24 is any amino acid
  Variant (26)..(31): Xaa in position 26 to 31 is any amino acid
  Variant (33)..(33): Xaa in position 33 is any amino acid
  Variant (35)..(36): Xaa in position 35 to 36 is any amino acid
  Variant (38)..(40): Xaa in position 38 to 40 is any amino acid
  Variant (42)..(44): Xaa in position 42 to 44 is any amino acid
  Variant (46)..(51): Xaa in position 46 to 51 is any amino acid
  Variant (52)..(53): Xaa in position 52 to 53 is any or no amino acid
  Variant (55)..(56): Xaa in position 55 to 56 is any amino acid
  Variant (57)..(57): Xaa in position 57 is any or no amino acid
  Variant (59)..(100): Xaa in position 59 to 100 is any amino acid
  Variant (101)..(105): Xaa in position 101 to 105 is any or no amino acid
  Variant (107)..(110): Xaa in position 107 to 110 is any amino acid
  Variant (112)..(112): Xaa in position 112 is any amino acid
  Variant (118)..(118): Xaa in position 118 is any amino acid
  Variant (121)..(121): Xaa in position 121 is any amino acid
  Variant (123)..(124): Xaa in position 123 to 124 is any amino acid
  Variant (127)..(128): Xaa in position 127 to 128 is any amino acid
  Variant (130)..(131): Xaa in position 130 to 131 is any amino acid
  Variant (134)..(138): Xaa in position 134 to 138 is any amino acid
  Variant (140)..(141): Xaa in position 140 to 141 is any amino acid
  Variant (147)..(150): Xaa in position 147 to 150 is any amino acid
  Variant (152)..(153): Xaa in position 152 to 153 is any amino acid
  Variant (156)..(157): Xaa in position 156 to 157 is any amino acid
  Variant (159)..(160): Xaa in position 159 to 160 is any amino acid
  Variant (173)..(174): Xaa in position 173 to 174 is any amino acid
  Variant (176)..(179): Xaa in position 176 to 179 is any amino acid
  Variant (181)..(181): Xaa in position 181 is any amino acid
  Variant (183)..(183): Xaa in position 183 is any amino acid
  Variant (185)..(188): Xaa in position 185 to 188 is any amino acid
  Variant (190)..(190): Xaa in position 190 is any amino acid
  Variant (193)..(194): Xaa in position 193 to 194 is any amino acid
  Variant (201)..(201): Xaa in position 201 is any amino acid
  Variant (204)..(207): Xaa in position 204 to 207 is any amino acid
  Variant (209)..(211): Xaa in position 209 to 211 is any amino acid
  Variant (213)..(213): Xaa in position 213 is any amino acid
  Variant (215)..(217): Xaa in position 215 to 217 is any amino acid
  Variant (221)..(221): Xaa in position 221 is any amino acid
  Variant (228)..(228): Xaa in position 228 is any amino acid
  Variant (230)..(230): Xaa in position 230 is any amino acid
  Variant (233)..(235): Xaa in position 233 to 235 is any amino acid
  Variant (237)..(241): Xaa in position 237 to 241 is any amino acid
  Variant (243)..(244): Xaa in position 243 to 244 is any amino acid
  Variant (246)..(254): Xaa in position 246 to 254 is any amino acid
  Variant (260)..(261): Xaa in position 260 to 261 is any amino acid
  Variant (263)..(274): Xaa in position 263 to 274 is any amino acid
  Variant (279)..(280): Xaa in position 279 to 280 is any amino acid
  Variant (284)..(295): Xaa in position 284 to 295 is any amino acid
  Variant (296)..(296): Xaa in position 296 is any or no amino acid
  Variant (298)..(302): Xaa in position 298 to 302 is any amino acid
  Variant (305)..(309): Xaa in position 305 to 309 is any amino acid
  Variant (311)..(324): Xaa in position 311 to 324 is any amino acid
  Variant (325)..(346): Xaa in position 325 to 346 is any or no amino acid
  Variant (349)..(350): Xaa in position 349 to 350 is any amino acid
  Variant (355)..(356): Xaa in position 355 to 356 is any amino acid
  Variant (359)..(371): Xaa in position 359 to 371 is any amino acid
  Variant (372)..(389): Xaa in position 372 to 389 is any or no amino acid
  Variant (391)..(393): Xaa in position 391 to 393 is any amino acid
  Variant (395)..(395): Xaa in position 395 is any amino acid
  Variant (399)..(400): Xaa in position 399 to 400 is any amino acid
  Variant (402)..(402): Xaa in position 402 is any amino acid
  Variant (404)..(404): Xaa in position 404 is any amino acid
  Variant (412)..(413): Xaa in position 412 to 413 is any amino acid
  Variant (415)..(424): Xaa in position 415 to 424 is any amino acid
  Variant (426)..(428): Xaa in position 426 to 428 is any amino acid
  Variant (430)..(432): Xaa in position 430 to 432 is any amino acid
  Variant (434)..(434): Xaa in position 434 is any amino acid
  Variant (436)..(436): Xaa in position 436 is any amino acid
  Variant (438)..(438): Xaa in position 438 is any amino acid
  Variant (440)..(442): Xaa in position 440 to 442 is any amino acid
  Variant (445)..(447): Xaa in position 445 to 447 is any amino acid
  Variant (449)..(450): Xaa in position 449 to 450 is any amino acid
  Variant (452)..(462): Xaa in position 452 to 462 is any amino acid
  Variant (463)..(471): Xaa in position 463 to 471 is any or no amino acid
  Variant (473)..(473): Xaa in position 473 is any amino acid
  Variant (476)..(477): Xaa in position 476 to 477 is any amino acid
  Variant (481)..(484): Xaa in position 481 to 484 is any amino acid
  Variant (486)..(488): Xaa in position 486 to 488 is any amino acid
  Variant (490)..(492): Xaa in position 490 to 492 is any amino acid
  Variant (494)..(498): Xaa in position 494 to 498 is any amino acid
  Variant (500)..(506): Xaa in position 500 to 506 is any amino acid
IXXXXXXDSVXLMXXSXXXXXXXXVXXXXXXMXTXXNXXXLXXXGXXXXXXXXAXXXDXXXXXXXXXXXXXXXXXXXXXXXXXXXXXXXXXXXXXXXXXXXXXXXAXXXXPXANLALXSVXGXXAAXXAXXALXXXXXVXXFSDNVXXXXEXXLKXXAXXKGLLVMGPDCGTXXIXXXXLXFXNXXXXGXIGXXGASGTGXQEXXXXIXXXGXGXXXAIGXGGRDLSXEXGGXXXLXXXXXLXXDXXXXXXXXXSKPPAXXVXXXXXXXXXXXXKPVVXXFLGXXXXXXXXXXXXXAXXXXXAAXXXXXLXXXXXXXXXXXXXXXXXXXXXXXXXXXXXXXXXXXXGLXXGGTLXXEAXXXXXXXXXXXXXXXXXXXXXXXXXXXXXXXHXXXDXGDDXXTXGXPHPMIDPXXRXXXXXXXXXXPXXXVXXXDXVXGXGXXXDPXXXLXXAXXXXXXXXXXXXXXXXXXXXVXGTXXDPQXXXXQXXXLXXXGXXXXXSXXXXXXXA

SEQ ID NO: 35959 - protein, 57 aa, Artificial sequence
  protein pattern
  Variant (4)..(4): Xaa in position 4 is Pro, Ser or Thr
  Variant (5)..(5): Xaa in position 5 is any amino acid
  Variant (6)..(6): Xaa in position 6 is Asp or Glu
  Variant (7)..(7): Xaa in position 7 is Asp, Glu or Gln
  Variant (9)..(9): Xaa in position 9 is Ile, Leu or Val
  Variant (10)..(10): Xaa in position 10 is any amino acid
  Variant (13)..(14): Xaa in position 13 to 14 is any amino acid
  Variant (16)..(16): Xaa in position 16 is any amino acid
  Variant (17)..(17): Xaa in position 17 is Asp or Glu
  Variant (18)..(18): Xaa in position 18 is Lys or Arg
  Variant (19)..(19): Xaa in position 19 is Glu or Gly
  Variant (20)..(20): Xaa in position 20 is Leu or Val
  Variant (21)..(21): Xaa in position 21 is Phe or Leu
  Variant (22)..(22): Xaa in position 22 is Met or Val
  Variant (30)..(30): Xaa in position 30 is Ala, Gly or Ser
  Variant (31)..(31): Xaa in position 31 is Ile, Met or Val
  Variant (32)..(32): Xaa in position 32 is Ile or Val
  Variant (33)..(33): Xaa in position 33 is any amino acid
  Variant (34)..(34): Xaa in position 34 is Gly, Asn or Ser
  Variant (35)..(35): Xaa in position 35 is any amino acid
  Variant (36)..(36): Xaa in position 36 is Ala, Gly or Pro
  Variant (37)..(37): Xaa in position 37 is Ile or Leu
  Variant (38)..(38): Xaa in position 38 is Ala, Cys or Gly
  Variant (40)..(40): Xaa in position 40 is Ala, Gly or Thr
  Variant (42)..(42): Xaa in position 42 is any amino acid
  Variant (43)..(43): Xaa in position 43 is Met or Val
  Variant (44)..(45): Xaa in position 44 to 45 is any amino acid
  Variant (47)..(47): Xaa in position 47 is Asp, Asn or Pro
  Variant (48)..(48): Xaa in position 48 is Ile or Val
  Variant (50)..(51): Xaa in position 50 to 51 is Ile or Val
  Variant (52)..(52): Xaa in position 52 is Ala or Gly
DNVXXXXEXXLKXXAXXXXXXXMGPDCGTXXXXXXXXXFXNXXXXGXXGXXXASGTG

SEQ ID NO: 35960 - protein, 57 aa, Artificial sequence
  protein pattern
  Variant (2)..(3): Xaa in position 2 to 3 is any amino acid
  Variant (4)..(4): Xaa in position 4 is any or no amino acid
  Variant (8)..(8): Xaa in position 8 is any amino acid
  Variant (9)..(9): Xaa in position 9 is Phe or Tyr
  Variant (11)..(11): Xaa in position 11 is any amino acid
  Variant (13)..(13): Xaa in position 13 is Lys or Arg
  Variant (21)..(22): Xaa in position 21 to 22 is any amino acid
  Variant (24)..(24): Xaa in position 24 is any amino acid
  Variant (25)..(25): Xaa in position 25 is Glu, Gln or Thr
  Variant (26)..(26): Xaa in position 26 is any amino acid
  Variant (27)..(27): Xaa in position 27 is Ile or Leu
  Variant (28)..(28): Xaa in position 28 is any amino acid
  Variant (29)..(29): Xaa in position 29 is Asp, Glu, Gly, Asn, Gln or Thr
  Variant (30)..(33): Xaa in position 30 to 33 is any amino acid
  Variant (34)..(34): Xaa in position 34 is Glu, Pro or Ser
  Variant (35)..(35): Xaa in position 35 is any amino acid
  Variant (36)..(36): Xaa in position 36 is Thr or Val
  Variant (37)..(37): Xaa in position 37 is any amino acid
  Variant (38)..(38): Xaa in position 38 is Ile or Val
  Variant (39)..(39): Xaa in position 39 is Ile, Leu or Val
  Variant (40)..(41): Xaa in position 40 to 41 is any amino acid
  Variant (43)..(45): Xaa in position 43 to 45 is any amino acid
  Variant (47)..(47): Xaa in position 47 is Phe or Tyr
  Variant (49)..(49): Xaa in position 49 is Ala or Ser
  Variant (50)..(50): Xaa in position 50 is any amino acid
  Variant (51)..(51): Xaa in position 51 is Ala, Asp, Glu or Thr
  Variant (52)..(52): Xaa in position 52 is Asp, Asn or Thr
  Variant (53)..(53): Xaa in position 53 is any amino acid
  Variant (54)..(54): Xaa in position 54 is Ala or Val
  Variant (55)..(55): Xaa in position 55 is Ala, Gly, Asn or Ser
  Variant (56)..(56): Xaa in position 56 is any amino acid
IXXXGDDXXTXGXPHPMIDPXXRXXXXXXXXXXXXXXXXXXDXXXGXGXXXXXXXXL

SEQ ID NO: 35961 - protein, 59 aa, Artificial sequence
  protein pattern
  Variant (2)..(2): Xaa in position 2 is Glu or Gln
  Variant (3)..(3): Xaa in position 3 is Leu or Val
  Variant (4)..(4): Xaa in position 4 is any amino acid
  Variant (5)..(5): Xaa in position 5 is Ala, Cys, Ser or Val
  Variant (6)..(6): Xaa in position 6 is any amino acid
  Variant (7)..(7): Xaa in position 7 is Ile or Leu
  Variant (8)..(10): Xaa in position 8 to 10 is any amino acid
  Variant (12)..(12): Xaa in position 12 is any amino acid
  Variant (14)..(14): Xaa in position 14 is Ile or Val
  Variant (15)..(15): Xaa in position 15 is Ser or Thr
  Variant (16)..(16): Xaa in position 16 is any amino acid
  Variant (17)..(17): Xaa in position 17 is Ala or Leu
  Variant (18)..(18): Xaa in position 18 is Ile or Leu
  Variant (20)..(20): Xaa in position 20 is any amino acid
  Variant (23)..(23): Xaa in position 23 is His or Arg
  Variant (27)..(27): Xaa in position 27 is any or no amino acid
  Variant (29)..(29): Xaa in position 29 is any amino acid
  Variant (30)..(30): Xaa in position 30 is any or no amino acid
  Variant (32)..(40): Xaa in position 32 to 40 is any amino acid
  Variant (41)..(41): Xaa in position 41 is any or no amino acid
  Variant (43)..(44): Xaa in position 43 to 44 is any amino acid
  Variant (46)..(46): Xaa in position 46 is Asp, Glu or Pro
  Variant (47)..(47): Xaa in position 47 is any amino acid
  Variant (48)..(48): Xaa in position 48 is Ser, Thr or Val
  Variant (49)..(49): Xaa in position 49 is any amino acid
  Variant (50)..(50): Xaa in position 50 is Ala, Ile, Leu or Val
  Variant (51)..(51): Xaa in position 51 is Ile or Leu
  Variant (52)..(52): Xaa in position 52 is any amino acid
  Variant (53)..(53): Xaa in position 53 is Phe, Leu or Val
  Variant (54)..(54): Xaa in position 54 is Ile or Val
  Variant (59)..(59): Xaa in position 59 is Ala or Ser
QXXXXXXXXXGXGXXXXXGXGGXDLSXEXXGXXXXXXXXXXLXXDXXXXXXXXXSKPPX

SEQ ID NO: 35962 - protein, 52 aa, Artificial sequence
  protein pattern
  Variant (2)..(3): Xaa in position 2 to 3 is any or no amino acid
  Variant (5)..(8): Xaa in position 5 to 8 is any amino acid
  Variant (9)..(9): Xaa in position 9 is any or no amino acid
  Variant (12)..(12): Xaa in position 12 is Ile or Val
  Variant (13)..(13): Xaa in position 13 is any amino acid
  Variant (16)..(16): Xaa in position 16 is any amino acid
  Variant (17)..(17): Xaa in position 17 is Ile or Leu
  Variant (18)..(18): Xaa in position 18 is Ser or Thr
  Variant (19)..(19): Xaa in position 19 is any amino acid
  Variant (20)..(20): Xaa in position 20 is Glu, Lys or Arg
  Variant (21)..(21): Xaa in position 21 is Ala, Ile or Leu
  Variant (22)..(22): Xaa in position 22 is Asn, Arg or Ser
  Variant (23)..(24): Xaa in position 23 to 24 is any amino acid
  Variant (25)..(25): Xaa in position 25 is Ala, Asp or Glu
  Variant (26)..(26): Xaa in position 26 is Gly or Asn
  Variant (27)..(27): Xaa in position 27 is Ile or Val
  Variant (28)..(29): Xaa in position 28 to 29 is any amino acid
  Variant (30)..(30): Xaa in position 30 is Ala, Ser or Val
  Variant (31)..(31): Xaa in position 31 is any amino acid
  Variant (32)..(32): Xaa in position 32 is Ile or Val
  Variant (33)..(33): Xaa in position 33 is any amino acid
  Variant (35)..(35): Xaa in position 35 is Ala or Gly
  Variant (37)..(37): Xaa in position 37 is Asp, Glu or Pro
  Variant (38)..(38): Xaa in position 38 is any amino acid
  Variant (40)..(40): Xaa in position 40 is any amino acid
  Variant (41)..(41): Xaa in position 41 is Ala, Asp, Glu, Gly or Ser
  Variant (42)..(42): Xaa in position 42 is any amino acid
  Variant (43)..(43): Xaa in position 43 is Phe, Ile or Leu
  Variant (44)..(44): Xaa in position 44 is any amino acid
  Variant (45)..(45): Xaa in position 45 is Asp, Asn, Ser or Thr
  Variant (46)..(46): Xaa in position 46 is any amino acid
  Variant (47)..(47): Xaa in position 47 is Gly or Asn
  Variant (48)..(48): Xaa in position 48 is Phe, Leu or Met
  Variant (49)..(50): Xaa in position 49 to 50 is any amino acid
  Variant (51)..(51): Xaa in position 51 is Asp or Pro
  Variant (52)..(52): Xaa in position 52 is Ala, Asp or Glu
IXXKXXXXXDSXXLMXXXXXXXXXXXXXXXXXXMXTXXNXXXXXXXXXXXXX

SEQ ID NO: 35963 - protein, 25 aa, Artificial sequence
  protein pattern
  Variant (2)..(2): Xaa in position 2 is Ala or Val
  Variant (3)..(3): Xaa in position 3 is Leu or Val
  Variant (4)..(4): Xaa in position 4 is Ile or Val
  Variant (6)..(6): Xaa in position 6 is Ile or Val
  Variant (7)..(7): Xaa in position 7 is Ala, Asn or Pro
  Variant (9)..(9): Xaa in position 9 is any amino acid
  Variant (10)..(10): Xaa in position 10 is Phe or Tyr
  Variant (13)..(14): Xaa in position 13 to 14 is any or no amino acid
  Variant (16)..(16): Xaa in position 16 is any amino acid
  Variant (17)..(17): Xaa in position 17 is any or no amino acid
  Variant (20)..(20): Xaa in position 20 is Ala, Asp, Asn or Gln
  Variant (21)..(21): Xaa in position 21 is any amino acid
  Variant (22)..(22): Xaa in position 22 is Asp, Gly, Asn, Gln or Ser
  Variant (23)..(24): Xaa in position 23 to 24 is any amino acid
LXXXSXXGXXAAXXAXXALXXXXXV

SEQ ID NO: 35964 - protein, 34 aa, Artificial sequence
  protein pattern
  Variant (2)..(4): Xaa in position 2 to 4 is any or no amino acid
  Variant (7)..(7): Xaa in position 7 is Ala, Asp, Glu or Thr
  Variant (8)..(8): Xaa in position 8 is any amino acid
  Variant (10)..(10): Xaa in position 10 is Pro or Thr
  Variant (11)..(11): Xaa in position 11 is Pro or Gln
  Variant (12)..(13): Xaa in position 12 to 13 is any amino acid
  Variant (14)..(14): Xaa in position 14 is Asp, Glu, Gln or Ser
  Variant (15)..(15): Xaa in position 15 is Glu, Gln, Arg or Ser
  Variant (16)..(16): Xaa in position 16 is Gln or Ser
  Variant (17)..(19): Xaa in position 17 to 19 is any amino acid
  Variant (21)..(22): Xaa in position 21 to 22 is any amino acid
  Variant (23)..(23): Xaa in position 23 is Ala, Glu or Gly
  Variant (25)..(25): Xaa in position 25 is Ala, Ile or Val
  Variant (26)..(26): Xaa in position 26 is any amino acid
  Variant (27)..(27): Xaa in position 27 is Ile, Leu or Val
  Variant (28)..(29): Xaa in position 28 to 29 is any amino acid
  Variant (31)..(31): Xaa in position 31 is any amino acid
  Variant (32)..(32): Xaa in position 32 is Ala, Pro or Thr
  Variant (33)..(33): Xaa in position 33 is any amino acid
  Variant (34)..(34): Xaa in position 34 is Ala or Thr
AXXXGTXXDXXXXXXXXXXLXXXGXXXXXSXXXX

SEQ ID NO: 35965 - protein, 18 aa, Artificial sequence
  protein pattern
  Variant (3)..(3): Xaa in position 3 is Phe or Tyr
  Variant (4)..(4): Xaa in position 4 is Cys, Ser, Thr or Val
  Variant (9)..(9): Xaa in position 9 is Ala or Cys
  Variant (10)..(10): Xaa in position 10 is Ala, Asp or Ser
  Variant (12)..(12): Xaa in position 12 is any amino acid
  Variant (13)..(15): Xaa in position 13 to 15 is any or no amino acid
  Variant (17)..(17): Xaa in position 17 is any amino acid
  Variant (18)..(18): Xaa in position 18 is Ala, Asp, Glu, Gly or Ser
GLXXGGTLXXEXXXXLXX

SEQ ID NO: 35966 - protein, 26 aa, Artificial sequence
  protein pattern
  Variant (2)..(4): Xaa in position 2 to 4 is any amino acid
  Variant (5)..(5): Xaa in position 5 is Ile or Val
  Variant (6)..(6): Xaa in position 6 is Ile, Leu or Val
  Variant (7)..(10): Xaa in position 7 to 10 is any amino acid
  Variant (11)..(11): Xaa in position 11 is Ala, Asn, Ser or Val
  Variant (12)..(13): Xaa in position 12 to 13 is any amino acid
  Variant (16)..(16): Xaa in position 16 is any or no amino acid
  Variant (18)..(19): Xaa in position 18 to 19 is any amino acid
  Variant (20)..(20): Xaa in position 20 is any or no amino acid
  Variant (22)..(22): Xaa in position 22 is Ile or Leu
  Variant (24)..(25): Xaa in position 24 to 25 is any amino acid
  Variant (26)..(26): Xaa in position 26 is Glu, Pro, Gln or Ser
VXXXXXXXXXXXXKPXVXXXFXGXXX

SEQ ID NO: 35967 - DNA, 1176 bp, Escherichia coli
  CDS (1)..(1176): transl_table=11
atggatacgtcactggctgaggaagtacagcagaccatggcaacacttgcgcccaatcgctttttctttatgtcgccgtaccgcagttttacgacgtcaggatgtttcgcccgcttcgatgaaccggctgtgaacggggattcgcccgacagtcccttccagcaaaaactcgccgcgctgtttgccgatgccaaagcgcagggcatcaaaaatccggtgatggtcggggcgattcccttcgatccacgtcagccttcgtcgctgtatattcctgaatcctggcagtcgttctcccgtcaggaaaaacaagcttccgcacgccgtttcacccgcagccagtcgctgaatgtggtggaacgccaggcaattccggagcaaaccacgtttgaacagatggttgcccgcgccgccgcacttaccgccacgccgcaggtcgacaaagtggtgttgtcacggttgattgatatcaccactgacgccgccattgatagtggcgtattgctggaacggttgattgcgcaaaacccggttagttacaacttccatgttccgctggctgatggtggcgtcctgctgggggccagcccggaactgctgctacgtaaagacggcgagcgttttagctccattccgttagccggttccgcgcgtcgtcagccggatgaagtgctcgatcgcgaagcaggtaatcgtctgctggcgtcagaaaaagatcgccatgaacatgaactggtgactcaggcgatgaaagaggtactgcgcgaacgcagtagtgagttacacgttccttcttctccacagctgatcaccacgccgacgctgtggcatctcgcaactccctttgaaggtaaagcgaattcgcaagaaaacgcactgactctggcctgtctgctgcatccgacccccgcgctgagcggtttcccgcatcaggccgcgacccaggttattgctgaactggaaccgttcgaccgcgaactgtttggcggcattgtgggttggtgtgacagcgaaggtaacggcgaatgggtggtgaccatccgctgcgcgaagctgcgggaaaatcaggtgcgtctgtttgccggagcggggattgtgcctgcgtcgtcaccgttgggtgagtggcgcgaaacaggcgtcaaactttctaccatgttgaacgtttttggattgcattaa

SEQ ID NO: 35968 - protein, 391 aa, Escherichia coli
MDTSLAEEVQQTMATLAPNRFFFMSPYRSFTTSGCFARFDEPAVNGDSPDSPFQQKLAALFADAKAQGIKNPVMVGAIPFDPRQPSSLYIPESWQSFSRQEKQASARRFTRSQSLNVVERQAIPEQTTFEQMVARAAALTATPQVDKVVLSRLIDITTDAAIDSGVLLERLIAQNPVSYNFHVPLADGGVLLGASPELLLRKDGERFSSIPLAGSARRQPDEVLDREAGNRLLASEKDRHEHELVTQAMKEVLRERSSELHVPSSPQLITTPTLWHLATPFEGKANSQENALTLACLLHPTPALSGFPHQAATQVIAELEPFDRELFGGIVGWCDSEGNGEWVVTIRCAKLRENQVRLFAGAGIVPASSPLGEWRETGVKLSTMLNVFGLH

SEQ ID NO: 35969 - DNA, 5057 bp, Pseudomonas fluorescens
  CDS (207)..(1382): transl_table=11
gaattcggcatacagatgagctgaaactttccctaaaaacgcatgagcagtccgcccgatccaacaggcggcttgcattgaagttaactctctcatggctcactcatgtgattgacaaatcgtaatgattagcatcacatattagaaacgataatgattctatttcaagtttctttttatccctaggccacggaggcttcccccaaatgagaacgggcaccctaagaacgaccgagatggaagaggtgcaactcgcagaggtacaacgtagtttttcgttcacatccggcgatcgcgagttagcggtcaccgggatgctgcagagaattgaaacacctgccattggcggcgatgacgccaatagcctgttccagcagacaattgcgcaagcgcttgatcgggcgcgcgaagctggccagagcaacccaatcatcgttggcgccatccctttcgaccctgctgaaccttcctgcctctacattcccgaacacgcgcaatggcggacccgagacatccacgcgaaaacgggtatgtcgacgctgcctgagttgatcgaacagaaaaacattccggacgaacaggccttcaaacgggcggtggaacacgccgtcgtcaacttccgccacagcgacgtacgcaaggctgtgctctcggttcaacgcgagctgatatttgcaaacgatgtggatgtgagtgccctgcagcacaacctgaaagcccagaacccgagcggctaccacttccgtgtgccaatgcctgatggcaccacgctgatcggtgtcagtcccgaacttctggtccgcaaggaaggcctgagctctctgtccaacccgctggcagggtcagccaagcgcatggccgatccagaagccgaccggcgcaatgcagactggttgctgacatcggaaaaagatcactacgaacacgggttcgtgacccaggacatcgtcagccaactggggaaactgtgcacgcagctgaatgtgccgcaacgcccctccctcatcagcacgcccgcgctctggcacctctcgacccgcatcgaaggtacgctggcagacccggctgtatcggccttgcagcttgcctgccgcttgcaccccacaccggctgtgtgcggcttccccaccgagcgcgcccggcgcctgattcgcttcgtcgaacccttcgagcgcggcctgttcaccggcatggtgggttggtgcgatgcccagggcaatggcgaatgggtcgtaacgattcgttgcggcacggtcaggcgaaacaaggtccgcctgttcgccggcgcaggcatcgttgaagcctcaagccccgactccgaatgggcagaagtccagaccaaacttggcaccatcgtgcgcgcctgcggattggcccactaactcgaattttttcacacgtgaatactatgactattgaatttaaccactggcctctggaaagcgcacagcgttatcgggacaaaggctattggctcgacaaaccgctcacccacctccttcaggaacgcagccagtcgcaacccgacgcccccgcgattatttgcggcgatcgccacttcagctatgccgagttggaccaattgtcttccaacctggcctcgcgactggccgccagcgggcttggcaacggtgacactgcactggtgcagttgcccaatatcgcggagttttacattgtcctttttgccctgctcaagtcaggaatcgcacccctcaacgcgctctacagccatcgcaaacttgaactcaagagttacgccaaacaaatcgcgccaacgttgttgattgcctcccgcgaacatgaagtcttccgtgacgacagctatatcgccgacttcaaggaggtgggttcaagtccagacatcatcttgctgttgggcgagcaacgtcacgaaaacaacctcgccgactggatcaatacgccgagcgagagcaacgtgaacgtctccccctcggggcccggcgaggtcgcattgttccaactgtcaggcggcagcacgggcacccccaaactcatcccccgcactcacaacgactattactacaacgccagggcaagcgcgcaagtatgcgaacttacgccacgcacgcgctttctatgcgcgctacctgccgcccataacttcttgctcagctcccccggcgccctcggtgttctacatgctggcggctgcatcatcatggcgcccagcccggagcccttgacctgtttttcgatcatccagcgccaagaagtcaatactgtggccttggtgccaagtgcagtcgccttgtggctgcaggcagcgccggagcataaagaacaactgcaatcgcttgagttcctccaggtcggtggcgcctgttttgccgactcgctggcacgccaggtgcccggcgtgctcggttgtaagctgcaacaggtattcgggatggccgaaggcctgatcaactacacccggctaaatgactccgacgaacagatttttactacccagggccgtccgatcagccccgacgatgaaatcaaaatcgttgacgaacaaggcctccccgtcccggacggagaacctggcatgctcgccacacgtggcccttacactttttgcgggtactaccaaagccccgaacaaaatgcccaggcgttcgataacgaggggtactactactccggcgacctcgtccaactcatgcccagcggcgatttgcgcgtggtcggcagggtcaaggaccagatcaaccgtggcggtgaaaaagtcgcctcggaggaaatcgaaaacctcatcgtcctccatcctgatgtgactcacgcgggcttggtggccatgcccgatgacaggctgggagaaaaaagctgcgcgttcgtcgtctcacgcaacccgagcctgaagccgcccgcgctcagacgtcacctgatggaactcggcatcgccgaatacaaactgcccgaccgcatccggttaatcgaaaccatgccgctgacccccgtgggcaagattgacaagaagcatctgcgtcagcttctggcagcggaaaccacacgcgcctggttgcagactcgcgtgcggcaactcgtcgaggactgtgaagacctggaccccgaggaaaacctgattttctatggcctcgactccttgcaagtgatgagactcgctgccgaactcaaggagcgtggcattgccgtcagcttcgaagaactggcggattcgcccacgctcagcagctggtggtcattggtagacgcgaggcagatagccgcctgaccgggcggcgtcacccagtcgttttaaaaggagttagacatgactttatcccctgccgaccaaagcaagcttgaaggcttctggcagcactgcgtgacacatcagtatttcaacattgggtatcccgaatcagccgattttgattactcccagctgcaccgtttcttgcagttttcaattaacaacttgctggggactgggaatgagtacagcaactacctgttgaactcgttcgactttgaaaaagacgtcatgacgtatttcgccgagctgttcaacattgcccttgaagacagttggggttacgtcaccaatggcgggacggaaggcaatatgtttggctgctacctgggacgcgaactgtttccggacggcaccctgtactactcgaaagacacccactactccgtggcaaagatcgtcaaattattgcggatcaaatgccgtgcggtcgaatcgctgcccaatggcgaaatcgactacgacgacctgatggcaaaaataaccgccgaccaggagcgtcaccccatcatcttcgccaacatcggcaccacgatgcgtggagccctggataatatcgtgaccatccagcaacgcctgcaacaggcaggcattgcccgccacgactactacctgcacgctgatgcggccttgagcgggatgatcctgcccttcgtcgatcacccacaacccttctcgtttgccgacggcatcgactcgatctgcgtctccggccacaagatgatcggctcgcccattccttgcggaattgtcgtggccaaacgcaacaacgtcgcgcgcatttcagtggaagtggactatatccgcgcccatgacaagaccatcagcggctcgcgcaacggccacacacccctgatgatgtgggcggcactgcgcagctactcatgggctgaatggcgccatcgaatcaaacacagcctggacacggcacagtacgccgtcgaccgcttccaggcctcgggcattgatgcctggcgcaacgaaaactccatcaccgtcgtgttcccttgcccatcagaaagaattgcgacgaaatactgcctggccacctccggtaattcggcacacctgatcaccacacctcatcatcacgactgcagcatgatcgacgccttgatcgacgaagtggttgccgaagctcaactgaatacccttcgatccaagcgagcattcactgaacaaacggtcgtcgagcgattgcccgcggcgtcattcaacttgcgtacccattattgaaagagaccagcctcatgctgccgctaaaaccgccacaagcctgcgagaacctcaatgacattcgagcgggcatcgacttttttgaccgccagatccttgactcgctacaaaaacgcctgcgttacgtaaaggctgcggcgcagttcaaagccaacgagcaggacattccagcacctgaacgcgtcgcggccatgcttgaggagcggcgactatgggcggtagaagccgaacttgatgtcgctttcgtcgagaagctctacgagcagattattcactggaatattcaacagcaaatcctgcattggcgggccacccgacaaccaacgtactcggcgcaggccaagtcatgacgatggcgggtggatgcctgacgacttgaggtctgcgattcacgcgggctgtccttgttcgagtggtgtgtgttcacaactatcaccgtagaccaagggcggccttttcttcatttttttgtaatcagatcagcctgttagctgttaattaagtgccattcaaatctgtcccctttttttttcgccataatgctgatatcgaattc

SEQ ID NO: 35970 - protein, 391 aa, Pseudomonas fluorescens
MRTGTLRTTEMEEVQLAEVQRSFSFTSGDRELAVTGMLQRIETPAIGGDDANSLFQQTIAQALDRAREAGQSNPIIVGAIPFDPAEPSCLYIPEHAQWRTRDIHAKTGMSTLPELIEQKNIPDEQAFKRAVEHAVVNFRHSDVRKAVLSVQRELIFANDVDVSALQHNLKAQNPSGYHFRVPMPDGTTLIGVSPELLVRKEGLSSLSNPLAGSAKRMADPEADRRNADWLLTSEKDHYEHGFVTQDIVSQLGKLCTQLNVPQRPSLISTPALWHLSTRIEGTLADPAVSALQLACRLHPTPAVCGFPTERARRLIRFVEPFERGLFTGMVGWCDAQGNGEWVVTIRCGTVRRNKVRLFAGAGIVEASSPDSEWAEVQTKLGTIVRACGLAH

SEQ ID NO: 35971 - DNA, 1539 bp, Arabidopsis thaliana
  CDS (1)..(1539)
atgaacggatgtgaggctgaccacaaagcaccacttggcacggtagaaacaaggactctatcaacggtgccatctccggcagccgcgacggagaggctgataaccgccgtctctgacctcaaatctcaaccgcctccattctcctccggcattgtccgattacaggtaccaattgagcagaaaattggagcaatcgattggcttcatgcacagaacgaaattcttcctcgcagtttcttttcccgtcgtagcgattctggccgtccagatcttcttcaagacttctcaagtgacaatggatcatctgatcataatccagttagtgtcgctggaatcgggtctgctgtctttttccgcgatctcgacccgttttctcatgatgactggagatcaatccgaaggttcttgtcttcaaagtctcctctgattcgtgcctatggaggtcttcgatttgatcctacagggaagatcgctgtggaatgggaacattttggctcgttttactttacagtgccccaggtcgagtttgatgagtttggaggaagctcaatgctggctgcaactgttgcttgggacaatgagctctcatggacgcttgaaaatgctattgaagcacttcaggaaactatgcttcaggtttcttctgttataatgagattacggcgagaatctttaggagttattgttgttagcaagaaccatgttccaagtgaaggagcctattaccctgctgtgaataatgctctagagattatcaaggacaaacattcacccctaagcaaggttgtgcttgcacgcagtagcagaatcattacggataccgacattgatcctatcgcttggttagcacggttgcagtgtgaaggacaagacgcgtaccaattctgtcttcaaccacccggtgcaccagcattcatagggaacacgcctgagagactcttccacagaaaacatctaggtgtctgcagtgaggctttggctgcaacaaggcctagaggtgattcaaaggttcgtgaaatggagatagagcgcgacttactaaccagtcccaaagacgatcttgagttttctattgtccgagagaatataagagaaaaacttaaaaccatatgtgacagggtagtagttaaaccccataaatcagtgagaaagcttgcaagagtacagcatctatattctcaattggcaggacagctaaaaagagaagatgatgagtttaacatcttaactgctttgcatccgacgccagctgtttgcggatgtccagtagaagaagctaggcttttgattaaacaaattgagtcatttgatagaggaatgtatgctggacctattgggttctttggtggtggggagagtgaattttctgtaggcatacgatctgctttagtcgaaaagggtcttggagcattgatctatgcaggaacaggaatcgtttcaggaagcaatccttcctcggagtggaacgagcttgagcttaagatctctcagttcactaagtcacttgaacatgagtcagctttgcaaccaatcaactaa

SEQ ID NO: 35972 - protein, 512 aa, Arabidopsis thaliana
MNGCEADHKAPLGTVETRTLSTVPSPAAATERLITAVSDLKSQPPPFSSGIVRLQVPIEQKIGAIDWLHAQNEILPRSFFSRRSDSGRPDLLQDFSSDNGSSDHNPVSVAGIGSAVFFRDLDPFSHDDWRSIRRFLSSKSPLIRAYGGLRFDPTGKIAVEWEHFGSFYFTVPQVEFDEFGGSSMLAATVAWDNELSWTLENAIEALQETMLQVSSVIMRLRRESLGVIVVSKNHVPSEGAYYPAVNNALEIIKDKHSPLSKVVLARSSRIITDTDIDPIAWLARLQCEGQDAYQFCLQPPGAPAFIGNTPERLFHRKHLGVCSEALAATRPRGDSKVREMEIERDLLTSPKDDLEFSIVRENIREKLKTICDRVVVKPHKSVRKLARVQHLYSQLAGQLKREDDEFNILTALHPTPAVCGCPVEEARLLIKQIESFDRGMYAGPIGFFGGGESEFSVGIRSALVEKGLGALIYAGTGIVSGSNPSSEWNELELKISQFTKSLEHESALQPIN

SEQ ID NO: 35973 - DNA, 1734 bp, Mycobacterium leprae TN
  CDS (1)..(1734): transl_table=11
atggcgatacggcgtggtcgaaatcgggccagcacattcggctgtaccgagctggagttgaccgataccggccgagcacaggccaagctagctgagcgggccctagcggaacagaaactcgttgatccgatgatggccagcaacccacgtcaatgcgacctagttactgccaagttggccggacttaccgtcgacaaagtatctccattactagctgaatgcacctacggctcctacgaagacctcaccaccgcaaagactcgagaagccgaacctgcttggttggcatggacgcacagatacccgaggggtgaaaaacgtctggcaagtcagcgaacatgccgaccaggccgtcgctatggcgttcgagcacttggagtcacggaccatgtagtccgtcagccatggccacctctgctgggcggtgatcacacgctggatcgggctgccatttgtcgagggccggcgcttcggtatgcgcatcagctcgattgggatgtgcgggttcgagtacgggctacggcaactacacacgcttgggtcgcctggctagccacgaccggtcgcacccgggtgaacatcaacaatgacgacgacaaacgccgcccagtggcgcaggagagagccgaacaaatgagaccaagcgaaccaccgttcgcactatgcggaccacgtgggactctagttgccgacggggtgcacacacgctacgacgatgtgtatttagcgcaagctgcactgcgttctggagttacgccaatactgttgggtgcattacctttcgatgcggaaagccccgccgcactgatggcacctagtgctgtgctgcgcaccgatacactgccaaactggcagaccggcccgctacccaccctgcgcatcactgccgccgtcccaacgcgtgccaactaccgcgtctggataagcaacgcacgcgagcaactcaccgcacctggcaactcactacacaaggtagtgcttgcccgcgcattgcagctggtcgcggacgctccactggacggccgcgccatcctgcgccggctagtcacagccgacccgaccgcgtacggatatctcgtcgacttgaccgcagccggcggccagtacgcgggtgttgccctggtgggcgccagcccagaactgttggtctcgcgcttcggcgaccgtgtagtctgccggccgtttgccggttcggccccacgtgctaccaaccccgaagtcgactccgctaacagcgccgcgctggccggctcgatcaagaaccgtcacgaacatcagctggtcatcgacgcgatacgtgctgccctagagccagtgtgcgacaacttgacgatcgcgcccgagccggaattgagccgcaccgcggcagtctggcacctatgcacaccgatcagcggccggctgcgcgacacctcaatcacagcaatagatttagccttgatgctgcatcccactccagcggtcggtggggtaccggcggaagccgcatccgaacttatcgcagcgctggaaggtgaccgcggtttctacgcaggagcagtgggttggtgcgatgccaggggggacggtcactgggtggtatccatccgctgtgctcagctatcggccgaccgccgcatcgccttcgcccatgctggcggaggcatcgttgccgaatccgatcccgatgacgaagttgatgaaaccacagcgaaattcgccacgattctgaacgcgttgggagttaagcaatga

SEQ ID NO: 35974 - protein, 577 aa, Mycobacterium leprae TN
MAIRRGRNRASTFGCTELELTDTGRAQAKLAERALAEQKLVDPMMASNPRQCDLVTAKLAGLTVDKVSPLLAECTYGSYEDLTTAKTREAEPAWLAWTHRYPRGEKRLASQRTCRPGRRYGVRALGVTDHVVRQPWPPLLGGDHTLDRAAICRGPALRYAHQLDWDVRVRVRATATTHAWVAWLATTGRTRVNINNDDDKRRPVAQERAEQMRPSEPPFALCGPRGTLVADGVHTRYDDVYLAQAALRSGVTPILLGALPFDAESPAALMAPSAVLRTDTLPNWQTGPLPTLRITAAVPTRANYRVWISNAREQLTAPGNSLHKVVLARALQLVADAPLDGRAILRRLVTADPTAYGYLVDLTAAGGQYAGVALVGASPELLVSRFGDRVVCRPFAGSAPRATNPEVDSANSAALAGSIKNRHEHQLVIDAIRAALEPVCDNLTIAPEPELSRTAAVWHLCTPISGRLRDTSITAIDLALMLHPTPAVGGVPAEAASELIAALEGDRGFYAGAVGWCDARGDGHWVVSIRCAQLSADRRIAFAHAGGGIVAESDPDDEVDETTAKFATILNALGVKQ

SEQ ID NO: 35975 - DNA, 1119 bp, Mycobacterium tuberculosis CDC1551
  CDS (1)..(1119): transl_table=11
gtgagcgcacacgtggcaaccttgcacccagaaccaccgttcgcactgtgcggaccaagaggcaccctgattgcccgcggggtgcggacacgatactgcgacgtgcgggccgcgcaagcggcacttcgctcaggtacagcaccaatactgttgggcgcgttgcctttcgacgtgagcagacccgccgcattgatggtgccggatggcgtgctgcgggcccggaagctgcctgactggccgaccggcccgctgcccaaggtacgcgtcgccgccgcccttccgccacctgccgactacctgacccggatcggccgcgcacgggatctgctggccgccttcgacggcccgttgcacaaagtggtgctcgcgcgcgccgtgcaactgaccgccgatgctccgctggacgcgcgggtactgttgcgcaggttggtcgtcgccgacccgaccgcttacggctatctcgtcgacctcacctctgcgggcaacgacgacaccggggcagccctggtcggcgccagcccagagcttctggtcgcacgatccggcaatcgcgtcatgtgcaagccatttgccggctcagccccacgcgccgccgaccccaaactcgacgccgccaacgcggccgcactagccagttcggccaagaaccgacacgaacaccaattggtcgtcgacacgatgcgggtagccctagagccactatgcgaggacctgacaatcccagcccagccccagttgaaccgcaccgcagccgtttggcatctgtgcaccgcgatcaccggccggctgcgcaacatctcgacgacggcaatcgatctggctttggcgctacatcccaccccggcggttggtggggtcccgacaaaagctgccaccgagctcatcgccgaactcgagggcgaccgtggcttctacgccggcgcggttggttggtgcgacggccggggcgacggccattgggtggtgtctatccggtgcgcgcaactttcggctgatcgacgcgcagcccttgcgcacgctggcggtggcatcgtcgccgaatcagaccccgatgacgaacttgaagaaaccacaacgaagttcgccacgatattgaccgcactgggagttgagcagtga

SEQ ID NO: 35976 - protein, 372 aa, Mycobacterium tuberculosis CDC1551
MSAHVATLHPEPPFALCGPRGTLIARGVRTRYCDVRAAQAALRSGTAPILLGALPFDVSRPAALMVPDGVLRARKLPDWPTGPLPKVRVAAALPPPADYLTRIGRARDLLAAFDGPLHKVVLARAVQLTADAPLDARVLLRRLVVADPTAYGYLVDLTSAGNDDTGAALVGASPELLVARSGNRVMCKPFAGSAPRAADPKLDAANAAALASSAKNRHEHQLVVDTMRVALEPLCEDLTIPAQPQLNRTAAVWHLCTAITGRLRNISTTAIDLALALHPTPAVGGVPTKAATELIAELEGDRGFYAGAVGWCDGRGDGHWVVSIRCAQLSADRRAALAHAGGGIVAESDPDDELEETTTKFATILTALGVEQ

SEQ ID NO: 35977 - DNA, 1425 bp, Synechocystis sp. PCC 6803
  CDS (1)..(1425): transl_table=11
atgtccgttgcgacacccctcctcgaccgtcatccatgctccctcgataattcctcggttctgcacggttatctggtggaacagcagaggggacttgcttctggccaacggttcctgtggagctttacggagaacttgggcaaggttgatcccctggcggtatttggggcgctcaatgtccaagataaggtgcatttttacggcgaaaatccccagcgaggggaaaccatactggcttttggtatttgccagtccctgaggatttctggcaagtatcgcttcagtttagcccaacaatttgcagaggaatgtttccagcgcttagtgcccattggtaatgtccagggcagaagtcaacgcccctatattttttgtggctttagtttttttgaccgcccctccaaccgcaatccttttgctaattcttttttgtttttaccccaaatccaagtggtgaaaacgtcccagcattgcttattaagctggcaaattagtttagatggcaacaccaatgtcaccgatttggtggattttatcggtcgaatgctcagcgctatccgtcgggcccaacctgctagggatacccatactccctccatggttgtaaaagctccccgattgacgggaatagaggtggccaagctttccaaggcgatcgcctctagcttggaggaaattgcccagcaaagattgagcaaggtagtgctggcaacggcgttggatttggactatggttctcgactcaatgtggcccattgtttgcaacgactgcggcaacagtatggagattgctatttattctcctggggcaatggccagggggattgttttgtgggggctagcccagaaagattacttagtttgcataatcaacagctggtcaccgatgccctagcaggttcggctcctagggatgtcgatgtccagggcgatcgccaattggggcaagagttattgcacaatcccaaggaattgcgggaacatcaagcggtgttggattacctcctccagcgtctccgggcattgggcctaagcccccaggcttcctccttgaagttgcttaaattggccaatattcagcacctctggacccaaattcaagcccctctgccgccccacatccatcccctggccctggtgcaacaactccatcccacccccgctgtggccggtgtccccgtagcgatcgccgaagatttaatccgtcgccatgaaacctttgaccgcaatctctatgctgctcccctgggttggttggacagtgaaggtaatgctgagtttattgtcggtattcgttctgcccttctgtcccgtaatcgagccagactatacgccggggcgggcattgtggccggttccgatcccctcaaagaagtggcagaaattgagctcaaacttcaaactctctggcgttctttgatttaa

SEQ ID NO: 35978 - protein, 474 aa, Synechocystis sp. PCC 6803
MSVATPLLDRHPCSLDNSSVLHGYLVEQQRGLASGQRFLWSFTENLGKVDPLAVFGALNVQDKVHFYGENPQRGETILAFGICQSLRISGKYRFSLAQQFAEECFQRLVPIGNVQGRSQRPYIFCGFSFFDRPSNRNPFANSFLFLPQIQVVKTSQHCLLSWQISLDGNTNVTDLVDFIGRMLSAIRRAQPARDTHTPSMVVKAPRLTGIEVAKLSKAIASSLEEIAQQRLSKVVLATALDLDYGSRLNVAHCLQRLRQQYGDCYLFSWGNGQGDCFVGASPERLLSLHNQQLVTDALAGSAPRDVDVQGDRQLGQELLHNPKELREHQAVLDYLLQRLRALGLSPQASSLKLLKLANIQHLWTQIQAPLPPHIHPLALVQQLHPTPAVAGVPVAIAEDLIRRHETFDRNLYAAPLGWLDSEGNAEFIVGIRSALLSRNRARLYAGAGIVAGSDPLKEVAEIELKLQTLWRSLI

SEQ ID NO: 35979 - DNA, 1176 bp, Salmonella typhimurium LT2
  CDS (1)..(1176): transl_table=11
atggatatgtcactggccgaggacgctcaggagacaatggcaacgcttgctcccgatcgctttttcttcatgtcgccgtatcgcagttttaccacttccgggtgcttcgcccgttataccgagcctgcggttgccggagattcgccggatagccctttccagcagaaattgcgccagcagtttgccgaggccaaatcgcagggcatcgccaaccctatcctggtgggggcgatcccctttgatactcgtcagccgtcgtcgctatttatcccgatggcgtggcagtccttttcccgccagcaaaagcagcgcacggcgcgttattttactgaccatcagtcgctgacggtgacggcgcgaaaggcgattccggagcaggatgcttttgaagcgatggtcgcacgcgcggctatgctgaccgccacgccagacgtcgataaagtggtgctttcccggctgatagatatcaccactgatgtggcggtggatagcggagcattgctggagcggctggttgcgcagaatccagttagttacaacttccatgtgccactggcggatggcggcgttctgctgggcgccagccccgaattgctgctacgcaaagagggcgagcggtttagttcgctgccgttagcaggctcggcacgtcgacagccggatgacgttctggatcgcgaggcgggaaaccgactgctggcttcacaaaaagatcggcatgaacatgagctggtgacgcaggcgatgaagcagatcctgcgcgatcgcagcacggaactgcaattaccttcctctccgcagttgatcaccacgccgacgctatggcatctcggtacgccgtttgagggcaaggccaacgccggagaaaacgcgctgacgctggcctgtctgctgcatccaacgcctgcgttaagcggtttccctcatcaggtcgcgaaaaagctgattgctgaactggaaccgttcgatcgtgaactgtttggcggcattgtcggctggtgcgatgccgaaggaaacggcgagtgggtagtgacgattcgttgtgcgaaattgcacggtaatcaggtgcgcctgttcgctggcgccgggattgtccctgcctcttcgccagtcggcgagtggcgggaaaccggcgtcaagctctctacgatgttgaacgtttttggactgcattaa

SEQ ID NO: 35980 - protein, 391 aa, Salmonella typhimurium LT2
MDMSLAEDAQETMATLAPDRFFFMSPYRSFTTSGCFARYTEPAVAGDSPDSPFQQKLRQQFAEAKSQGIANPILVGAIPFDTRQPSSLFIPMAWQSFSRQQKQRTARYFTDHQSLTVTARKAIPEQDAFEAMVARAAMLTATPDVDKVVLSRLIDITTDVAVDSGALLERLVAQNPVSYNFHVPLADGGVLLGASPELLLRKEGERFSSLPLAGSARRQPDDVLDREAGNRLLASQKDRHEHELVTQAMKQILRDRSTELQLPSSPQLITTPTLWHLGTPFEGKANAGENALTLACLLHPTPALSGFPHQVAKKLIAELEPFDRELFGGIVGWCDAEGNGEWVVTIRCAKLHGNQVRLFAGAGIVPASSPVGEWRETGVKLSTMLNVFGLH

SEQ ID NO: 35981 - DNA, 1257 bp, Brucella melitensis 16M
  CDS (1)..(1257): transl_table=11
ttgggaccaattaaatcaagtataaaacgtgactggttctttcaagtattaatttcggcaacgacgccaaggagactccccgtgagaacgagcgccctgaaatacccaacttcagacgcagaccatcttattgaaaataatactgatttctcgtttgcatccggcaatctgaaactggcggccagcggcatgcgtaaggtgatcgcgacgcctgccattggcggcagcaaccccgacagcaccttccagcgggcaattgcgcaggctttcgagcgcgccgcacgcgctgggcagcgcaatccgatcgtggtgggtgcaatcccgttcgaccccggcgaaccctcctgtctctatgtgcccgaggagatggactggcaggagcgggagccagccagcggggcgagcgccgccgccatgccgcaactggcggggcagagaagcgtaccggacgaagcgggtttcaagcacgcggtagaacatgccatcatcaattttcgccttagcgacgtgcgcaaggcggtgctttcggtgatgcgcgaactcactttcgcggacgatatcgatgtcgacgccatgctggccaatctgcgcgcgcaaaaccatgacggctatcagtttcgcgtgcctttgcccggtggcggcgcattggtcggtgtcagcccggaactcctgatccacaaggacaagggaaagatcgtatccaaccctctggccggatcggcgaagcgcatggccgacccggaggcggacaggaaaaatgccgatcgcctggccaaatccgaaaaggaccattacgaacatcgcctggtgatcgaggatatcagagcacggcttcagcccatctgcacggaactggacataccggaacggccgtcgctcatccacacggcagcactctggcatctttcgacccgcatcgagggccggctgcatgatcccgatatgacagccttgcagcttgcctgcctcatccacccgacgcctgccgtctgcggtttcccgaccgagcgcgcgcgccgcctgatccgctttgtagaacctttcgagcgtggattgtttaccggcatggtcggctggagcgacgcggaaggcaatggcgaatgggtcgtcaccatccgttgcggcacggtgaagggcaatcttgtgcgcctctttgccggggcggggatcgtggaagcctccagcccggattccgaatgggccgaagtacagaccaagcttggcaccatgctgcgtgcctgcggcctttcggcctga

SEQ ID NO: 35982 - protein, 418 aa, Brucella melitensis 16M
MGPIKSSIKRDWFFQVLISATTPRRLPVRTSALKYPTSDADHLIENNTDFSFASGNLKLAASGMRKVIATPAIGGSNPDSTFQRAIAQAFERAARAGQRNPIVVGAIPFDPGEPSCLYVPEEMDWQEREPASGASAAAMPQLAGQRSVPDEAGFKHAVEHAIINFRLSDVRKAVLSVMRELTFADDIDVDAMLANLRAQNHDGYQFRVPLPGGGALVGVSPELLIHKDKGKIVSNPLAGSAKRMADPEADRKNADRLAKSEKDHYEHRLVIEDIRARLQPICTELDIPERPSLIHTAALWHLSTRIEGRLHDPDMTALQLACLIHPTPAVCGFPTERARRLIRFVEPFERGLFTGMVGWSDAEGNGEWVVTIRCGTVKGNLVRLFAGAGIVEASSPDSEWAEVQTKLGTMLRACGLSA

SEQ ID NO: 35983 - DNA, 1131 bp, Corynebacterium glutamicum ATCC 13032
  CDS (1)..(1131): transl_table=11
atgtctgcccaccgcaacccctctgcccccaacaccgccccagatttcctcttatccagaggccacgggtctgtgcgcacccaaggatcaaaagaagtattcaccgatccctgggaggcagtagacgcccttaaacaagggcgcgtagccatggtggtgggtgctttgcccttcgaacgggacaaaccagcagcactgactgtcccagaacacatcatccgcgaagacggccccctagaacctcacgcctactacaggtttggaccaggctcagtactgcacgccagcgtcgcaggaattgatccctcaccgattgagcatttacgacgcgtcaatgcagccatcaataccatcaacaacactgtcctgaacaaagttgtgctcgcgcgcgccgtggacatctccttcgagccacccgttgatcccctgctggtggccgcacgtttgattgataactcccacaacaaggacggtttcatcgccgacctgacccctgcaggcccagactttgcaggccacatgctggttggatcctccccggaggtgttaatcaaacgccaaggttccaccatcaccgcatacccactggccggctccgcaccacggcttgccgatccagtgcgcgatgaagcccaaggacaaaacctcctggccagcgccaaaaacctagaagaacactcctacgtggtcaaccacctgcgcaccatcctggaaccactgtgctcacaattcgacgccccaacagttcctgaactgaccaaaaccaacgaaatgtggcacctcgcaacacccatcgttggcaccctcaagtacccacacatcaccgcactagaactagccatccgcacacaccccacccccgcgatctgtggcacccccaccgacgccgccgaagccctcatcatcgaagcggaatccccccgaaacttctacgccggagcagtcggctggtgtgactccaccggagacggcgaatacatggtagccatccgctgcgccgaagtatccgaagacggaacctgggccagagcatgggcaggcggaggcatcgtcgccgaatcagacgcccaagaagagtttgatgaaaccaccgcgaagctccaaaccatcatgcgctcgcttggtttgtga

SEQ ID NO: 35984 - protein, 376 aa, Corynebacterium glutamicum ATCC 13032
MSAHRNPSAPNTAPDFLLSRGHGSVRTQGSKEVFTDPWEAVDALKQGRVAMVVGALPFERDKPAALTVPEHIIREDGPLEPHAYYRFGPGSVLHASVAGIDPSPIEHLRRVNAAINTINNTVLNKVVLARAVDISFEPPVDPLLVAARLIDNSHNKDGFIADLTPAGPDFAGHMLVGSSPEVLIKRQGSTITAYPLAGSAPRLADPVRDEAQGQNLLASAKNLEEHSYVVNHLRTILEPLCSQFDAPTVPELTKTNEMWHLATPIVGTLKYPHITALELAIRTHPTPAICGTPTDAAEALIIEAESPRNFYAGAVGWCDSTGDGEYMVAIRCAEVSEDGTWARAWAGGGIVAESDAQEEFDETTAKLQTIMRSLGL

SEQ ID NO: 35985 - DNA, 1197 bp, Oceanobacillus iheyensis HTE831
  CDS (1)..(1197): transl_table=11
atgtctgtaaagacgttaaatgaagagcaacaattaattaatcaatatagtcaagaagattacttattgtcttttccaagcaaatgcattttaggtaaagggaaagcagttgaactaactaattcggaacaaaacggattgccatttagcaaaagaatcgaatcccttctacataaaggaacattgaatgggatggaaaatccaattgttattggtgctttgccatttcatcaacaagataaagggacattagttataccagaagaaattcagcaatcagaagtacaacaaattgtagataattcattgtcatcagataatgtctcttcaacacatatacaatcgattccctctggtaaggaatatgcaaaagcagtggagagggttacgaaagaaattcaacaaggaaagttagaaaaagcggttcttggcagggttctacaaatagatgtagacaagcaaccaactatttcacaactcgttcagaacctaattacacataatcatgataagtataattttgccttaaatacatcagaagaaaataaagaaaaaacattaattggtgctagtccagaattattaatttccaaaaaaggaagcatcgttgtttccaaccctttggccggatcgcgtccaaggcaaaaagatccagaaaaagatgtattaatggcgcaggaattacgccattcagaaaaagatttgcatgaacataagcttgttgttcagtctgtagcaaatgcattgcgacctttttgcaaggagttacatgtaccaaaagaaccatctatcattcatacagagacaatgtggcatctttcaacagaaatcattggtcatttagaagatccgtttacacaatcaattgaaatagctgaaaatttgcatccaacaccagcgatatgtggaactccaaacgatattgcattggagaacattaagcagcttgaaccatttaaccgagaatattttaccggtttaattggttggagcgataaaaatggagatggtgaatgggcgattacaattcgctgtgcggagatagaacaaaataggattcgtatgtttgcaggtgcaggagttgtacaagattcagtcccagaagaagaaaaaaacgaaacggctgcgaagttacaaacgatgctacgtgtatttggaatagatttttacgaagaggaagggaatggatcatgctag

SEQ ID NO: 35986 - protein, 398 aa, Oceanobacillus iheyensis HTE831
MSVKTLNEEQQLINQYSQEDYLLSFPSKCILGKGKAVELTNSEQNGLPFSKRIESLLHKGTLNGMENPIVIGALPFHQQDKGTLVIPEEIQQSEVQQIVDNSLSSDNVSSTHIQSIPSGKEYAKAVERVTKEIQQGKLEKAVLGRVLQIDVDKQPTISQLVQNLITHNHDKYNFALNTSEENKEKTLIGASPELLISKKGSIVVSNPLAGSRPRQKDPEKDVLMAQELRHSEKDLHEHKLVVQSVANALRPFCKELHVPKEPSIIHTETMWHLSTEIIGHLEDPFTQSIEIAENLHPTPAICGTPNDIALENIKQLEPFNREYFTGLIGWSDKNGDGEWAITIRCAEIEQNRIRMFAGAGVVQDSVPEEEKNETAAKLQTMLRVFGIDFYEEEGNGSC

SEQ ID NO: 35987 - DNA, 1176 bp, Brucella suis 1330
  CDS (1)..(1176): transl_table=11
gtgagaacgagcgccctgaaatacccaacttcagacgcagaccatcttattaaaaataatactgatttctcgtttgcatccggcaatctgaaactggcggccagcggcatgcgtgaggtgatcgcgacgcctgccattggcggcagcaaccccgacagcaccttccagcgggcaattgcgcaggctttcgagcgcgccgcacgcgctgggcagcgcaatccgatcgtggtgggtgcaatcccgttcgaccccggcgaaccctcctgtctctatgtgcccgaggagatggactggcaggagcgggagccagccagcggggcgagcgccgccgccatgccgcaactggcggggcagagaagcgtaccggacgaagcgggtttcaagcacgcggtagaacatgccatcatcaattttcgccttagcgacgtgcgcaaggcggtgctttcggtgatgcgcgaactcactttcgcggacgatatcgatgtcgacgccatgctggccaatctgcgcgcgcaaaaccatgacggctatcagtttcgcgtgcctttgcccggtggcggcgcattggtcggtgtcagcccggaactcctgatccacaaggacaagggaaagatcgtatccaaccctctggccggatcggcgaagcgcatggccgacccggaggcggacaggaaaaatgccgatcgcctggccaaatccgaaaaggaccattacgaacatcgcctggtgatcgaggatatcagagcacggcttcagcccatctgcacggaactggacataccggaacggccgtcgctcatccacacggcagcactctggcatctttcgacccgcatcgagggccggctgcatgatcccgatatgacagccttgcagcttgcctgcctcatccacccgacgcctgccgtctgcggtttcccgaccgagcgcgcgcgccgcctgatccgctttgtagaacctttcgagcgtggattgtttaccggcatggtcggctggagcgacgcggaaggcaatggcgaatgggtcgtcaccatccgttgcggcacggtgaagggcaatcttgtgcgcctctttgccggggcggggatcgtggaagcctccagcccggattccgaatgggccgaagtacagaccaagcttggcaccatgctgcgtgcctgcggcctttcggcctga

SEQ ID NO: 35988 - protein, 391 aa, Brucella suis 1330
MRTSALKYPTSDADHLIKNNTDFSFASGNLKLAASGMREVIATPAIGGSNPDSTFQRAIAQAFERAARAGQRNPIVVGAIPFDPGEPSCLYVPEEMDWQEREPASGASAAAMPQLAGQRSVPDEAGFKHAVEHAIINFRLSDVRKAVLSVMRELTFADDIDVDAMLANLRAQNHDGYQFRVPLPGGGALVGVSPELLIHKDKGKIVSNPLAGSAKRMADPEADRKNADRLAKSEKDHYEHRLVIEDIRARLQPICTELDIPERPSLIHTAALWHLSTRIEGRLHDPDMTALQLACLIHPTPAVCGFPTERARRLIRFVEPFERGLFTGMVGWSDAEGNGEWVVTIRCGTVKGNLVRLFAGAGIVEASSPDSEWAEVQTKLGTMLRACGLSA

SEQ ID NO: 35989 - DNA, 1131 bp, Corynebacterium efficiens YS-314
  CDS (1)..(1131): transl_table=11
atggctacaccccttgacccccaggccccgcccaccgcgccggatttcctcctctcgcgggcgcacggctcggtgcgcacccagggctcacaggagaccttcacggacccctgggacgccgtggaggcgcttcgaggggggcgggtggagatggtcgtgggtgccctgccgttcgaacgggacaaaccggccgcgctgaccgtgccggagcgcatcatccgtgaggacggccccctcgagccacacgcctactaccgccgcggtcccgggtcggtgctcgccgcccgcgtggtcgggatggatccctcccccgaggagcatttacgacgcgtggatgccgccatccgcaccatccgcaattccgccctgggcaaggtggtgctggcgcgtgccgtcgacatcgccttcgatcccgcggtggacccccgcctggtggcggcccgcctgatcgacaactcctacaaccgggacggtttcatcaccgacctcaccgccgccggccccgggttcaccggccacatgctggtcggttcctcccccgaggtactcatcaaacggcagggttccaccgtcaccgcctatcccctggccgggtccgccccacgttccgaggacgcggccgaggacgcccgccgcgccgacagcctccattccagtgccaagaacctggaggagcacgcctatgtggtggaccacatccgggcggcgctggcaccactgtgctcacgggtggacatccccgcccgcccggaactgacccgcacccatgagatgtggcatctggccaccccgatcgcgggcaccctgaaggatccttccaccacggcgctggaactggcgatccgggtccaccccacaccggcgatctgcggcacccccaccgatgccgccgagggcctgatcatcgaggcggaatccccccgcaacttctacgccggtgccgtgggctggtgtgatgacaccggtgacggggaatacatggtggccatccgctgcgcggaggtctccggggatggaaaaaccgcccgcgcgtgggcgggcggtgggattgtggctgattccgatgctcaggaggagttcgacgagaccacggccaagctgcgcaccatcatgcgctcactgggcctgtag

SEQ ID NO: 35990 - protein, 376 aa, Corynebacterium efficiens YS-314
MATPLDPQAPPTAPDFLLSRAHGSVRTQGSQETFTDPWDAVEALRGGRVEMVVGALPFERDKPAALTVPERIIREDGPLEPHAYYRRGPGSVLAARVVGMDPSPEEHLRRVDAAIRTIRNSALGKVVLARAVDIAFDPAVDPRLVAARLIDNSYNRDGFITDLTAAGPGFTGHMLVGSSPEVLIKRQGSTVTAYPLAGSAPRSEDAAEDARRADSLHSSAKNLEEHAYVVDHIRAALAPLCSRVDIPARPELTRTHEMWHLATPIAGTLKDPSTTALELAIRVHPTPAICGTPTDAAEGLIIEAESPRNFYAGAVGWCDDTGDGEYMVAIRCAEVSGDGKTARAWAGGGIVADSDAQEEFDETTAKLRTIMRSLGL

SEQ ID NO: 35991 - DNA, 1188 bp, Escherichia coli CFT073
  CDS (1)..(1188): transl_table=11
gtggaggatgatatggatacgtcactggctgaggaagtacagcagaccatggcaacacttgcgcccaatcgctttttctttatgtcgccgtaccgcagttttacgacgtcaggatgtttcgcccgcttcgatgaaccggctgtgaacggggattcgcccgacagtcccttccagcaaaaactcgccgcgttgtttgccgatgccaaagcgcagggcatcaaaaatccggtgatggtcggggcgattcccttcgatccacgtcagccttcgtcgctgtatatacctgaatcctggcagtcgttctcccgtcaggaaaaacaagcttccgcacgccgtttcacccgcagccagtcgctgaacgtggtggaacgtcaggccattccggaacaaaccacgtttgaacagatggttgcccgtgctgccgcacttaccgccacgccgcaggtcgacaaagtggtgttgtcacggttgattgatatcactactgacgccgccattgatagtggcgtattgctggaacggttgattgcgcaaaacccggttagttacaacttccatgttccgttggctgatggtggcgttctgctgggggccagcccggaactgctgctacgtaaagacggcgagcgttttagctccattccgttagccggttccgcgcgtcgtcagccggatgaagtgctcgatcgcgaagcgggtaatcgtctgctggcgtcagaaaaagatcgccatgaacatgaactggtgactcaggcgatgaaagaggtactgcgcaaacgcagtagtgagttacacgttacctcctctccacaattgattaccacgccgacgctgtggcatctcgcaactccctttgaaggtaaagcgaattcgcaagaaaacgcactgactttggcttgtctgctgcatccgacccccgcgctgagcggtttcccgcatcaggccgcgactcaggttattgctgaactggagccgttcgaccgcgaactgtttggcggcattgtgggttggtgtgacagcgaaggtaacggtgaatgggtggtgaccatccgctgcgcgaagctgcgggaaaatcaggtgcgtctgtttgccggagcggggattgtgcctgcgtcctcaccgttgggtgagtggcgcgaaacaggcgtcaaactttctaccatgttgaacgtttttggattgcattaa

SEQ ID NO: 35992 - protein, 395 aa, Escherichia coli CFT073
MEDDMDTSLAEEVQQTMATLAPNRFFFMSPYRSFTTSGCFARFDEPAVNGDSPDSPFQQKLAALFADAKAQGIKNPVMVGAIPFDPRQPSSLYIPESWQSFSRQEKQASARRFTRSQSLNVVERQAIPEQTTFEQMVARAAALTATPQVDKVVLSRLIDITTDAAIDSGVLLERLIAQNPVSYNFHVPLADGGVLLGASPELLLRKDGERFSSIPLAGSARRQPDEVLDREAGNRLLASEKDRHEHELVTQAMKEVLRKRSSELHVTSSPQLITTPTLWHLATPFEGKANSQENALTLACLLHPTPALSGFPHQAATQVIAELEPFDRELFGGIVGWCDSEGNGEWVVTIRCAKLRENQVRLFAGAGIVPASSPLGEWRETGVKLSTMLNVFGLH

SEQ ID NO: 35993 - DNA, 1170 bp, Salmonella enterica subsp. enterica serovar Typhi Ty2
  CDS (1)..(1170): transl_table=11
atgtcactggccgaggacgctcaggagacaatggcaacgcttgctcccgatcgctttttcttcatgtcgccgtatcgcagttttaccacttccgggtgcttcgcccgttataccgagcctgcggttgccggagattcgccggatagccctttccagcagaaattgcgccagcagtttgccgaggccaaatcgcagggcatcgccaaccctatcctggtgggggcgatcccctttgatacccgtcagccgtcgtcgctatttatcccgatggcgtggcagtccttttcccgccagcaaaagcagcgcacggcgcgttattttactgaccatcagccgctgacggtgacggcgcgaaaggcgattccggagcaggatgcttttgaagcgatggtcgcacgcgcggctatgctgaccgccacgccagacgtcgataaagtggtgctttcccggctgatagatatcaccactgatgtggcggtggatagcggagcattgctggagcggctggttgcgcagaatccagttagttacaacttccatgtgccactggcggatggcggcgttctgctgggcgccagccccgaattgctgctacgcaaggagggcgagcggtttagttcgctgccgttagcaggctcggcacgccgacagcccgatgacgttctggatcgcgaggcgggaaaccgactgctggcttcacaaaaagatcgccatgaacatgagctggtgacgcaggcgatgaagcagatcctgcgcgatcgcagcacggaactgcaattaccttcctctccgcagttgatcaccacgccgacgctatggcatctcggtacgccgtttgagggcaaggccaacgccggagaaaacgcgcttacgctggcctgtctgctgcatccgacccctgcgttaagcggtttcccccatcaggtcgcgaaaaagctgattgctgaactggagccgttcgatcgtgaactgtttggcggcattgtcggctggtgcgatgccgaaggaaacggcgagtgggtagtgacgattcgttgtgcgaaattgcacggtaatcaggtgcgcctgttcgccggcgccgggattgttcctgcctcttcgccagtcggcgagtggcgggaaaccggcgtcaagctctctacgatgttgaacgtttttggactgcattaa

SEQ ID NO: 35994 - protein, 389 aa, Salmonella enterica subsp. enterica serovar Typhi Ty2
MSLAEDAQETMATLAPDRFFFMSPYRSFTTSGCFARYTEPAVAGDSPDSPFQQKLRQQFAEAKSQGIANPILVGAIPFDTRQPSSLFIPMAWQSFSRQQKQRTARYFTDHQPLTVTARKAIPEQDAFEAMVARAAMLTATPDVDKVVLSRLIDITTDVAVDSGALLERLVAQNPVSYNFHVPLADGGVLLGASPELLLRKEGERFSSLPLAGSARRQPDDVLDREAGNRLLASQKDRHEHELVTQAMKQILRDRSTELQLPSSPQLITTPTLWHLGTPFEGKANAGENALTLACLLHPTPALSGFPHQVAKKLIAELEPFDRELFGGIVGWCDAEGNGEWVVTIRCAKLHGNQVRLFAGAGIVPASSPVGEWRETGVKLSTMLNVFGLH

SEQ ID NO: 35995 - DNA, 1200 bp, Bacillus cereus ATCC 14579
  CDS (1)..(1200): transl_table=11
atgaatgaacatatagctgtaaaggaattgtcagaaaaacttttagaagattataagactgaatcttcattcttttttgcttcaccaactcgaacgatattagcagaaggagagtttactacagtaaagcatcgtgaaattgaaaatttcccagagcttgtgcaagcgacattaagtaatgcgaaacaagctggaaatccaaatcctatcgttgtgggtgctttgccattcgatcgtagaaaagaagtgcaacttatcgtaccagaatatagtaggatttctgagcgtttacaattggatacaacaaatcagcttgaaacaaatgagaacgtaacatttgaaatgacgccaatgccagaccctgaagtttatatgaatggtgtgaagcaaggaattaaaaaaatacaggtcggtgatttaaagaaaatcgttctatctagatcgttagatgttaaatcttcggaaaagattgataagcaaaaacttctgcgagaattagcagagcataataagcatggttatacatttgctgtgaatttaccgaaagatgaaaaagagaacagtaagacgctaattggagcaagtcctgaattgcttgtttcacgtaatggtatgcaagttatttctaatccgttagctggttcaaggccacgtagtgaggacctagtagaagataaaagaagagcagaggaattactttcttctccaaaagatttacatgaacatgcggtagtagttgaagcggttgccgctgcacttcgtccgtattgtcatacattacatgtcccagaaaagccatcagttattcatagtgaagcgatgtggcatttgtctacagaagtgaaaggtgaacttaaggatccaaatacttcttctttacaattagcaattgcccttcatcctacgccagcagtttgcggaactccgatggaaaaagcaagagaggctatacagcatattgagccatttgaccgcgagttctttacaggaatgctaggatggagcgatttaaatggagatggagaatggattgttacaattcgttgtgctgaagtacaagaaaatacacttcgtttatatgcaggagctggagttgttgctgagtcaaaaccagaagatgagttagcagaaacatcggctaagttccaaacaatgttaaaagctttagggttaagagatagttcacttaatgaaaaatag

SEQ ID NO: 35996 - protein, 399 aa, Bacillus cereus ATCC 14579
MNEHIAVKELSEKLLEDYKTESSFFFASPTRTILAEGEFTTVKHREIENFPELVQATLSNAKQAGNPNPIVVGALPFDRRKEVQLIVPEYSRISERLQLDTTNQLETNENVTFEMTPMPDPEVYMNGVKQGIKKIQVGDLKKIVLSRSLDVKSSEKIDKQKLLRELAEHNKHGYTFAVNLPKDEKENSKTLIGASPELLVSRNGMQVISNPLAGSRPRSEDLVEDKRRAEELLSSPKDLHEHAVVVEAVAAALRPYCHTLHVPEKPSVIHSEAMWHLSTEVKGELKDPNTSSLQLAIALHPTPAVCGTPMEKAREAIQHIEPFDREFFTGMLGWSDLNGDGEWIVTIRCAEVQENTLRLYAGAGVVAESKPEDELAETSAKFQTMLKALGLRDSSLNEK

SEQ ID NO: 35997 - DNA, 1200 bp, Bacillus anthracis str. Ames
  CDS (1)..(1200): transl_table=11
atgaatgaatttacggctgtaaaggaactgtcagaaaaattactagaagattataagactgaatcttcattcttttttgcttcaccaacccgaacgatattagcagaaggagaatttactacagtaaagcatcatgaaattgaaagcttcccagagcttgtgcaagcagtattacgtaatgcaaaacaagccggaaatccgaatcctatcgttgtgggggctttgccatttgatcgtagaaaagaagtccaacttatcgtaccagaatatagcagaatttctgagcgtttacaattggatccaacaaatcatcttgaaataaataggaacttaacattcgaaatgacgcctgtgccagatcatgaagtgtatatgaaaggtgtgaagcaaggaattgaaaaaataaaggacggagatttaaagaaaatcgttctatctagatcgttagatgttaaatcttctggaaaaattgataagcaaaaacttcttcgagaattagcagagcataataagcacggttatacatttgcggtgaatttaccgaaagatgaaaacgagaatagtaagacgctaattggagctagtcctgaattacttgtttcacgtcatggtatgcaagtgatttctaatccgttagctggttcaagaccacgtagtgacgatccagtagaagataaaagaagagcggaggaattactttcttctccaaaagatttgcatgaacatgcggtagtagtggaagcagttgctgctgcgcttcgcccatactgtcatacattatatgttccggaaaaaccatctgttattcatagtgaagcgatgtggcatttgtctactgaagtgaaaggtgaactaaagaatccaaatactagttctttagaattagcaattgctcttcatcctacgccagcagtttgcggaacgccgatggaagaagcgagagaagctattcaaaaaattgagccatttgaccgtgagttctttacaggaatgttaggttggagcgatttaaatggagacggtgaatggattgttacaattcgttgtgctgaagtacaagaaaatacactccgtttatatgcaggtgctggagttgttgctgagtcaaaaccagaagatgaattagcagaaacatcagctaagtttcaaacaatgttgaaagctttagggttaaatgatagttcacttaatgaaaagtag

SEQ ID NO: 35998 - protein, 399 aa, Bacillus anthracis str. Ames
MNEFTAVKELSEKLLEDYKTESSFFFASPTRTILAEGEFTTVKHHEIESFPELVQAVLRNAKQAGNPNPIVVGALPFDRRKEVQLIVPEYSRISERLQLDPTNHLEINRNLTFEMTPVPDHEVYMKGVKQGIEKIKDGDLKKIVLSRSLDVKSSGKIDKQKLLRELAEHNKHGYTFAVNLPKDENENSKTLIGASPELLVSRHGMQVISNPLAGSRPRSDDPVEDKRRAEELLSSPKDLHEHAVVVEAVAAALRPYCHTLYVPEKPSVIHSEAMWHLSTEVKGELKNPNTSSLELAIALHPTPAVCGTPMEEAREAIQKIEPFDREFFTGMLGWSDLNGDGEWIVTIRCAEVQENTLRLYAGAGVVAESKPEDELAETSAKFQTMLKALGLNDSSLNEK

SEQ ID NO: 35999 - DNA, 1179 bp, Chromobacterium violaceum ATCC 12472
  CDS (1)..(1179): transl_table=11
atgcacaccgcgtcggccctgaccggcaacgccgaagacggcgagttttatttcatgtcgtcccaccgcagcctgaaggccggcggtgtccattcccggatccgcacgcccgcccgcggcgcgctggatccccgcagcgcttttagcctcgaagtggcggaagccttcgcccgcgcccgcgccggcggcatcgaatccccagtgctgatgggcgccatccccttcgacatcgaccagccttccgaattgttcatccccgcccgccatgccttcttcgaccgcggcgagcgcctgctggcggccgcccagcgcgccggcgacggcggcaaggtggtcagcgcgcgcagcattccggacgagcaaggcttcaaggcggcggtcagccaggccatcgagcaattcggccgcggcgagatccgcaaggcggtgctgtcccgcgtgctggaggtggacttcgagcgcccggtgtcggcggaacgggtgttcgacgcggtatgcgcgcagaatcccaacggctaccagttccagctgccgctggccgacggcggccacctggtgggcgtgagtccggagctgctgctgcaaaaggacggcgcgcgcgtgcgcaccttcccgctggccggctccgccaagcgccagggcgacccggcggctgacgccgccgccagcgccaagctgctggattcggcgaaggaccactacgagcacagcctggtgatagacgatatccgcgacgtgctggcgccctattgctcccggctggacatccccgccgcgccgacgctgctggccacccgcgcgatgtggcatctgggctcgccgatagacggcgtgctctccgacccctcgctgccgattctgcagctggcctgccgcctgcatccgacgccggcgatctgcggcttccccacccaggcttcgcgccaactgatccgagagatcgagccgttcgagcgcggcgtgttcagcggcatcgtcggctggtgcgacgaacacggcaacggcgaatgggcggtgaccatacgctgcgccaccgtcgcccagcgccgcgtgcggctgttcgccggcgccggcatcgtcgccgcttccacgccggaagcggaatgggcggaaacccaggccaagctcggcaccatgctgggtgccttcggcctgtccggccaggaggcggtggcatga

SEQ ID NO: 36000 - protein, 392 aa, Chromobacterium violaceum ATCC 12472
MHTASALTGNAEDGEFYFMSSHRSLKAGGVHSRIRTPARGALDPRSAFSLEVAEAFARARAGGIESPVLMGAIPFDIDQPSELFIPARHAFFDRGERLLAAAQRAGDGGKVVSARSIPDEQGFKAAVSQAIEQFGRGEIRKAVLSRVLEVDFERPVSAERVFDAVCAQNPNGYQFQLPLADGGHLVGVSPELLLQKDGARVRTFPLAGSAKRQGDPAADAAASAKLLDSAKDHYEHSLVIDDIRDVLAPYCSRLDIPAAPTLLATRAMWHLGSPIDGVLSDPSLPILQLACRLHPTPAICGFPTQASRQLIREIEPFERGVFSGIVGWCDEHGNGEWAVTIRCATVAQRRVRLFAGAGIVAASTPEAEWAETQAKLGTMLGAFGLSGQEAVA

SEQ ID NO: 36001 - DNA, 1182 bp, Vibrio vulnificus YJ016
  CDS (1)..(1182): transl_table=11
atgaaacgtgaagtgattggctataccaaaatggcaaacgaactgttggataacgaactatcatcgtcgccatttttcttcgcttctccaaataacactatgatgggcatcggcgttcaagaagagcgtcttcaaaccttgccattttctgaattggctgatgtggcgaataacatgctcaagaatgccaaaactagcgaatcagacaatccggttttgtttggtgttgtgccatttaatcaagaaaacatgactcgatttgttattccaaagacgttgtacatctccagtagcacccgagcttcgcacacgtccgcctcctcagcaccacaagctcgtcttatttcttcgccaagtggccaccactataagcagggggtacatgatctcttagggatgtttgccaatcaggaactctcgaaagtcgtactgtctcgtgctatagaagtggcgacagaaaccgacattcaacagcaagccttactgagaaacttgctctccattaacgctaaaggctacacctttgctgcgcaaattggcgacaaccaaaagttgatgggagccagcccagagctgcttgtagccaaaaaaggcagccacctgatttccaatccgctggccggttcaagaccacgctcagagtctgagcaacaaaatcaggcgtccattcaatcgctgctcaatacgggcaaggatctccatgaacacggcttggtggtagaagaagttgagcgcgtcatgagcaagtattgctgcaatttgtacacgccgatggttccgtcggtgatcgagacccaaacgatgctgcatctttctacacaactcgaaggacaagtgttggatcctgccatcaatgtgttgcaagtggcagcggagctgcatcccaccccagcggtctgtggctaccctcgcgagaaagcctatgaagcgatcaaaagattggaacagtttgatcgcggttattttaccggcatggttggatggtgcgattcacgtggaaatggggagtgggttgtgacgattcgctgcgcagaagtgcagccgcgtcggatgaaggtgtttgctggagcgggcatcgtcaatgagtcgcaacctcaaagtgagcttgatgaaacaggggccaaaatgaacaccatcttaaaagccgcagggattcaactgaacgaaatgttaacggcataa

SEQ ID NO: 36002 - protein, 393 aa, Vibrio vulnificus YJ016
MKREVIGYTKMANELLDNELSSSPFFFASPNNTMMGIGVQEERLQTLPFSELADVANNMLKNAKTSESDNPVLFGVVPFNQENMTRFVIPKTLYISSSTRASHTSASSAPQARLISSPSGHHYKQGVHDLLGMFANQELSKVVLSRAIEVATETDIQQQALLRNLLSINAKGYTFAAQIGDNQKLMGASPELLVAKKGSHLISNPLAGSRPRSESEQQNQASIQSLLNTGKDLHEHGLVVEEVERVMSKYCCNLYTPMVPSVIETQTMLHLSTQLEGQVLDPAINVLQVAAELHPTPAVCGYPREKAYEAIKRLEQFDRGYFTGMVGWCDSRGNGEWVVTIRCAEVQPRRMKVFAGAGIVNESQPQSELDETGAKMNTILKAAGIQLNEMLTA

SEQ ID NO: 36003 - DNA, 1134 bp, Corynebacterium diphtheriae NCTC 13129
  CDS (1)..(1134): transl_table=11
atgtgtgcccatcgccccgctactgcccccgattttttactctcccgtagccatggctctatccgtacccaaggcgcggtagagacgttttccgaccccgggaaagcggtagaagccttacgtagcgggcgcgtagagctcgttgttggcgcccttgcttttcgacgcgaccacgcctgcgcccttacggttccccgctccgtcatacgcgaggagggccccttagagccccacgcatattaccgacaaggacccggcagcattgtgaatgctcaagtagaaaagcttgtcccatcactcgataaacatcatgcccgcgtcgaagcagcgatcaatacaataaagtccacatccttgaaaaaagtcgttttagcacgcgcagtggatatgacgttctcccctgccgtcgatccacgacttatcgctgcacgcctgattgatctttcccgcaaccgcgatggtttcatcgcagacctcacccctgccggcgaagattttgcaggagcaatgcttgtaggctcatcaccagaagtacttatcaagaaacaaggctcaaccgtgacggcgtatcccctcgctggttctgcacccagaagcgcggatgcggtcacagatgccaccaatgccgaacttttacgacgttcccacaaagatctacaagaacactcgtacgttgtagagcatcttcgcaatgttttagagccactatgttcaaagctcagcatccccgcaaaccctgagctcaccaagaccaatgaaatgtggcaccttgccactcctgttgttggaaccttaaaggacgcatcacttactgcacttgaattagcaatgcgcactcatcccacccctgccatctgcggcactccgactgatgcggccgaagagctcatcagcatcgcagaaggcgatcgccggttctatgcaggaaccgtgggctgggcagacaaccacggcgatggtgaattcatggtgtctatccggtgtgccgaggtaagcagtgacggcacctccgcacgagcatgggcaggcggaggaatcgtcgcagaatctgatgcggccgcagaagtcgaagaaacaactgcgaaacttcgcaccatcatgaaagctttaggcattacttctttcgacgcttaa

SEQ ID NO: 36004 - protein, 377 aa, Corynebacterium diphtheriae NCTC 13129
MCAHRPATAPDFLLSRSHGSIRTQGAVETFSDPGKAVEALRSGRVELVVGALAFRRDHACALTVPRSVIREEGPLEPHAYYRQGPGSIVNAQVEKLVPSLDKHHARVEAAINTIKSTSLKKVVLARAVDMTFSPAVDPRLIAARLIDLSRNRDGFIADLTPAGEDFAGAMLVGSSPEVLIKKQGSTVTAYPLAGSAPRSADAVTDATNAELLRRSHKDLQEHSYVVEHLRNVLEPLCSKLSIPANPELTKTNEMWHLATPVVGTLKDASLTALELAMRTHPTPAICGTPTDAAEELISIAEGDRRFYAGTVGWADNHGDGEFMVSIRCAEVSSDGTSARAWAGGGIVAESDAAAEVEETTAKLRTIMKALGITSFDA

SEQ ID NO: 36005 - DNA, 1182 bp, Listonella anguillarum
  CDS (1)..(1182): transl_table=11
atgaaacgagaggttgtcggtttttccaaaatggccaacgagatgtttaacaaagaactgttaaaatcaccgttctttttttcatccccctataattcaatgcttggtgttggcatcaaaacacaatgtagtcattccatacctttctcacaactagcaagcaaagctgaagagctattaaaaaaggctaaaacaaaggatagcgataaccctgtactatttgcgaccgttccatttgacgaaagaacacccactcaattttgtattcctgaaacgctttatgtttccagcagtacacgtagtcaaggtagcagtgattgtacgtctcagaaagccaaggtaatctcgccaccaactggggaagattataaaaatggcgtatcgcatttgctggacctttttgataccactgaactatcaaaagtcgtactttctcgatcggtaaaaattacgaccgatgaaaacatcaaccaatgttcgctattacgtaacttattatcaataaacacaaatggttatactttttgctctcaaatctcggagcgttctaagcttatgggagcgagcccagagctgctcctttccaaaaaaggcagccacgtattatctaatccgctagctggatctcgagctaaatcgtcttgtggtgttgaaaaccaaaatgcgtattcttctttacttgatactcaaaaagatctaaacgaacataacttagtagttgaggaagtcgaaaaggttctcagcaattattgccataacctatatacgccaatggttccctctgtaattgaaacagaaaccatgctgcatttgtctactgtgttacaagggcaagcagatgatccaaatatcaacgccttaaaaattgcagcagatcttcacccaacaccggcagtatgtggtttcccacgacaaccagcctatgctgccataaaagaaattgaaaatttcgatcgcggttactttaccggaatggtgggctggtgtgatgcaagaggcaatggcgaatgggtcgtaaccattcgatgtgcagaagtaagcctacgatctatgtcgatttatgctggtgcagggatcgttcatgaatcctcacctcaaagtgaactcgacgaaaccggagctaaaatgaaaaccattttgcgtgcggctggaatacaagtagatgagttactcactgtataa

SEQ ID NO: 36006 - protein, 393 aa, Listonella anguillarum
MKREVVGFSKMANEMFNKELLKSPFFFSSPYNSMLGVGIKTQCSHSIPFSQLASKAEELLKKAKTKDSDNPVLFATVPFDERTPTQFCIPETLYVSSSTRSQGSSDCTSQKAKVISPPTGEDYKNGVSHLLDLFDTTELSKVVLSRSVKITTDENINQCSLLRNLLSINTNGYTFCSQISERSKLMGASPELLLSKKGSHVLSNPLAGSRAKSSCGVENQNAYSSLLDTQKDLNEHNLVVEEVEKVLSNYCHNLYTPMVPSVIETETMLHLSTVLQGQADDPNINALKIAADLHPTPAVCGFPRQPAYAAIKEIENFDRGYFTGMVGWCDARGNGEWVVTIRCAEVSLRSMSIYAGAGIVHESSPQSELDETGAKMKTILRAAGIQVDELLTV

SEQ ID NO: 36007 - DNA, 1095 bp, Mycobacterium avium subsp. paratuberculosis K-10
  CDS (1)..(1095): transl_table=11
gtgaacgacgaaccgacgttcgcgctgtgcgggccgacgcaaaccctggtcgccgacggcgtacggcgaagctaccgcgacgtggccgccgcgcaggccgcgctgcgctcccaagaagtgtcaattgtgttgggcgcgttgcctttcgacgtgcgccgaccggccgccctgctgaccccggataccgtgagcgtcagcgacggcccaccggactggccggcccggaagctgccgtcggtgcgggttgccgccgccctccccccgccgatcgactaccgggaccggatctgccgggcccgcgagcagctcgccgcaaccgacaacccgctgcacaaggtggtgctggcccgcgccctgcacctggtcgccgacgccccgctggatgcccgcaccatcctgcgccggctgatcgccgccgacccgggcgcgtacggctatctcgtcgacctcagcgccgccggccacgaccatgcgggcgtggcgctggtgggcgccagccccgagcttctggtggcgcgcaccggcgaccgggtcgagtgccggccgttcgccgggtcggccccgcgtgccgccgatccggacaccgacgcggccaacggtgccgcgctggcgtcgtcggccaagaaccgccacgagcatcagctggtgatcgagaccatcagggccgccttggagccgctgtgcgacgacctgtccatcgcggccgaaccgcagctgagccgcaccgccacggtgtggcacctgtgcacgccgatcagcgggcggctgcacgataggtcaaccaccgcaatcgatttggcgctggcgttgcaccccacaccggcggtcggcggggtgccgaccgacgccgccgtcgagctgatcgccgacctggagggcgaccgcggcttctacgccggcgcggtgggatggtgtgacgcccgcggcgacggccgctgggtggtgtccatccgctgcgcgcagttgtcggccgaccggcgcagcgcgctggcgcgggccggcggcggtatcgtcgccgaatccgatcccgacgacgaagtcgcggaaaccacaacgaaattcgccaccatactcaacgccctggacgtccgatga

SEQ ID NO: 36008 - protein, 364 aa, Mycobacterium avium subsp. paratuberculosis K-10
MNDEPTFALCGPTQTLVADGVRRSYRDVAAAQAALRSQEVSIVLGALPFDVRRPAALLTPDTVSVSDGPPDWPARKLPSVRVAAALPPPIDYRDRICRAREQLAATDNPLHKVVLARALHLVADAPLDARTILRRLIAADPGAYGYLVDLSAAGHDHAGVALVGASPELLVARTGDRVECRPFAGSAPRAADPDTDAANGAALASSAKNRHEHQLVIETIRAALEPLCDDLSIAAEPQLSRTATVWHLCTPISGRLHDRSTTAIDLALALHPTPAVGGVPTDAAVELIADLEGDRGFYAGAVGWCDARGDGRWVVSIRCAQLSADRRSALARAGGGIVAESDPDDEVAETTTKFATILNALDVR

SEQ ID NO: 36009 - DNA, 1869 bp, Arabidopsis thaliana
  CDS (1)..(1869)
atggcttcacttcaattttcttctcagtttctgggctcaaacactaaaacacacagctctatcatttccatctctcgtagttactctccaactccattcactagattctcccgcaagaagtatgagtcatgttcgatgtctatgaatggttgtgatggagatttcaagacgccacttggtacagtggagacaaggactatgactgctgttttatctccggcagccgccactgaaaggctaatctccgccgtctctgaactcaaatctcaacctccgtcgttttcctccggcgtcgttcggttacaggttccaattgaccagcaaatcggagcaattgattggcttcaagcccagaatgagattcagcctcgctgtttcttctctcgtcgcagtgacgttggtcgtcccgatcttcttctcgatctagctaacgagaacggaaacggaaacggaaacggaacagtgtcatctgatcgtaatctggttagcgttgctggtatcggctctgcagttttcttccgtgaccttgatcctttctctcatgacgattggagatccatcagaaggtttttgtcttcaacgtcacctctgattcgtgcctatggtggtatgcgttttgatcctaatggcaagatcgctgttgaatgggaaccttttggtgcattttacttttcagtccctcaggttgagtttaatgagtttggtggaagttcaatgttggctgcaactattgcttgggatgatgaactctcttggactctggaaaatgctattgaagcactccaggagactatgcttcaagtttcttctgttgtaatgaagttgagaaacagatctttaggagtatctgttttaagcaagaatcatgttcctaccaaaggagcttatttccctgctgtagagaaggctttagagatgattaaccagaaaagttcaccccttaacaaggttgttcttgctcgtaacagcaggataattacggataccgacattgatcccattgcttggctagcacagttacagcgtgaagggcatgatgcatatcagttctgtcttcaaccacctggtgcaccagcttttatcggaaacacgcctgagagactattccaaaggactcaattaggtgtctgcagtgaagctttggctgcaactaggcctagagctgcttctagtgctcgtgatatggagatagagcgtgacttactaaccagtccgaaagacgacctcgagttctctatcgtacgagagaatataagagaaaagttaaacggtatatgtgacagagttgttgtcaagcctcaaaaaactgtgaggaagcttgcaagagtgcaacatctatattctcaattggcagggagacttacgaaggaagatgatgagtataaaatattggctgctctgcatccaactccagctgtttgtgggcttccagcagaagaagcaaggcttttgattaaggagatagaatcattcgatagaggaatgtatgcgggacctattggattttttggtggcgaggagagtgaatttgcagtcgggatcagatcagctctagtcgaaaagggtcttggggcattgatctatgcggggacagggatagtagctggaagtgacccatcttcagagtggaatgagcttgatcttaagatatctcaggtacgagcttttgtccagaaaatgtttagtgacatcatggttctctgttaccaaaatcctaatttttattctctcttttgttgttgtttttgcagttcaccaagtcaattgaatatgaagcaacaacatctctacaggcgattaattgaagaaagagtaacatttgtatttgattgttttgtttgtatgggggataaggggttctcacaataa

SEQ ID NO: 36010 - protein, 622 aa, Arabidopsis thaliana
MASLQFSSQFLGSNTKTHSSIISISRSYSPTPFTRFSRKKYESCSMSMNGCDGDFKTPLGTVETRTMTAVLSPAAATERLISAVSELKSQPPSFSSGVVRLQVPIDQQIGAIDWLQAQNEIQPRCFFSRRSDVGRPDLLLDLANENGNGNGNGTVSSDRNLVSVAGIGSAVFFRDLDPFSHDDWRSIRRFLSSTSPLIRAYGGMRFDPNGKIAVEWEPFGAFYFSVPQVEFNEFGGSSMLAATIAWDDELSWTLENAIEALQETMLQVSSVVMKLRNRSLGVSVLSKNHVPTKGAYFPAVEKALEMINQKSSPLNKVVLARNSRIITDTDIDPIAWLAQLQREGHDAYQFCLQPPGAPAFIGNTPERLFQRTQLGVCSEALAATRPRAASSARDMEIERDLLTSPKDDLEFSIVRENIREKLNGICDRVVVKPQKTVRKLARVQHLYSQLAGRLTKEDDEYKILAALHPTPAVCGLPAEEARLLIKEIESFDRGMYAGPIGFFGGEESEFAVGIRSALVEKGLGALIYAGTGIVAGSDPSSEWNELDLKISQVRAFVQKMFSDIMVLCYQNPNFYSLFCCCFCSSPSQLNMKQQHLYRRLIEERVTFVFDCFVCMGDKGFSQ

SEQ ID NO: 36011 - DNA, 1200 bp, Bacillus cereus ATCC 10987
  CDS (1)..(1200): transl_table=11
atgaaggaatttacggctgtaaaggaactgtcagaaaaattactagaagattataagactgaatcttcattctttttcacttcaccaactcgaacgatattagcagaaggagagtttactacagtaaagcatcatgaaattgaaagtttcccagagcttgtacaagcagtattatgtaatgcaaaacaagccggaaatccgaatcctatcgttgtcggtgctttgccatttgatcgtagaaaagaagtccaacttatcgtaccagaatatagtaggacttctgagcgattacaattggatacaacaaatcagcttgaaataaatgagaacttaacattcgaaatgacgcctgtaccagcgcctgaagtgtatatgaatggtgtgaagcaaggaattgcaaaaataaagggcggggatttaaaaaaaatcgttctatccagatcgttagatgttaattcttccgaaaagattgataagcaaaaacttcttcgagaattagcagcgcataataagcacggatatacatttgctgtgaatttatcgaaagatgaaaatgagaatagtaagacgttaattggagcgagccctgaattactcgtctcacgtaatggtatgcaagttatttctaatccgttagctggttcaaggccacgtagtgaggattcagttgaagataagagaagagcagaggaattactttcttctccaaaagatttacatgaacatgcggtagtagtagaagcagttgctgcagcgcttcgtccgtactgtcatacattacatgttccggaaaagccatccgttattcatagtgaagcgatgtggcatttatctactgaagtgaaaggtgaattaaaggatccgaatactacttctttggaattagcaattgctcttcatccgacgccagcagtttgcggcacaccgatggaagaatcgagagaggcgattcaaaaaattgagccatttgaccgtgaattctttacaggaatgctagggtggagtgatttaaatggagacggtgaatggattgttacaattcgttgtgctgaagtacaagaaaatacactccgtttatatgcaggagcgggcgttgttgctgagtcaaaaccagaagatgaattagcagaaacatcagctaagtttcaaacaatgttgaaagctttaggattaaatgatagttcacttaatgaaaagtag

SEQ ID NO: 36012 - protein, 399 aa, Bacillus cereus ATCC 10987
MKEFTAVKELSEKLLEDYKTESSFFFTSPTRTILAEGEFTTVKHHEIESFPELVQAVLCNAKQAGNPNPIVVGALPFDRRKEVQLIVPEYSRTSERLQLDTTNQLEINENLTFEMTPVPAPEVYMNGVKQGIAKIKGGDLKKIVLSRSLDVNSSEKIDKQKLLRELAAHNKHGYTFAVNLSKDENENSKTLIGASPELLVSRNGMQVISNPLAGSRPRSEDSVEDKRRAEELLSSPKDLHEHAVVVEAVAAALRPYCHTLHVPEKPSVIHSEAMWHLSTEVKGELKDPNTTSLELAIALHPTPAVCGTPMEESREAIQKIEPFDREFFTGMLGWSDLNGDGEWIVTIRCAEVQENTLRLYAGAGVVAESKPEDELAETSAKFQTMLKALGLNDSSLNEK

SEQ ID NO: 36013 - DNA, 1401 bp, Prochlorococcus marinus str. NATL1A
  CDS (1)..(1401): transl_table=11
atgaatttagaacccgtctttagtgagcttttagttagttctcttcagaaatggagtgtaagaaaagttgatgaatgtatcttgagcatttctgttcctgtaagtcaaacagatcctttaacgacattacctttaattgctgaaaaacatcagtttagatttctttgggatctctctcccggattgtgcctttctgccggaggtcattgtcaatctttggatttatctggaccaaagaggtttgaaaatgcacaaagatttagtgatgagatttttactcgattaatagaaatttctccaagtccagcattttcagcctcaaggattttattttcattttctttctttgatcaaattaaaagtaatgaaaaatcaatagatgataaattttccctacaggctgttttgcctaagtggcaattaaccgcaaaagatggattaacatggttacgtttaaattcagttgcccaaaatccttcagatgttcgtgaagccatagaaagattatggtcaattcgagaaaagataaataaatcaccagtccgaattgtcaatgatgaaaaagaaaatttcttagtcgataatttctcagatgattggaaatcgcaatatcgagatgcgttggctaaagggatcgaattaataaatgcaggtgatttggataaacttgtattggctacgagacaacatctctccctaagaaaaccattagatccactgcatttacttgctcgtttaagagttcagcaaactaatagttgtcgattcctatggcaaaaaaatcatgatgagtcattttttggtgcatcgcctgaaagattgataagtctcaatcaaaatcagttattaatcgatgctttagctggtactgcaaaaaaaggtgatgatgggagagaattgcttgcttcctctaaagatttaagagaacaccattttgtagttaattctattgtcgaacaacttttaaaaagaggtattaaagcaagttatccatctcaaccaaaattaatgactcaagaccatttaattcatttgcatactcttattcaagcctctgttaaagagaaatctcctcttgatttagttgaagcacttcatccaacccctgctgttgcaggattacctctgaataaatctttgagttggttgagagctttagaaccatttgaccgtaaaacatatgcttctccaattgggtggatagataaaaatcaaaattcagaatttagggttgccatacgttatggacagcttaaagctaatgaacttaaattatttgctggcgctggtttagtaaaaggttcaactgttgagggggaaatgcaagaagtagctttgaaatttgaagttttaagaaatcaattaaatttagatagagttaattgttcaaatgatctataa

SEQ ID NO: 36014 - protein, 466 aa, Prochlorococcus marinus str. NATL1A
MNLEPVFSELLVSSLQKWSVRKVDECILSISVPVSQTDPLTTLPLIAEKHQFRFLWDLSPGLCLSAGGHCQSLDLSGPKRFENAQRFSDEIFTRLIEISPSPAFSASRILFSFSFFDQIKSNEKSIDDKFSLQAVLPKWQLTAKDGLTWLRLNSVAQNPSDVREAIERLWSIREKINKSPVRIVNDEKENFLVDNFSDDWKSQYRDALAKGIELINAGDLDKLVLATRQHLSLRKPLDPLHLLARLRVQQTNSCRFLWQKNHDESFFGASPERLISLNQNQLLIDALAGTAKKGDDGRELLASSKDLREHHFVVNSIVEQLLKRGIKASYPSQPKLMTQDHLIHLHTLIQASVKEKSPLDLVEALHPTPAVAGLPLNKSLSWLRALEPFDRKTYASPIGWIDKNQNSEFRVAIRYGQLKANELKLFAGAGLVKGSTVEGEMQEVALKFEVLRNQLNLDRVNCSNDL

SEQ ID NO: 36015 - DNA, 1098 bp, Mycobacterium sp. JLS
  CDS (1)..(1098): transl_table=11
gtgaccgtcgagccgagcttcgtcctcaccggcgacgacggtgtcgtcctggccgacggcgtccacacgccgtaccccgcgctgggcgacgcgcgcaccgcgctgggcgcaggcgatgccccaatgatcctgggcgccttgcctttcgacctgaccgcgccgacggcactgttccgcccgcagcacgtacgcttcctcgatgcgctgccggactggtcggccgtcgacctgccacgtgtacggatcgccgagttccggcccgcaccccaggagcaccgcgcacgcgtcgcgtcggcggtgcgcgcgctgaacgaccccgccaccggactgcacaaagtcgtcctcgcgcgggcgctgcacctgaccgccgacggaccactagacgcgcgaaccgtgctgcggcgcctgctcgccgacgatgcgagcgccaacgcgtatctggccgatctcaccgcagccggagcccactaccgcggtgcggccctgatcggcgccagcccggaactgctggtggcccggcgcggtgaggtggtgacgtgccaacccttcgccggttcggcgccgcggttcgccgaccccgcggcggaccgggccagcggcgccgccctcgccgactccgccaagaaccggcacgaacacgccatcgtgatcgacgaggtgcgcaaggctctcgacccgctgtgcgtggatctgcaaatcgcgccgacaccgcacctcagcgcgacggccgccgtctggcacctgagcactcagatcaccggacggttacgcgaaacaaccactaccgcactggatctcgcggtcgcactgcacccgaccccggccgtcggcggcgttccgaccgacctggccgcggagttgatcaaacgcctcgagggcgaccgcggcttctacgccggcgccgtcggctggtgcgacgcgacgggtgacggccgctgggtggtgtccatccggtgcgcccaactggccgccgatcggctcgccgccaccgcccactccgggggcggcatcgtcgccgaatccgatccggacgacgaagtcgcagagaccacaacgaaattcacgaccatcctgtccgcactgggggtaacgcaatga

SEQ ID NO: 36016 - protein, 365 aa, Mycobacterium sp. JLS
MTVEPSFVLTGDDGVVLADGVHTPYPALGDARTALGAGDAPMILGALPFDLTAPTALFRPQHVRFLDALPDWSAVDLPRVRIAEFRPAPQEHRARVASAVRALNDPATGLHKVVLARALHLTADGPLDARTVLRRLLADDASANAYLADLTAAGAHYRGAALIGASPELLVARRGEVVTCQPFAGSAPRFADPAADRASGAALADSAKNRHEHAIVIDEVRKALDPLCVDLQIAPTPHLSATAAVWHLSTQITGRLRETTTTALDLAVALHPTPAVGGVPTDLAAELIKRLEGDRGFYAGAVGWCDATGDGRWVVSIRCAQLAADRLAATAHSGGGIVAESDPDDEVAETTTKFTTILSALGVTQ

SEQ ID NO: 36017 - DNA, 1200 bp, Bacillus thuringiensis serovar konkukian str. 97-27
  CDS (1)..(1200): transl_table=11
atgaatgaatttacggctgtaaaggaactgtcagaaaaattactagaagattataagactgaatcttcattcttttttgcttcaccaacccgaacgatattagcagaaggagaatttactacagtaaagcatcatgaaattgaaagcttcccagagcttgtgcaagcagtattacgtaatgcaaaacaagccggaaatccgaatcctatcgttgtgggggctttgccatttgatcgtagaaaagaagtccaacttatcgtaccagaatatagcaggatttctgagcgtttacaattggatacaacaaatcatcttgaaataaataggaacttaacattcgaaatgacgcctgtgccagatcatgaagtgtatatgaatggtgtgaagcaaggaattgaaaaaataaaggacggagatttaaagaaaatcgttctatctagatcgttagatgttaaatcttctggaaaaattgataagcaaaaacttcttcgagaattagcagagcataataagcacggttatacatttgcggtgaatttaccgaaagatgaaaacgagaatagtaagacgttaattggagctagtcctgaattactcgtttcacgtcatggtatgcaagtgatttctaatccgttagctggttcaagaccacgtagtgatgatccagtagaagataaaagaagagcggaggaattactttcttctccaaaagatttgcatgaacatgcggtagtagtggaagcagttgctgctgcgcttcgcccatactgtcatacattacatgttccggaaaaaccatctgttattcatagtgaagcgatgtggcatttgtctactgaagtgaaaggtgaactaaagaatccaaatactagttctttagaattagcaattgctcttcatcctacgccagcagtttgcggaacgccgatggaagaagcgagagaagctattcaacaaattgagccatttgaccgtgagttctttacaggaatgttagggtggagcgatttaaatggagacggtgaatggattgttacaattcgttgtgctgaagtacaagaaaatacactccgtttatatgcaggtgctggagttgttgctgagtcaaaaccagaagatgaattagcagaaacatcagctaagtttcaaacaatgttgaaagctttagggttaaatgatagttcacttaatgaaaagtag

SEQ ID NO: 36018 - protein, 399 aa, Bacillus thuringiensis serovar konkukian str. 97-27
MNEFTAVKELSEKLLEDYKTESSFFFASPTRTILAEGEFTTVKHHEIESFPELVQAVLRNAKQAGNPNPIVVGALPFDRRKEVQLIVPEYSRISERLQLDTTNHLEINRNLTFEMTPVPDHEVYMNGVKQGIEKIKDGDLKKIVLSRSLDVKSSGKIDKQKLLRELAEHNKHGYTFAVNLPKDENENSKTLIGASPELLVSRHGMQVISNPLAGSRPRSDDPVEDKRRAEELLSSPKDLHEHAVVVEAVAAALRPYCHTLHVPEKPSVIHSEAMWHLSTEVKGELKNPNTSSLELAIALHPTPAVCGTPMEEAREAIQQIEPFDREFFTGMLGWSDLNGDGEWIVTIRCAEVQENTLRLYAGAGVVAESKPEDELAETSAKFQTMLKALGLNDSSLNEK

SEQ ID NO: 36019 - DNA, 1395 bp, Bacillus thuringiensis serovar konkukian str. 97-27
  CDS (1)..(1395): transl_table=11
gtgattcaaacgaaacaaataggcttgcaagaagttctaagtgcggccattaagcgtgcaactgatgaaaaaatattggtgagcttcgtaaaacaaatagactggatggatccgcttctgttttatgcagcaggaaaaaggatctcattcgaaaatagatgttattttgcagacccagcgcagcatgtaatatttgctggaattggctctgttttcactatagcaactgcttctcacaaacgctttcaaactgctcgtgacgagtgggataaagtaaaagagaaagcatttgtacaaagggaaaaatacgagtttggaacaggtcctcttttatttggtggattttcatttgaccaagaaaaagagaaaacagatttatggaaagaatttgatgatacgacattttcactaccggcatttttattaactgtaaaaaatgaaaaagcatggttaacaatgaatacattcgtttcagcaacagattgtgcagaaactctttataacgaaattgtttctttagaagagaaaatttttgaggagagtaaatgtgcactagaaggatcaaaattaacagttacttctaaagtagaagtggatccgaaaggctggatgaaagccattgagaaagtgcaagatgagatgaagcaggggaacgtacagaaggttgtattagcgagggagctaaaagtagagatggatcatcatattgattctgctcttgttttagaagcacttcgcattggacaaccagattgttacgtattttcttttgattataaaggagcatgcttcttaggagcgacgccagagagattaattcgcaaagaagatgagaagtttacttcaatgtgtcttgctggttcaactggtcatggtcaatctatagaagaaagtaagcgaaatagtaatgcgcttcttcatgatgaaaagaatttagctgaacacggttatgttgtgaacatgattaggtcggtattaaatgagcactgcgaattcgttaatattccagaaagtccaggtctattaacaacgaaaaacttaattcatttatatacgcctgtagaggcaaaaggcgatgcgagtcttttaacgatggtagaagaattacatccaacaccagctcttggcgggacacctcgtttagaagcgatgaaactaattcgtgatgttgaattgttagacagaggattatatggtgcaccgattggctggatagatgatgaaggaaatggtgaatttgcggttgcacttcgctgcggattattaaatggcgagaaagcatccttatttgccggttgcggaattgtaattgattcagtaccacaacttgaatatgaagaaacaagtttgaagtttagaccgatgcttggtgctttggaggaattaatgaaatga

SEQ ID NO: 36020 - protein, 464 aa, Bacillus thuringiensis serovar konkukian str. 97-27
MIQTKQIGLQEVLSAAIKRATDEKILVSFVKQIDWMDPLLFYAAGKRISFENRCYFADPAQHVIFAGIGSVFTIATASHKRFQTARDEWDKVKEKAFVQREKYEFGTGPLLFGGFSFDQEKEKTDLWKEFDDTTFSLPAFLLTVKNEKAWLTMNTFVSATDCAETLYNEIVSLEEKIFEESKCALEGSKLTVTSKVEVDPKGWMKAIEKVQDEMKQGNVQKVVLARELKVEMDHHIDSALVLEALRIGQPDCYVFSFDYKGACFLGATPERLIRKEDEKFTSMCLAGSTGHGQSIEESKRNSNALLHDEKNLAEHGYVVNMIRSVLNEHCEFVNIPESPGLLTTKNLIHLYTPVEAKGDASLLTMVEELHPTPALGGTPRLEAMKLIRDVELLDRGLYGAPIGWIDDEGNGEFAVALRCGLLNGEKASLFAGCGIVIDSVPQLEYEETSLKFRPMLGALEELMK

SEQ ID NO: 36021 - DNA, 1188 bp, Acinetobacter sp. ADP1
  CDS (1)..(1188): transl_table=11
gtgtattacaaggggaatggcttcatgaatgatatgaatctctcaattgatcatgcaattgaactgaatattaacctagaatcttcttgttttttaactaaagattatcgtttattagcatcagatttagctgaagtagtaaaattagctgcttgcgattatgaaaaattaagtcaaaccattacagatagttttcagaaattaaaaaaagatccaaatgcaaatccaattttggttggtgcaattccattcgatacaacacaagcatcgtctctcaatatttatcggaatcatcgtaaacaaagacaattggtgatttcatctaaaataactcattcgccattatctatttcaaatcaaaaacctttgattaaacaaaaagattttgcgcatgccattgatattgcaattgatcagtttaggtgtgatcaattggaaaaagtggttttgtcacaggctgtggattttgaactttcacagtcacaaaatccttttgatttggttgatacattagctaaagaaaatccacatgcatttagttttgctattccagttgaagacaatgcttaccttctgggtgcaagtccagagttactgatttcaaaaaatgatctgactgttcgtagtaatcctttagcaggctctcgtcctttaagtgaggatgaaaatataaatcagtcacgtattcatgaattgtatgcatcagaaaaagatcttaatgagcatcaaattgtggtggacagtgtcttagaaaatttaaagccattttgccaaaaattaaaggttttagagaaacctgaaattttaaaaacggccacgatgcttcatctttcgaccgtatttgatggtcagttgaaaaagcagtctgacaatgcgttgcagttggcattggctttacatcctacacctgcaatctgtggttcacctaccgagcctgcaaaacagtttattttagaacatgagggttacgaccgtcattattttgctggtttggtgggatggatggatgcccaaggtaatggcgaatgggctgtcactattcgttgcggtttactcaatgataaaaaaattcgtttatatgctggtgctggaattgtgatgggatcacaagctgaacttgaatggagtgaaactgaagtcaaaatgcaaactctactaaaaaccctaagcgcaacttttcattcctga

SEQ ID NO: 36022 - protein, 395 aa, Acinetobacter sp. ADP1
MYYKGNGFMNDMNLSIDHAIELNINLESSCFLTKDYRLLASDLAEVVKLAACDYEKLSQTITDSFQKLKKDPNANPILVGAIPFDTTQASSLNIYRNHRKQRQLVISSKITHSPLSISNQKPLIKQKDFAHAIDIAIDQFRCDQLEKVVLSQAVDFELSQSQNPFDLVDTLAKENPHAFSFAIPVEDNAYLLGASPELLISKNDLTVRSNPLAGSRPLSEDENINQSRIHELYASEKDLNEHQIVVDSVLENLKPFCQKLKVLEKPEILKTATMLHLSTVFDGQLKKQSDNALQLALALHPTPAICGSPTEPAKQFILEHEGYDRHYFAGLVGWMDAQGNGEWAVTIRCGLLNDKKIRLYAGAGIVMGSQAELEWSETEVKMQTLLKTLSATFHS

SEQ ID NO: 36023 - DNA, 1197 bp, Erwinia carotovora subsp. atroseptica SCRI1043
  CDS (1)..(1197): transl_table=11
gtggatacactgatttcagaaactgaaacatttagcggactaacctattcggaacagaccgcttttttatatgcatcggaacaccgaagcctttctacttccggcttatttgaacgtatttcgtcccctgtttgtgctccaggctcgcacaatgacgagcttagccttgccatcgcgcaggcattccaacgggcacgtcaggcagggcaatcgctgcctattgttgtgggagcgattccttttgataccacgcaaccatcttgtctctatatccctgatagttataccgttacgacgaaatatgaactcgtcagccgtgctcgtaagcacacggcagtggcgcccactgcgttaacgctaaacagtgtcccaggagaatgtcagttcaagtccatcgtggcagaggccgttgaacgcttccgccgtggtgaactgagcaaagccgtgctgtcacgcattctggacattgaactggcgagccccgttaaggcgcaaacgatcctcaacaatctgatggtgcaaaacgccggtggatatcacttctcactgccattgccggatggctctgtattgctgggtgccagccctgaactgctgctgcgtaagcagggaaacgtgattgtgtctaatccactggcgggatcggcacgacggatgaacgatgaacatctggactatctgaacagccagcgtttgctgaattcaggcaaagacaagcacgagcataagctggtggtggacgacattcgtcaacgcctgatgccgctgtgcgcgtcgttaaccattccatcggctccctcgctgatgagtactgcctcgatgtggcacttgtccactgcgatccgcggtgaactggcgaacccggatatgacagcacttcaggtcgcctgtcagctccatcctacccccgcactgtgcggtttccccacgcaggaagctcgtcagttgatcgccgaactggaaccgcacgatcgtggcgtattcagcgggatcgtcggctggtgtgatgctaacggtgatggcgaatgggtgatagtcattcgctgcggcaccataaaacacaataaagtccgcctgtttgctggtgcgggtattgttgaggcatccgtccccgaggatgaatgggctgaaaccgccgctaaattaaacacgatgctgaatgcgtttgggcttaactctggtgtggatggactatga

SEQ ID NO: 36024 - protein, 398 aa, Erwinia carotovora subsp. atroseptica SCRI1043
MDTLISETETFSGLTYSEQTAFLYASEHRSLSTSGLFERISSPVCAPGSHNDELSLAIAQAFQRARQAGQSLPIVVGAIPFDTTQPSCLYIPDSYTVTTKYELVSRARKHTAVAPTALTLNSVPGECQFKSIVAEAVERFRRGELSKAVLSRILDIELASPVKAQTILNNLMVQNAGGYHFSLPLPDGSVLLGASPELLLRKQGNVIVSNPLAGSARRMNDEHLDYLNSQRLLNSGKDKHEHKLVVDDIRQRLMPLCASLTIPSAPSLMSTASMWHLSTAIRGELANPDMTALQVACQLHPTPALCGFPTQEARQLIAELEPHDRGVFSGIVGWCDANGDGEWVIVIRCGTIKHNKVRLFAGAGIVEASVPEDEWAETAAKLNTMLNAFGLNSGVDGL

SEQ ID NO: 36025 - DNA, 1356 bp, Propionibacterium acnes KPA171202
  CDS (1)..(1356): transl_table=11
ttgacttcttgtcgcggtcggtcgaatttgacgcatcacttcttgggcgttgggtgcgaccacattgtttgcgtgcaacgtcgtggtcgcacccgtagtccgggtctcccgcaaagcattgtgtgggcttcagcaagtaaggtcgagcccgtgctaaacctgctgccctgctctgacaccgtctcggccctgccgggaacggcctggcttgatgaagtgctccactgggtgcccgagggcgtcgacccgtggatctggttggcccccgactccgacgacgcccccgccatggtcggctggggcgtcactcgacgcttcaccgcatccggtcacggagcggtcgagtccgcctggcgccggatggcgtccgaagggcaggacctcttcgccttcggctcgtttcccttctcgcgcacccaggaagggttcctcgtggtcccgcaggtgctcatccgacgtcgtcacctcggggggccgaccgaggtgacgaatcaccagcggctcacccgacgaacgtgggggcccgagccgaagaaacacctgacccgtagaccggccatcgacgaagccacatggacagcgtcggttaccgcggtgacccagcagctagaccacgacgggcagctcgagaaggtggtattggccggggcggtcgacatcacctctgaggtgcccatcgaccgcagtcaggtcgcctcacgactggccgcacggttccccggctgctggacgtacagccacgacgggctggtgggggcaacccccgagctgctcgtcgactgccgcgacgggctcttccgctgtcgggtgctggccggcacccgcaaaccggcctgggcccacgagctgctcgacaaccccaaggaacgccacgaacacgagctggcggtggcctcggtcaccgggcgactggcccaggccgggctgactgatcctgtcatccgcggtcctttccgtttggagctccccaatgtcgtccacttggcgaccgatgtcaccgctagggtgaacggctccaacgcggcgcgcatcgtcgatgcaatgcacccgaccgccgccgtgtgcggcaccccccgcgaggcctcttacaagctcatcgcgcagatagagcacttggaccggggacggttcgccgggccggtgggctggatgagctcggacgggtcgggacagtgggccctagcgctgcgctgtggacaattcagtgaggactcgcgccaggtgagaatgttcgctggagccggaatcttgccaacctctgaccctgctaaggagtggatcgaggttggcgccaagatggaagccttcggcgacgccctgcccaacggtcaggtgagtggtaccgaaacgacctga

SEQ ID NO: 36026 - protein, 451 aa, Propionibacterium acnes KPA171202
MTSCRGRSNLTHHFLGVGCDHIVCVQRRGRTRSPGLPQSIVWASASKVEPVLNLLPCSDTVSALPGTAWLDEVLHWVPEGVDPWIWLAPDSDDAPAMVGWGVTRRFTASGHGAVESAWRRMASEGQDLFAFGSFPFSRTQEGFLVVPQVLIRRRHLGGPTEVTNHQRLTRRTWGPEPKKHLTRRPAIDEATWTASVTAVTQQLDHDGQLEKVVLAGAVDITSEVPIDRSQVASRLAARFPGCWTYSHDGLVGATPELLVDCRDGLFRCRVLAGTRKPAWAHELLDNPKERHEHELAVASVTGRLAQAGLTDPVIRGPFRLELPNVVHLATDVTARVNGSNAARIVDAMHPTAAVCGTPREASYKLIAQIEHLDRGRFAGPVGWMSSDGSGQWALALRCGQFSEDSRQVRMFAGAGILPTSDPAKEWIEVGAKMEAFGDALPNGQVSGTETT

SEQ ID NO: 36027 - DNA, 1425 bp, Bacillus licheniformis ATCC 14580
  CDS (1)..(1425): transl_table=11
atggtgacaacagtgcagcgcactttcctcaaggaagcgcctgaagcattaaacatcgtcaaaaaagtcaaccatgctgttttaataagctattccagaaaaattgagagcatagatgctctttcctttttcataaacgggaaagaacaatttgccggggaacggttcttctggtctgatccggacggcgggctgacgcttgtcgggctgggaaaggaaatatcggtttccacagatctgaaggatgccggacgttatcaggctgtacatgaaaaatgggagcgcttaaaagagaaaacctatcactttcatgaagatcaaagcagaggtcaggcagcggtggggccattgctgtttggcggtttttcatttgatccgctggaagatcgcaagcagcattggaacggctaccaggaaggcgctttttttattcccgccgctatgctgacacaggacggagaggaaacattcataacggtcaatagatggaagactcctgaagaagacgtgcgcaaagtacttgaagaaataaagggcgctgcttcacagctgaccaaggcggacgattcccgttatccggaaaaaggtcatacgcaatataccgccaaggaagagcttgatgttcctgaatggcttgaagcggtccggcgggcgacagacgacattaaaaacgggaagtacgataaagtcgtgctcgccagagagatccttttaacgttcgatcagcctgtcgaacttcacagagtattattcaatctgatgtctgaacaaaaaacgagctatatattcgccattgaagaaaacggcaaaagttttgtgggcgcgtctccggaacgtcttgtcaaaaaagacggagagaacgttctgtcgacctgcctcgccggttcaatcaagagaggcgaaagtgagcaggaagaccggatgctcggtcttgagctgttaaacgatgaaaaaaatctaatcgaacatgacattgtcgtcaatatgattcatcaggcgcttttgtcaaattgcagcaatatcaaaaagccggccaagccgggactttacaaaacaaaaaatgtgcagcatttgtatacgccgattgtcggcaaaatgaatgcggagtcctcgatttttgatttaatcgagaagcttcacccaactcctgcgctcggaggagcaccacagcaaaaagcgattgaggttatcagggagttggaaccgatgtcaaggggctggtatgcggcaccggcgggctggatcgacatgtccggcaatggggaattcgcggtggcgatcaggtcgggacttatcgattcaaatgcggccagaattttcgccggctgcggggttgtggctgattccgatcctcttatggaatacgaagaaacacaaattaagatgaagccgatgctgtctgctcttggaggcgatatccgttga

SEQ ID NO: 36028 - protein, 474 aa, Bacillus licheniformis ATCC 14580
MVTTVQRTFLKEAPEALNIVKKVNHAVLISYSRKIESIDALSFFINGKEQFAGERFFWSDPDGGLTLVGLGKEISVSTDLKDAGRYQAVHEKWERLKEKTYHFHEDQSRGQAAVGPLLFGGFSFDPLEDRKQHWNGYQEGAFFIPAAMLTQDGEETFITVNRWKTPEEDVRKVLEEIKGAASQLTKADDSRYPEKGHTQYTAKEELDVPEWLEAVRRATDDIKNGKYDKVVLAREILLTFDQPVELHRVLFNLMSEQKTSYIFAIEENGKSFVGASPERLVKKDGENVLSTCLAGSIKRGESEQEDRMLGLELLNDEKNLIEHDIVVNMIHQALLSNCSNIKKPAKPGLYKTKNVQHLYTPIVGKMNAESSIFDLIEKLHPTPALGGAPQQKAIEVIRELEPMSRGWYAAPAGWIDMSGNGEFAVAIRSGLIDSNAARIFAGCGVVADSDPLMEYEETQIKMKPMLSALGGDIR

SEQ ID NO: 36029 - DNA, 1191 bp, Bacillus licheniformis ATCC 14580
  CDS (1)..(1191): transl_table=11
atgatagaacgtcatgtcgtgtcagaagcgcttgcagatcagctgttaaaggaatatcaggccggtgcttcattctttttctcttcccctgagcggaccattctggcggaaggtgtttttgcttctgtttctcaaaccgaagagcaaagccttgctcagcggactgcggaagttctgaaaaaagccagggagaacgggcaggaaaatccgattgtagttggagctgtgccatttgacgatgcaaagccggcgcagttaaccgtgccggtcgaagcgtggcatgcggggccgctgacatgtgaagaagacgataaagaggtgcctgaacctgccctgcacccctatgatgtccagcagattccaagcccggaagcgtatatggccggagtcagacaaggattggcaggtatagcagcaggagaatacagcaagatcgtcctttcccggtcattgcagctgacctcgccgatcaaagtcgatatcggtcaattgctgcgaaatcttgcccgccgcaatacaagcgggtacaactttgccgttgatttaaccgggcagtcatctgaagcgcctcgcaccactttgataggcgcgagtcccgaactgcttgtatcacggtccgggttctgcgttacggcaaatcctttagcaggttcaagacctcggagcgatgatcccgaagaagatcgaagacgggcggctgaactgcttgcttcgcctaaagaccgtcacgaacatgcggtcgttgtcgaagcggttgcttccgcgctcaggccgttttgccggaagctggaggtgccggaaccgtcgctcatcagcacgccgacgatgtggcatctttcaacggaattgaagggagagcttacagacctctctgtatcatcattggagcttgccgccgcccttcatccgacgcccgctgtctgcggcacgccgacgaatgcggcgaaagaagcgattaaacagattgagccgtttgaccgcgggtttttcacaggtatggtcggctggtgcgacgcggacggtgacggagaatgggttgtaacgattcgctgtgccgaggcggaggaacacgcgcttcgactgtacgcaggtgccggaattgtcgccgggtcgaagcctgaagacgaacttgccgaaacgtctgcaaagtttcggacaatgcttcttgcgatgggaatgaacagtgagtaa

SEQ ID NO: 36030 - protein, 396 aa, Bacillus licheniformis ATCC 14580
MIERHVVSEALADQLLKEYQAGASFFFSSPERTILAEGVFASVSQTEEQSLAQRTAEVLKKARENGQENPIVVGAVPFDDAKPAQLTVPVEAWHAGPLTCEEDDKEVPEPALHPYDVQQIPSPEAYMAGVRQGLAGIAAGEYSKIVLSRSLQLTSPIKVDIGQLLRNLARRNTSGYNFAVDLTGQSSEAPRTTLIGASPELLVSRSGFCVTANPLAGSRPRSDDPEEDRRRAAELLASPKDRHEHAVVVEAVASALRPFCRKLEVPEPSLISTPTMWHLSTELKGELTDLSVSSLELAAALHPTPAVCGTPTNAAKEAIKQIEPFDRGFFTGMVGWCDADGDGEWVVTIRCAEAEEHALRLYAGAGIVAGSKPEDELAETSAKFRTMLLAMGMNSE

SEQ ID NO: 36031 - DNA, 1200 bp, Bacillus cereus E33L
  CDS (1)..(1200): transl_table=11
atgaatgaatttacggctgtaaaggaactgtcagaaaaattactagaagattataagactgaatcttcattcttttttgcttcaccaacccgaacgatattagcagaaggagaatttactacagtaaagcatcatgaaattgaaagcttcccagagcttgtgcaagcagtattacgtaatgcaaaacaagccggaaatccgaatcctatcgttgtgggggctttgccatttgatcgtagaaaagaagtccaacttatcgtaccagaatatagcagaatttctgagcgtttacaattggatacaacaaatcatcttgaaataaataggaacttaacattcgaaatgacgcctgtgccagatcatgaagtgtatatgaatggtgtgaagcaaggaattgaaaaaataaaggacggagatttaaagaaaatcgttctatctagatcgttagatgttaaatcttctggaaaaattgataagcaaaaacttcttcgagaattagcagagcataataagcacggttatacatttgcggtgaaattaccgaaagatgaaaacgagaatagtaagacgttaattggagctagtcctgaattactcgtttcacgtcatggtatgcaagtgatttctaatccgttagctggttcaagaccacgtagtgatgatccagtagaagataaaagaagagcggaggaattactttcttctccaaaagatttgcatgaacatgcggtagtagtggaagcagttgctgctgcgcttggcccatactgtcatacattacatgttccggaaaaaccatctgttattcatagtgaagcgatgtggcatttgtctactgaagtgaaaggtgaactaaagaatccaaatactagttctttagaattagcaattgctcttcatcctacgccagcagtttgcggaacgccgatggaagaagcgagagaagctattcaacaaattgagccatttgaccgtgagttctttacaggaatgttagggtggagcgatttaaatggagacggtgaatggattgttacaattcgttgtgctgaagtacaagaaaatacactccgtttatatgcaggtgctggagttgttgctgagtcaaaaccagaagatgaattagcagaaacaacagctaagtttcaaacaatgttgaaagctttagggttaaatgatagttcacttaatgaaaagtag

SEQ ID NO: 36032 - protein, 399 aa, Bacillus cereus E33L
MNEFTAVKELSEKLLEDYKTESSFFFASPTRTILAEGEFTTVKHHEIESFPELVQAVLRNAKQAGNPNPIVVGALPFDRRKEVQLIVPEYSRISERLQLDTTNHLEINRNLTFEMTPVPDHEVYMNGVKQGIEKIKDGDLKKIVLSRSLDVKSSGKIDKQKLLRELAEHNKHGYTFAVKLPKDENENSKTLIGASPELLVSRHGMQVISNPLAGSRPRSDDPVEDKRRAEELLSSPKDLHEHAVVVEAVAAALGPYCHTLHVPEKPSVIHSEAMWHLSTEVKGELKNPNTSSLELAIALHPTPAVCGTPMEEAREAIQQIEPFDREFFTGMLGWSDLNGDGEWIVTIRCAEVQENTLRLYAGAGVVAESKPEDELAETTAKFQTMLKALGLNDSSLNEK

SEQ ID NO: 36033 - DNA, 1194 bp, Bacillus licheniformis ATCC 14580
  CDS (1)..(1194): transl_table=11
atgatgatagaacgtcatgtcgtgtcagaagcgcttgcagatcagctgttaaaggaatatcaggccggtgcttcattctttttctcttcccctgagcggaccattctggcggaaggtgtttttgcttctgtttctcaaaccgaagagcaaagccttgctcagcggactgcggaagttctgaaaaaagccagggagaacgggcaggaaaatccgattgtagttggagctgtgccatttgacgatgcaaagccggcgcagttaaccgtgccggtcgaagcgtggcatgcggggccgctgacatgtgaagaagacgataaagaggtgcctgaacctgccctgcacccctatgatgtccagcagattccaagcccggaagcgtatatggccggagtcagacaaggattggcaggtatagcagcaggagaatacagcaagatcgtcctttcccggtcattgcagctgacctcgccgatcaaagtcgatatcggtcaattgctgcgaaatcttgcccgccgcaatacaagcgggtacaactttgccgttgatttaaccgggcagtcatctgaagcgcctcgcaccactttgataggcgcgagtcccgaactgcttgtatcacggtccgggttctgcgttacggcaaatcctttagcaggttcaagacctcggagcgatgatcccgaagaagatcgaagacgggcggctgaactgcttgcttcgcctaaagaccgtcacgaacatgcggtcgttgtcgaagcggttgcttccgcgctcaggccgttttgccggaagctggaggtgccggaaccgtcgctcatcagcacgccgacgatgtggcatctttcaacggaattgaagggagagcttacagacctctctgtatcatcattggagcttgccgccgcccttcatccgacgcccgctgtctgcggcacgccgacgaatgcggcgaaagaagcgattaaacagattgagccgtttgaccgcgggtttttcacaggtatggtcggctggtgcgacgcggacggtgacggagaatgggttgtaacgattcgctgtgccgaggcggaggaacacgcgcttcgactgtacgcaggtgccggaattgtcgccgggtcgaagcctgaagacgaacttgccgaaacgtctgcaaagtttcggacaatgcttcttgcgatgggaatgaacagtgagtaa

SEQ ID NO: 36034 - protein, 397 aa, Bacillus licheniformis ATCC 14580
MMIERHVVSEALADQLLKEYQAGASFFFSSPERTILAEGVFASVSQTEEQSLAQRTAEVLKKARENGQENPIVVGAVPFDDAKPAQLTVPVEAWHAGPLTCEEDDKEVPEPALHPYDVQQIPSPEAYMAGVRQGLAGIAAGEYSKIVLSRSLQLTSPIKVDIGQLLRNLARRNTSGYNFAVDLTGQSSEAPRTTLIGASPELLVSRSGFCVTANPLAGSRPRSDDPEEDRRRAAELLASPKDRHEHAVVVEAVASALRPFCRKLEVPEPSLISTPTMWHLSTELKGELTDLSVSSLELAAALHPTPAVCGTPTNAAKEAIKQIEPFDRGFFTGMVGWCDADGDGEWVVTIRCAEAEEHALRLYAGAGIVAGSKPEDELAETSAKFRTMLLAMGMNSE

SEQ ID NO: 36035 - DNA, 1455 bp, Burkholderia pseudomallei K96243
  CDS (1)..(1455): transl_table=11
atgagcgcccgcctgtccgcgctgctcgatacgttcgcgcgcgccgcgcgccgcgcggccgacacgggcgagcccgtgctcgccgcggcatcgtttccgctgcggccgctgaacctgttcgatctgatcgcgagctgggacgacggcgcaaccccatggtgcttcgtcgaagccggcgacgagccgggcgcgatgcgcgcgccgggcaagccgcccgccctgttcggctgggattgcgcactcgatctgaacgaggcgggcgacgcgcgattcgcccggctcgacgcgcgctggcgcgcgctcgtgcgcgcggcggtcgtcaccggcgcgcagccgccgcgcatcgtcggcggcttccgcttcgatccgctcgggccgcgatacgcgcactggcacgcgttcgccgatgcgagcatgacgcttgcgaaactgctggtcgtccgcgaaggcgaggcgtattgggcggtctgccagcgcgtcgtcgccgcgcacgacgatcccgccgcgctcgcgcgcgaatgcgacgcgcgcatcggcatgctcgcgtcgctcgcgcccgccgccgacgacgaggcgccgcgcctgctgcgcgttcaggcgctgcaggccgccgcatggcagcacgaggtgcggcgcgcggtcgacgcgatccgcggcgaggcgttcagcaaggtcgtgctcgcgcgcgacgtgctgcaacagtacgcgcggcccgtggcgatcgggccgctgctgcgccggctcaggcggcgcgacccgcgcgcgcacctgttcgcgatccgcaggcgcgacggctgcttcgtcggcgcgacgccggaacgcctcgcgcgcgtcgcgcacggccgcgcgcacacgcacgcgctcgccggcacgatcgcgcgcggcaacgatccggctcacgatcgcgcgctcggcgcgcagctgatggcgtcggcgaaagagcgcctcgagcacgcgctcgtggtcgacgcgattcgcgatgcgctcgcgccgctgtcgcgcgcgatcgatgtgcccgcgcagccgtcgctattgcggctgccgcgcctgcaacatctgagcacgccgatcgccgcggcgctgaacgagcgcgcgacgctgctgcaagtcgtcgcggcgctgcatccgacgcccgccgtcgcgggccatccccgcgccgccgcgctcgagcacattcgcgcgcacgaaggcttcgatcgcggctggtatgcgggcccgatcggctggatcgacgcgcacggcaacggcgacttcgtcgtcgcgctgcgctcggcgctgatctcggccggtgcctgccggctgttcgccggctgcgggatcgtcgccgcatcggagccggcgcgcgaatatcgcgaaacgagcctcaagctgtcggggatgcaggcggcgatcgaggcgcgcgacgccgcagcagcagcgcgcacggtcgcgccgattccgtccgccgcgcactga

SEQ ID NO: 36036 - protein, 484 aa, Burkholderia pseudomallei K96243
MSARLSALLDTFARAARRAADTGEPVLAAASFPLRPLNLFDLIASWDDGATPWCFVEAGDEPGAMRAPGKPPALFGWDCALDLNEAGDARFARLDARWRALVRAAVVTGAQPPRIVGGFRFDPLGPRYAHWHAFADASMTLAKLLVVREGEAYWAVCQRVVAAHDDPAALARECDARIGMLASLAPAADDEAPRLLRVQALQAAAWQHEVRRAVDAIRGEAFSKVVLARDVLQQYARPVAIGPLLRRLRRRDPRAHLFAIRRRDGCFVGATPERLARVAHGRAHTHALAGTIARGNDPAHDRALGAQLMASAKERLEHALVVDAIRDALAPLSRAIDVPAQPSLLRLPRLQHLSTPIAAALNERATLLQVVAALHPTPAVAGHPRAAALEHIRAHEGFDRGWYAGPIGWIDAHGNGDFVVALRSALISAGACRLFAGCGIVAASEPAREYRETSLKLSGMQAAIEARDAAAAARTVAPIPSAAH

SEQ ID NO: 36037 - DNA, 1425 bp, Pseudomonas fluorescens Pf-5
  CDS (1)..(1425): transl_table=11
atgagtgaatcctgcctgtccggcttgacccgggccctgcgcaagggcgaatccctggcccggcgcagggggcgggcggtgctggtggtgtacagcctggccgccgagcgcctggagccgctgcggctgtttgccgccaaccgccaggtgttcggccagagcctgttctggtccagcgaccagggcgccctggccctggccgggttcggctgcaccgaagaaatcagcccgccggccgccgagcgttttgccgccagtacccaggcctggcgccagttgctgctgcaggcccatcaggtagggcccaagcgggcctacctgtgcggcggctttgccttcgacccccagggcccgcgcagtgcccagtggcagtcgttcgccgccacgtccctggtgctgccgcggatcctgctgctgcgcgaaggcgagcagcagcactggctgttcagcctgtggatcgagcccggcgccgacgtggcccagtgcgccggtgccctggaggcggagtgggccctgttgcaggcgcgctatacccacgcccccttggcacagatgcccgttggcacccaggccgaggaccacacccaggcagccgaccgctggcaggactgcgtggcccgagccatcgcgcggatccagggcggcgagctgagcaaggtagtactggcccgggaagtctgcctgcgggcgagccgcagcattccttgcgggccgctgctggaaaacctcagggcggcctatccccaggccttcctgttcgccttcagccgtggcgacagctgctttctcggcgccacgccggaacgcctggtgcgcctggcccgcggcaccctcaacaccgtggccctggccggcacctgcgcgcgcggccagcatgagcagcaggacgcggaactgggccaggccctgatggacagcgccaaggaccgccatgaacacgccctggtggtgcagaccctgcgcgaagccctgcagccctactgcgcgatgctggagattcccccgcagccgcaactgcaccgcctggcccacgtccagcacctgctgaccccggtgctggggcggttgcggccccaggtcgatctgctgcaagtggtggatgccctgcacccgaccccggcggtgggcggcctgcctcggggcaaggccctgggctatatccgcgagcatgagcaactggaccgcggctggtacgccgcccccgtgggctggctgaacgccgagggcgatggcgagtttgccgtggccttgcgttccgccctgatccgcggcaaccaggcgcacctgtttgccggttgcggcatcgtcggcgagtcggacccggcgagcgaataccaggaaacctgcctgaagttgcgcaccatcggcgaagccctgcgcccgccaccggccgccacctacgaaaagctcggcctctccctgtag

SEQ ID NO: 36038 - protein, 474 aa, Pseudomonas fluorescens Pf-5
MSESCLSGLTRALRKGESLARRRGRAVLVVYSLAAERLEPLRLFAANRQVFGQSLFWSSDQGALALAGFGCTEEISPPAAERFAASTQAWRQLLLQAHQVGPKRAYLCGGFAFDPQGPRSAQWQSFAATSLVLPRILLLREGEQQHWLFSLWIEPGADVAQCAGALEAEWALLQARYTHAPLAQMPVGTQAEDHTQAADRWQDCVARAIARIQGGELSKVVLAREVCLRASRSIPCGPLLENLRAAYPQAFLFAFSRGDSCFLGATPERLVRLARGTLNTVALAGTCARGQHEQQDAELGQALMDSAKDRHEHALVVQTLREALQPYCAMLEIPPQPQLHRLAHVQHLLTPVLGRLRPQVDLLQVVDALHPTPAVGGLPRGKALGYIREHEQLDRGWYAAPVGWLNAEGDGEFAVALRSALIRGNQAHLFAGCGIVGESDPASEYQETCLKLRTIGEALRPPPAATYEKLGLSL

SEQ ID NO: 36039 - DNA, 1224 bp, Thermobifida fusca YX
  CDS (1)..(1224): transl_table=11
gtgaccgcacgcaccgttgccttgcgtgaccagcgcgctctgctcgacctgctgcctcccgccgcaccgctggcgtgggttcggcggggtgagggactggtggcgtggggagtcgcggcgcgcttggaactgcccgccgagccggagcggtccggcattcaacggttcacggcggcagatgaatggcttgaatcgctgttctcgacgatcgtggtggacgacgacgtgggggtgccgggtagcggacctgtggtgttcggctcgttcacgttcgacggccgcgacgccggatccacgctcatcctgccgcgagtcgtcgtgggacggcgggacgggcagacgtggctcaccgtggtgggtgacgaagccgacccgctgccggccgtgccgccaccccgcccggtgggggcactgcggtggcggccgggcacgctcagcgaagcagagtggtgcgcagtggtgagccaggccgtggaccgcatccacaccaccgggctagcgaaagtggtcctggcgcgcgaccttgtcgcggaagcggaccatcccattgatgtccgcaccccgctgcagcggctggccgccgactatccggactgctacgtctactcggtggtgggactgaccggggctaccccggaactgttgctgcgccgtaccggcacccgcctggagtcgctggtgctggcggggaccgcgccgcggggggccaccgcggacgacgacgctgtgctcgcgaaaacgctgctcacttccgcgaaagatgtcgaagagcacgcctatgcggtggagtcgctgcgcgagtcgctggccccgttctgcacggaactggacgtgccccgccaccccgaactgctgcgtcttgccaacgtgcagcatttggccaccccggtgcgggccgtactccccgcaaagacggcgaccctgccagtgctggcggccctgcatcccactgccgcggtgggcggcaccccgacccgggtagcgatggacgtcatcggcgaattggaaggaatgcgccgcgaccgctacgccgggccggtggggtggattgatgcgcgcggcgacggggagtgggggatcgcgctgcgctgcgctcagatcaccgggccgcgggcccgcctcttcgctggggcagggatcgtcgccgactctgacccgcaggcggagctcgcggaaaccgtggcgaagttccgcgcggtgcgcgccgccctcaccggacggtaa

SEQ ID NO: 36040 - protein, 407 aa, Thermobifida fusca YX
MTARTVALRDQRALLDLLPPAAPLAWVRRGEGLVAWGVAARLELPAEPERSGIQRFTAADEWLESLFSTIVVDDDVGVPGSGPVVFGSFTFDGRDAGSTLILPRVVVGRRDGQTWLTVVGDEADPLPAVPPPRPVGALRWRPGTLSEAEWCAVVSQAVDRIHTTGLAKVVLARDLVAEADHPIDVRTPLQRLAADYPDCYVYSVVGLTGATPELLLRRTGTRLESLVLAGTAPRGATADDDAVLAKTLLTSAKDVEEHAYAVESLRESLAPFCTELDVPRHPELLRLANVQHLATPVRAVLPAKTATLPVLAALHPTAAVGGTPTRVAMDVIGELEGMRRDRYAGPVGWIDARGDGEWGIALRCAQITGPRARLFAGAGIVADSDPQAELAETVAKFRAVRAALTGR

SEQ ID NO: 36041 - DNA, 1182 bp, Thermobifida fusca YX
  CDS (1)..(1182): transl_table=11
atgccccgacagtgcgtcgccaccccggccgcgaccgtcactgaactcctggacgcctaccgtccccgggacttcttcttcacctccccttccgggtcgctgctcgggcaaggcgtcctgaccaccgtgaccggggtcgacgacctgtccgatgcactgcacgccaccgccgccgagccgggacggcacgccgtcgcggtcggagcgctccccttcaaccggaccgcacccgctcgcctcgtcatccccgcaaccgtgcagcgcggccccgcgatcatgcccggcaccggcgccacccgcgcgcggcgcccccggaacggcacctggaccgccacccccgttcccgaccccgccgcacacaccgccgcggtcaaacgcgccgtcgccctcctggccagcccagacagcacccggctgcgcaaagttgtcctggcccgctgcctccgcctgaccagcagccacgacgtggacgtcgccgcggtactcgccaacctcgcgcaagccaaccccggcgggttcaccttcgccgccgacctgcctgcccccgacagccgtccgcgcaccctcgtcggggccagcccggaactgctcgtcgccaaacacggccgcgccgtggtgtcccgcccgctcgcgggctcccgcccccgcgacaccgacccgacccgggaccgggaacgcggcgctgccctgctcgcctccgccaaagaccgcgccgaacacgccgtcgtcgtggaagccgtcgtcgaagcgctccgcccctactgccgctccctggatgtccccgacgaaccccagccggtcaccactcccaccatgtggcacctggccacccaggtcaccggcgaactgcgcgacccgcgcacccccgtccacgtgctggcccaggccctccaccccacccccgcggtctgcggctatcccaccgaccaggcctatgcggccatcgccgaactcgaaccgttcgaccgcggcttctacaccggggctgtcggctacaccgacgccgccggcgacggcgaatgggtggtgaccatccgctgcgccgacatccacggcgccaccgccgaactgtttgcgggcggcggcatcatgcccgactccgaccccgaggccgaactcgcggaaaccaccgccaaattccgcaccctgctgctcgccctcggagccgaccagctccggtaa

SEQ ID NO: 36042 - protein, 393 aa, Thermobifida fusca YX
MPRQCVATPAATVTELLDAYRPRDFFFTSPSGSLLGQGVLTTVTGVDDLSDALHATAAEPGRHAVAVGALPFNRTAPARLVIPATVQRGPAIMPGTGATRARRPRNGTWTATPVPDPAAHTAAVKRAVALLASPDSTRLRKVVLARCLRLTSSHDVDVAAVLANLAQANPGGFTFAADLPAPDSRPRTLVGASPELLVAKHGRAVVSRPLAGSRPRDTDPTRDRERGAALLASAKDRAEHAVVVEAVVEALRPYCRSLDVPDEPQPVTTPTMWHLATQVTGELRDPRTPVHVLAQALHPTPAVCGYPTDQAYAAIAELEPFDRGFYTGAVGYTDAAGDGEWVVTIRCADIHGATAELFAGGGIMPDSDPEAELAETTAKFRTLLLALGADQLR

SEQ ID NO: 36043 - DNA, 1401 bp, Prochlorococcus marinus str. NATL2A
  CDS (1)..(1401): transl_table=11
atgaatttagaacccgtctttagtgagcttttagttagttctcttcagaaatggagtgaaagaaaagttgatgaatgtatcttgagcatttctgttcctgtaagtcaaacagatcctttagcgacattacctttaattgctgaaaaacatcagtttaggtttctttgggatctctctcccagattgtgcctttctgccggaggtcattgtcaatctttggatttatctggaccaaagaggtttgaaaatgcacaaagatttagtgatgagatctttactcgattgatagatatttctccaagtccagtattttcagcatcaagggttttattttcattttctttctttgatcaaattaaaagtaatgaacaatcaatagatgataaattttcccttcaggctgttttgcctaagtggcaattaaccgcaaaagatggattaacatggctacgtttaaattcagttgcccaaaatccttcagatgttcgtgaagctatagaaagattatggtcaactcgagaaaagataaataaatcaccagtccgaattgttaatgatgaaaatgaaaatttcttagtcgataatttttctgatgattggcaatctcaatatcgagatgcgttgactaaagggatcgaattaataaattcaggtgatttggataaacttgtattggctacgagacaacgtctcctcctaagaaaaccattagatccactgcacttacttgctcgtttaagagttcagcaaactaatagttgtcgatttttatggcaaaaaaatcatgatgagtcattttttggtgcatcgcctgagagattaataagtctcaatcaaaatcagttgttaatcgatgctttagctggtactgcaaaaaaaggtgatgatgggagagaattgcttgcttcctctaaagatttaagagaacaccattttgtagttaattctattgtcgaacaactttttagaagaggtattaaagcaagttattcatctcaaccaaaattaatgactcaagaccatttaattcatttgcatactcttattcaagcttctgttgaagagaaatctcctcttgatttagttgaagcacttcatccaacccctgctgttgcgggattacctctgagtaaatctttgagttggttgagagctttggaaccatttgaccgtaaaacatatgcttctccaattgggtggatagataaaaatcaaaattcagaatttagagttgccatacgttatggacaggttagagctaatgaacttaaattatttgctggcgctggtttagtaaaaggttcaactgttgagggagaaatgcaagaagtagctttgaaatttgaagttttaagaaatcaattaaacttagatagagttaattgttcaaatgatctataa

SEQ ID NO: 36044 - protein, 466 aa, Prochlorococcus marinus str. NATL2A
MNLEPVFSELLVSSLQKWSERKVDECILSISVPVSQTDPLATLPLIAEKHQFRFLWDLSPRLCLSAGGHCQSLDLSGPKRFENAQRFSDEIFTRLIDISPSPVFSASRVLFSFSFFDQIKSNEQSIDDKFSLQAVLPKWQLTAKDGLTWLRLNSVAQNPSDVREAIERLWSTREKINKSPVRIVNDENENFLVDNFSDDWQSQYRDALTKGIELINSGDLDKLVLATRQRLLLRKPLDPLHLLARLRVQQTNSCRFLWQKNHDESFFGASPERLISLNQNQLLIDALAGTAKKGDDGRELLASSKDLREHHFVVNSIVEQLFRRGIKASYSSQPKLMTQDHLIHLHTLIQASVEEKSPLDLVEALHPTPAVAGLPLSKSLSWLRALEPFDRKTYASPIGWIDKNQNSEFRVAIRYGQVRANELKLFAGAGLVKGSTVEGEMQEVALKFEVLRNQLNLDRVNCSNDL

SEQ ID NO: 36045 - DNA, 1446 bp, Burkholderia sp. 383
  CDS (1)..(1446): transl_table=11
atgaacgccggcctcccgctgctgcacgacacgttcgcccgcgcggcccgccgcgccgccgataccggaacgccgacgctcgcgtcggtgtcggtgccgctgcgcccgctcgacttcttcgacctgatcgccgcgtgggacgacggcgccacgccgtggttcttccatgaagccggcgatgcgcccgtcacgctgttcggctgggactgcgcgctcgaactgaccgccgccggcgacacgcgcttcgcgcagatcgatgcgcgctggcgcacgctcgttcgcgatgccgtgatggccggcccgcaaccgccgcgcgtcgtcggcggcttccggttcgattcgcatggcgcgcgcagcgcacactgggcgccgtttcccgacgcgagcatgacggtggcgaagctgctgatcgtgcgcgaaagcgatgcgcactgggccgtctgccagcacgtcgtcgccgcgcacgacgatccggccgcgctcgcgcatgcgtgtcttgcgcgcatcgagtcgctcggcacgctcgccgccgcccacgatgacgatgccccgcatctgctgcacacgcaggcgctgcaagccagcgagtggcagcacgaagtgcggcgcgcggtggacgcaatccacggcggtgcgttcggcaaggtcgtgctcgcgcgcgacgtgctcgaacagtacgcgcggcccgttgccgtcgcgccgttgctgcgccggctgcgcaagcgcgacgcgcatgcgcacctgttcgcggtccgccgcgaaggcgcctgcttcgtcggcgccacgccggaacggctcgcgcgtgtcgcggccggcgacgtgcgcacgcatgcgctggccgggacgatccggcgcggcgccacgcccgacgacgaccgcgcgctcggtgcggcgctgatggattccgcgaaggagcgactcgaacacgcgctcgtcgtcgacgcgatccgcgctgcgctcgcgccgctgtcacgcgcgctcgacgtgcccgagcaaccgtcgctgcaccggctgccgaggctgcagcacctgggcacgccgatccgcgcgacgctgaaggcggacgcgacgctgctgcaggtcgtcgcggcgctgcacccgacgccggcggtggccggccatccgcgcgccgaagcgctcgaccacatccgtgcgcatgaaggcttcgatcgcggctggtatgcggcgcccgtcggctggatcgacgcgcacggcaatggcgatttcatcgtcgcgttgcgctccgcgctggtcgatggcggcgcgtgccggctgttcgcgggctgcggcatcgtcgccgattccgagccggtcaacgaatatcaggaaaccgaactgaagttgtcgggcatgcaggcggcgatccgcgtgcgcgatgcaacggcggatgcggatgccgacgcacgcggatcggcaaaggtgtcggcctcgtcgacggtcgagtga

SEQ ID NO: 36046 - protein, 481 aa, Burkholderia sp. 383
MNAGLPLLHDTFARAARRAADTGTPTLASVSVPLRPLDFFDLIAAWDDGATPWFFHEAGDAPVTLFGWDCALELTAAGDTRFAQIDARWRTLVRDAVMAGPQPPRVVGGFRFDSHGARSAHWAPFPDASMTVAKLLIVRESDAHWAVCQHVVAAHDDPAALAHACLARIESLGTLAAAHDDDAPHLLHTQALQASEWQHEVRRAVDAIHGGAFGKVVLARDVLEQYARPVAVAPLLRRLRKRDAHAHLFAVRREGACFVGATPERLARVAAGDVRTHALAGTIRRGATPDDDRALGAALMDSAKERLEHALVVDAIRAALAPLSRALDVPEQPSLHRLPRLQHLGTPIRATLKADATLLQVVAALHPTPAVAGHPRAEALDHIRAHEGFDRGWYAAPVGWIDAHGNGDFIVALRSALVDGGACRLFAGCGIVADSEPVNEYQETELKLSGMQAAIRVRDATADADADARGSAKVSASSTVE

SEQ ID NO: 36047 - DNA, 1404 bp, Synechococcus elongatus PCC 7942
  CDS (1)..(1404): transl_table=11
atggctgccctgtcaactgcctcctctcttcagtcattcagcgagctgctggcttgggttcgtcctgctctagaggcgacgccaacggctcgactcctgagcctatcgctgccgttaccccgtcttgatccgctggctgcatggggtgtgttgggtagtagtcgcgatcgccactactaccaagagcgtcccgccacccaagaggcgatcgtggctgtagggccagcagccctgctggaactgaatggaccccagcgctttcagcaggcccagacctttatcaatgcctgtcttgctcaggggctgcgcttacaggccgaaggtgcaactctagggccgagtttctgttgcagttttagcttttttgaagatgttgcagggacagcgccagcagctccggcgacggtctttttgccacgttggcaggtgcgttgccaagctgatcgcacggtactgacggccagttttgcaatcgccgatcgcgagagctatcgccaacggctggaagaagtctggcaggtctatcaacatctgcgggcgatcgcccagcaaccgtttcagctgccgccgctgcgtcccaatcgctggctagagcaacagagcagtgatccccagtcctttcgagccggtgtagaaacggtcttagctgagattgcggccggtcgtctccataagggcgtcttggcgcgctgtctagaggcgatcgcagaatttgcgatcgtgccggaaggcgtgctcgatcgcctgcggcagcgttttgctgactgcgccatcttcagctgcggcgatggtcggggcagtgttttcctcggggcaacgcccgaacgcttagcggcggtggaagcgggtcaactggtgactgaggcgctggcgggttctgccccacggggtgaaaccattgcggctgatcaagcccttgggcaggcgctgcaagccaaccccaaggaactgcaagaacatcagctggtggcgcaatttatccgccaaaccctgcaggaacttggccttgagcctcacttgagcgatcggccccaactgcgtcgcctgtcgaacattcaacacctgcacaccccgatcgccgctccactgcccgctgctctgcctctactggatgttgtggctcagctccatcccacgccagccgttgcggggttacccaagcaggctgccgaacaggcgattcgtcggctggaaccctttgagcgatcgctctacgctgcaccggttggctgggtggatgaccaaggaaacggggaattcttagtcgggattcgctcggcgtcgattcaagggaatcgggtgcgtctctgtgcgggtgctggcattgtgccggggtctcaacccgatcaggaactcgttgaagtcgatctcaagctccaggccatgctcggcgcgctgatctga

SEQ ID NO: 36048 - protein, 467 aa, Synechococcus elongatus PCC 7942
MAALSTASSLQSFSELLAWVRPALEATPTARLLSLSLPLPRLDPLAAWGVLGSSRDRHYYQERPATQEAIVAVGPAALLELNGPQRFQQAQTFINACLAQGLRLQAEGATLGPSFCCSFSFFEDVAGTAPAAPATVFLPRWQVRCQADRTVLTASFAIADRESYRQRLEEVWQVYQHLRAIAQQPFQLPPLRPNRWLEQQSSDPQSFRAGVETVLAEIAAGRLHKGVLARCLEAIAEFAIVPEGVLDRLRQRFADCAIFSCGDGRGSVFLGATPERLAAVEAGQLVTEALAGSAPRGETIAADQALGQALQANPKELQEHQLVAQFIRQTLQELGLEPHLSDRPQLRRLSNIQHLHTPIAAPLPAALPLLDVVAQLHPTPAVAGLPKQAAEQAIRRLEPFERSLYAAPVGWVDDQGNGEFLVGIRSASIQGNRVRLCAGAGIVPGSQPDQELVEVDLKLQAMLGALI

SEQ ID NO: 36049 - DNA, 1446 bp, Burkholderia thailandensis E264
  CDS (1)..(1446): transl_table=11
atgaacgcccgcttctcggtgctgctcgacaccttcgcacgcgcggcgcgccgcgcggccgacaccggcgagcccgtgctcgccgccgcatcgtttccgctgcggccgctgaaactgttcgacctgatcgcgagctgggacgacggcgcgaccccgtggtgcttcgtcgaagccggcgacgagccgggcgcgccggaccggccggccgcactgttcggctgggactgcgcgctcgatctgaacgagccgggcgatgcgcgattcgcccggctcgacgcgcgctggcgcgcgctcgcccgcgcggcggtcgtcgccgggccacagccgccgcgcatcgtcggcggctttcgcttcgatccgcgcgggccccggcatgcgcactggcaagcgtttcccgatgcgagcctgacgctcgcgaagatgctgatcgttcgagaaggggatgcgtattgggcggtctgccagcgtgtcgtctccgcgcacgacgattgcgccgcgctcgcgcgcgaatgcgacgcgcgaatcggcatgctcgcggcgctcgcgcccgccattgacgacgatgcgccgcgcctgctgcacgtccacgcgctgcaagccgccgaatggcagcacaaggcgcgacgcgcggtcgacgcgattcgccgcgacgcattcagcaaggtcgtgctcgcgcgcgacgtgctgcaacagtacgcgcagcccgtcgcaatcggaccgctgctgcgccggctcaggctgcgcgacgcgcgcgcgcatctgttcgcggtccgccggcgcgagggctgcttcgtcggcgcgacgccggaacgcctcgtgcgcgtcgcgcacggccacgcgcaaacgcacgcgctcgccggcacgatcgcgcgcggcgacgatcgcgatcacgaccgcgcactcggcgcgcagttgatggcgtcggcgaaggagcgcctcgaacacgcgctcgtcgtcgatgcgatccgcgacgcgctcgcgccgctgtcgcgcacgatcgacgtgccggccgagccgtcgctgttgcgcctgccgcgcctgcaacacctgagcacgccgatcgccgcgacgctgaacgcggacgcgacgctgctgcaggccgtcgcggcgctgcatccgacgcccgccgtcgccggctatccgcgcgccgccgcgctcgagcacattcgcgcacacgaaggcttcgatcggggctggtacgccggcccgatcggctggatcgacgcgcacggcaacggcgacttcgtcgtcgcgctgcgctcggcgctgatctcggcaggcgcttgccggctgttcgccggctgcgggatcgtcgccgagtcggagccggcgcgcgagtatcgcgagacgaacctcaagctgtcgggcatgcgggcggcgatcgaggcacgcgacgccgccgccaacctgcgcacggtcgcgccgatgcctgccgccgcacactga

SEQ ID NO: 36050 - protein, 481 aa, Burkholderia thailandensis E264
MNARFSVLLDTFARAARRAADTGEPVLAAASFPLRPLKLFDLIASWDDGATPWCFVEAGDEPGAPDRPAALFGWDCALDLNEPGDARFARLDARWRALARAAVVAGPQPPRIVGGFRFDPRGPRHAHWQAFPDASLTLAKMLIVREGDAYWAVCQRVVSAHDDCAALARECDARIGMLAALAPAIDDDAPRLLHVHALQAAEWQHKARRAVDAIRRDAFSKVVLARDVLQQYAQPVAIGPLLRRLRLRDARAHLFAVRRREGCFVGATPERLVRVAHGHAQTHALAGTIARGDDRDHDRALGAQLMASAKERLEHALVVDAIRDALAPLSRTIDVPAEPSLLRLPRLQHLSTPIAATLNADATLLQAVAALHPTPAVAGYPRAAALEHIRAHEGFDRGWYAGPIGWIDAHGNGDFVVALRSALISAGACRLFAGCGIVAESEPAREYRETNLKLSGMRAAIEARDAAANLRTVAPMPAAAH

SEQ ID NO: 36051 - DNA, 1266 bp, Saccharophagus degradans 2-40
  CDS (1)..(1266): transl_table=11
atggacactacgcaaaatgttgcacagcgctatgatgacctgctcgacctttattcacagtacagcagcctctatttttcgtcaccttcgcacagcctgttagccaagccaccgtttgctcaattggtttctgaacgcgttggtgatattgcccagcgcgcacaagaatcacttagcattgctaagcagttggggtttgccgacccaataataatgggcgcaataggtttcgatggcgaagacgcaagcgcattgcgggtttgtaacaatgtaattcgccaaacaaaaatgccttttgctagtggtgatgctagtggcggcattgcgtttaacccaagccaagccggtgctcaccgtataacgccagtgcccagtgggcaagtatttaaaaatagtgtgaacgaagcgcttactctttttgagcaaacaccgctgcaaaaagtggtgttgtcgcgcgcgctggatgtgcaatttgagtctgcaccaaatattccgcttgcacttaaatcgctggctgtaaaaaacccattgggctatacatttgcggtgccgttaaatgcggctgcgccagcaacagtagtgggcaaccgcgtattaattggtgcaagcccagaattacttttatctaagtcgggtaaagatattcatattcatccgctagcgggttcaatagctcgcagcgaaaaccccagcgaagatgctcaaaaagcagatgggttactgcagtcggcgaaggacttatacgagcatcgagttgttgtagatgcgatagaaaaatccctgcgtccattttgtaaaagcttgcgcgtaccgcgtacgccttcgcttatgtctaccgccaccatgtggcaccttggtactcatattacagccgagcttaatgatgaaacgctctcgtcgctcgcactggcgctcgccttacaccctacgccggcggtgggtggttacccagtggcagacgctaagcaagcgataaaaaaattagagcagtacccgcgagatttttttaccggtattgttggttggtgtaatgcgcagggcgatggcgaatgggcaattaccatacgttgtgccgaagtatttaatcatcgtgtgcgtgtgtatgccggtgcgggtgtggttgcaggttcatgcgcagaaaaagaatatgcagagaccgccgctaaatttaacacggtacttaatgcgtttggggtcaagcctgttaaagagcgggtgcctaagcaaaccaaaagcaaggtaagcgaggaggaagtgcatgtgtaa

SEQ ID NO: 36052 - protein, 421 aa, Saccharophagus degradans 2-40
MDTTQNVAQRYDDLLDLYSQYSSLYFSSPSHSLLAKPPFAQLVSERVGDIAQRAQESLSIAKQLGFADPIIMGAIGFDGEDASALRVCNNVIRQTKMPFASGDASGGIAFNPSQAGAHRITPVPSGQVFKNSVNEALTLFEQTPLQKVVLSRALDVQFESAPNIPLALKSLAVKNPLGYTFAVPLNAAAPATVVGNRVLIGASPELLLSKSGKDIHIHPLAGSIARSENPSEDAQKADGLLQSAKDLYEHRVVVDAIEKSLRPFCKSLRVPRTPSLMSTATMWHLGTHITAELNDETLSSLALALALHPTPAVGGYPVADAKQAIKKLEQYPRDFFTGIVGWCNAQGDGEWAITIRCAEVFNHRVRVYAGAGVVAGSCAEKEYAETAAKFNTVLNAFGVKPVKERVPKQTKSKVSEEEVHV

SEQ ID NO: 36053 - DNA, 1245 bp, Myxococcus xanthus DK 1622
  CDS (1)..(1245): transl_table=11
atgacgcccgctgagccgaaggaacaggaacaccccatgggaccgcagacactcgccgcgcagttgctcgagagctacgaggctggctcttcgttcttcttcgccacgccgcgccgcacgctgctggcgcgcggcacctttgctaccgtgccacaccagggcggcgcggatgccctggcgcggctccccgtgcgcgtgacggcggtgctgaatgacgcgcgccaggccgaccacgacatccccgtggcggtgggcgcggtgcccttcgacggctcggtacccgcacagctcgtggtgccgctgacgctccagcgcgccgggccgctggtgttcgacaaggacgtcccggtgcagcggccgttcagcgccagctacaccgtccagccggtgccggagcccgccgcgtacctgaacggcgtcgcgcaggccctgaagctgatgcagagcgggccgctccagaaggtggtgctgtcacgttcgctgcacctcaacgccgccgcccccatcgacctgcggcagctgctgcgcaacctcgcgcagcgcaacccgtcgggctacaccttcgccgccgacctcccccagcaggatgggacccgcggcgcgggacttcgcacgctcattggcgccagccccgagctgctcgtgtcccgctccgggttccaggtggtcgccaatcccctggccggctccgcggcccgcagcgcggatccgctggaggaccaggagcgcgccgccgcgctgctgaagtcgcccaaggacctgcacgagcacgcggtggtcatcgacgccgtcgcggaggcgctgcggccgtactgcaagacgctgaacgtgcccgccggtccgtcgctcgtgaacaccgccaccatgtggcacctgtccagccgcatcaccggtgagctggccgacccctccatctcctcgctgacgctggcggcggccatgcacccgacgccggcggtgtgcggctatcctacacggctggcgcacgaggcgattggctccatcgagcccttcgagcgcggctactacaccggcacggtgggctggtgcgacgccacgggtgatgggcagtgggcggtgaccatccgttgcgcggaggccagtgagcgcaccctgcgcatcttcgcgggcgcgggcatcgtggtgggctccacgcccgagtccgagctggcggagaccgaggccaagttccgcaccatgctccacgccatgggcctgggccacggtgccggggtgcagtcatga

SEQ ID NO: 36054 - protein, 414 aa, Myxococcus xanthus DK 1622
MTPAEPKEQEHPMGPQTLAAQLLESYEAGSSFFFATPRRTLLARGTFATVPHQGGADALARLPVRVTAVLNDARQADHDIPVAVGAVPFDGSVPAQLVVPLTLQRAGPLVFDKDVPVQRPFSASYTVQPVPEPAAYLNGVAQALKLMQSGPLQKVVLSRSLHLNAAAPIDLRQLLRNLAQRNPSGYTFAADLPQQDGTRGAGLRTLIGASPELLVSRSGFQVVANPLAGSAARSADPLEDQERAAALLKSPKDLHEHAVVIDAVAEALRPYCKTLNVPAGPSLVNTATMWHLSSRITGELADPSISSLTLAAAMHPTPAVCGYPTRLAHEAIGSIEPFERGYYTGTVGWCDATGDGQWAVTIRCAEASERTLRIFAGAGIVVGSTPESELAETEAKFRTMLHAMGLGHGAGVQS

SEQ ID NO: 36055 - DNA, 1098 bp, Mycobacterium sp. MCS
  CDS (1)..(1098): transl_table=11
gtgaccgccgagccgagcttcgtcctcaccggcgacgacggtgtcgtactggccgacggcgtccacacgccgtaccccacgctgggcgacgcgtgcgccgcgctggccgcaggcgataccccgatgatcttgggcgccttgcctttcgacctgaccgcaccgacggcactgttccgcccgcagcgcgtgcgcttcctcgatgcgctgccggactggccggccgtcggcctgccacgtgtacggatcgccgagttccggcccgcaccccaggagcaccgcgcacgcgtcgcgtcggcggtgcgcgcgctcaacgaccccgccaccggactgcacaaagtcgtactcgcgcgggcgctgcacctgaccgccgacggaccactcgacgcgcgaaccgtgctgcggcgcctggtcgccgacgatgcgagcgccaacgcgtatctggccgatctcaccgcagccggagaccactaccgcggtgcggccctgatcggggccagcccggaactgctggtggcccggcgcggtgaggtggtgacgtgccaaccgttcgccggttcggcgccgcggttcgccgaccccgcggccgaccgggccagcggcgccgccctcgccgactcggccaagaaccggcacgaacacgccatcgtgatcgacgaggtgcgcaaggccctcgacccgctgtgcgtggatctgcagatcgcgccgacaccgcacctcagcgcgacggccgccgtctggcacctgagcacccagatcaccggccgactgcgcgaaacaaacaccaccgcactggatctcgcggtcgcgctgcacccgaccccggccgtcggcggcgtcccgaccgacttggccgcggagttgatcaaacgcctcgagggcgaccgcggcttctacgccggcgccgtcggctggtgcgacgcggcgggtgacggccgctgggtggtgtccatccggtgcgcccaactggccgccgatcggctcgccgccaccgcccactccgggggcggcatcgtcgccgaatccgatccggacgacgaagtcgccgagaccacaacgaaattcacgaccatcctgtccgcactgggggtaacgcaatga

SEQ ID NO: 36056 - protein, 365 aa, Mycobacterium sp. MCS
MTAEPSFVLTGDDGVVLADGVHTPYPTLGDACAALAAGDTPMILGALPFDLTAPTALFRPQRVRFLDALPDWPAVGLPRVRIAEFRPAPQEHRARVASAVRALNDPATGLHKVVLARALHLTADGPLDARTVLRRLVADDASANAYLADLTAAGDHYRGAALIGASPELLVARRGEVVTCQPFAGSAPRFADPAADRASGAALADSAKNRHEHAIVIDEVRKALDPLCVDLQIAPTPHLSATAAVWHLSTQITGRLRETNTTALDLAVALHPTPAVGGVPTDLAAELIKRLEGDRGFYAGAVGWCDAAGDGRWVVSIRCAQLAADRLAATAHSGGGIVAESDPDDEVAETTTKFTTILSALGVTQ

SEQ ID NO: 36057 - DNA, 1143 bp, Rhodococcus sp. RHA1
  CDS (1)..(1143): transl_table=11
atgcagtcgacggccattgccgagtccgcagagacttcggcggacctcccgccgggcgcgccgttcgttctctcccgcccgcacggcaccgtgatcgccgacggcatccgcaccggttacgactccgcccgcgacgccgccgccgccctgcggaacggcaccgcgacgtcggtggtcggcgcgctcgccttcgacccgtcacatcccgccgcgctgatcgcaccacaggcgctgcgtcatcacccgggaagctggacccctcgcctgcaggcccttccgcgcgtgcgcgccggtgagtcgattcccccggaggacgagcacatttcccgggtcgccgccgccattcacgtgctgcgggaacccgatgccacactgcacaaggtggtactcgcccgatcggtcgtcctgcacgccgacgaaccgctgcatccgcacgcactgctcgcgcagctcgtggcgaacgacctcggcggcaacggcttcagcgtcgatctgagtgccgcaggcaccggctggtcgggacggcacctcgtcggctcgagtcccgaggtgctcatccgccgccgcggcaacaccgtgacctgccatcctctcgccggatccgctccccggcacaccgatcccgagatcgaccggctgaccgccgaaaaccttgcctcgtcggagaagaacctgcgtgaacatgccctcgtcgtcgaggcgctgcgagcgagcctcgaaccgttctgcactgaactcgacatcccggacaggcccaccctcaccagcacaccgcaactgtggcatctcggcacgcccgtgtcgggacggctgcgggaccgctcggtgaccgcactggacctcgccgtcgccgtgcacccgaccccggccgtgtgcggcacccccaccgacgcggcgcgtgcgctgatcggcgaactcgagggcgaccgcggcttctacgccggcgccgtgggctgggccgacgccgacggagacggcgaatggatggtcaccatccggtgcgcgcagatcgacgccgaccgcaccaccgtcacggcgtacgccggcggcggcatcgtcgccgcatccgaaccggacgacgaactcgccgagaccacaaccaaactgggcaccgtcctcgccgcactggggctcccccgatga

SEQ ID NO: 36058 - protein, 380 aa, Rhodococcus sp. RHA1
MQSTAIAESAETSADLPPGAPFVLSRPHGTVIADGIRTGYDSARDAAAALRNGTATSVVGALAFDPSHPAALIAPQALRHHPGSWTPRLQALPRVRAGESIPPEDEHISRVAAAIHVLREPDATLHKVVLARSVVLHADEPLHPHALLAQLVANDLGGNGFSVDLSAAGTGWSGRHLVGSSPEVLIRRRGNTVTCHPLAGSAPRHTDPEIDRLTAENLASSEKNLREHALVVEALRASLEPFCTELDIPDRPTLTSTPQLWHLGTPVSGRLRDRSVTALDLAVAVHPTPAVCGTPTDAARALIGELEGDRGFYAGAVGWADADGDGEWMVTIRCAQIDADRTTVTAYAGGGIVAASEPDDELAETTTKLGTVLAALGLPR

SEQ ID NO: 36059 - DNA, 1092 bp, Rhodococcus sp. RHA1
  CDS (1)..(1092): transl_table=11
atggacggcttccttctctcccgcgccgaccggacgttgcgtacgtccggtgcgcggcacgggtacgacaccgcggcagccgctgtcgcggccctctcgaacggtgacaccgaactgatcgtcggagcgctgccgttcgatccccagcgtcctgccgcgctgaccgccccggaatcgtgggaattcacggacggcccgtggcggcccggtgccgttcccgacctcccgtccgtacgcctcacgcgggaaattcccgaccccaccgagcacgtggcccgggtgcggtccctcgtcgaccgactgcgcgagggcgctctcggcaaggtcgtcgcagcccgcagcgtcaccctccgtgccgacacccccatctccgcagaagcgttggccgcgagaatgattcaccagaatcccactgccaacgggttcgccgtcgacctctccgcggccggcgaggggttccgcagccacagcctcgtcggcgccagccccgaggtgctgctcagccgacgcgggcgacgcgtcacctgccgtcccctcgccggaacagccccgcggcgcgccgatccggaggccgacgagaaggaaggtcgcggactcctggagtccacgaagaacctggccgagcacgcgttcgtcacggcctggatcagagacgtcctggcgccgctctgcaccgagttgaccgtcccggactccccggttctgacgagcacccacgaggtgtggcatctcgcgacccccatcgaaggcgtgctgcgcgacgcgtcgaccagcgctttgagcctggccacccggttgcacccgacccccgcggtgtgtggcacccccaccgacctcgccctcgcgaccatccgggacgtcgaggaggatcggcggttctacggcggcgccgtcgggtggtgcgacggcgacggcgacggcgactgggtggtggccatccgctgcgccgagatcgccgcggacggactcgaggcactggcgacggcgggcgggggcatcgtcgccgagtccgaccctgagtccgaactcgacgagacgaccaccaaactgcgcacgctgctccgggcgctcggcgtgcagcagggcccgtga

SEQ ID NO: 36060 - protein, 363 aa, Rhodococcus sp. RHA1
MDGFLLSRADRTLRTSGARHGYDTAAAAVAALSNGDTELIVGALPFDPQRPAALTAPESWEFTDGPWRPGAVPDLPSVRLTREIPDPTEHVARVRSLVDRLREGALGKVVAARSVTLRADTPISAEALAARMIHQNPTANGFAVDLSAAGEGFRSHSLVGASPEVLLSRRGRRVTCRPLAGTAPRRADPEADEKEGRGLLESTKNLAEHAFVTAWIRDVLAPLCTELTVPDSPVLTSTHEVWHLATPIEGVLRDASTSALSLATRLHPTPAVCGTPTDLALATIRDVEEDRRFYGGAVGWCDGDGDGDWVVAIRCAEIAADGLEALATAGGGIVAESDPESELDETTTKLRTLLRALGVQQGP

SEQ ID NO: 36061 - DNA, 1095 bp, Mycobacterium avium 104
  CDS (1)..(1095): transl_table=11
gtgaacgacgaaccgacgttcgcgctgtgcgggccgacgcaaaccctggtcgccgacggcgtgcggcgaagctaccgcgacgtggccgccgcgcaggccgcgctgcgctcccaagaagtgtcaattgtgttgggcgcgttgcctttcgacgtgcgccgaccggccgccctgctgaccccggataccgtgagcgtcagcgacggcccaccggactggccggcccggaagctgccgtcgatgcgggttgccgccgccctccccccgccgatcgactaccgggaccggatctgccgggcccgcgagcagctcgccgcaaccgacaacccgctgcacaaggtggtgctggcccgcgccctgcacctggtcgccgacgccccgctggatgcccgcaccatcctgcgccggctgatcgccgcagacccgggcgcgtacggctatctcgtcgacctcagcgccgccggccacgaccatgcgggcgtggcgctggtgggcgccagccccgagcttctggtggcgcgcaccggcgaccgggtcgagtgccggccgttcgccgggtcggccccgcgtgccgccgatccggacaccgacgcggccaacggtgccgcgctggcgtcgtcggccaagaaccgccacgagcatcagctggtgatcgagaccatcagggccgccttggagccgctgtgcgacgacctgtccatcgcggcccaaccgcagctgagccgcaccgccacggtgtggcacctgtgcacgccgatcagcgggcggctgcgcgataagtcaaccaccgcaatcgatttggcgctggcgttgcaccccacaccggcggtcggcggggtgccgaccgacgccgccgtcgagctgatcgccgaactggagggcgaccgcggcttctacgccggcgcggtgggatggtgtgacgcccgcggcgacggccgctgggtggtgtccatccgctgcgcgcagttgtcggccgaccggcgcagcgcgctggcgcgggccggcggcggtatcgtcgccgaatccgatcccgacgacgaagtcgcggaaaccacaacgaaattcgccaccatactcaacgccctggacgtccgatga

SEQ ID NO: 36062 - protein, 364 aa, Mycobacterium avium 104
MNDEPTFALCGPTQTLVADGVRRSYRDVAAAQAALRSQEVSIVLGALPFDVRRPAALLTPDTVSVSDGPPDWPARKLPSMRVAAALPPPIDYRDRICRAREQLAATDNPLHKVVLARALHLVADAPLDARTILRRLIAADPGAYGYLVDLSAAGHDHAGVALVGASPELLVARTGDRVECRPFAGSAPRAADPDTDAANGAALASSAKNRHEHQLVIETIRAALEPLCDDLSIAAQPQLSRTATVWHLCTPISGRLRDKSTTAIDLALALHPTPAVGGVPTDAAVELIAELEGDRGFYAGAVGWCDARGDGRWVVSIRCAQLSADRRSALARAGGGIVAESDPDDEVAETTTKFATILNALDVR

SEQ ID NO: 36063 - DNA, 1092 bp, Mycobacterium smegmatis str. MC2 155
  CDS (1)..(1092): transl_table=11
gtgagcgcgccgtcgttcgtcttcgcgggcccgtctggtgtgctgatcggcgagggcgtgcagacaggcttcgccacgatcgccggcgccagggcggccctgacgtcgggcgcggcggacctcgtcgtcggggcgctgccgttcgacctgaccgggcccgcggcgctgcacgccccggcttctgcgcgggtcgccggcgcgctgcccgactggccgacgggcactccaccggtgctgcgtacgcgcgagacgctgccgtcgggtgatgtgcaccgcgagcgggtggccgaagcggtgcgccggttgcgcgacgcggacacgccgctggacaaggtcgtgctggcccgcgcactgcggttgaccgccgaagccccgtgggatccccgcacggtgctgcgccgactcgccgacgcggacccggcggccacggtgtacctggcggatctgagcccggcaggcgatccgcacaccggtaccgtgctggtgggcgcgagccccgagttgctggtcgcccgcgacggcgacgaggtgatctgccgcccgttcgccggttcggcaccacgatcggccgatttggagaccgaccgggcgaacgccgccgcgctggccgcctccggcaagaaccgccacgagcacgaactggtggtcgacgtcatgcgcaaggcgctcgacccgctctgcgtcgacctgcagatcgccgcgcagcccgaactgcacgcgaccgacgcgctgtggcacctgagcacaccgatccgtggccggttgcgcgacaaggcgatcaccgcaatcgatctcgccgtcgcgctgcatcccacaccggccgtcggcggcgtccccaccgacctggccgcctccctcatcaccgaactcgaaggcgaccgcggcttctacgcgggtgccgtcggctggtgcgacagcgcgggcaacggccgctgggtggtgtcgatccggtgcgccgtactgtccgccgaccgccgcgtcgcgctcgcgaatgccgggggcggcatcgtcgccgaatccgatcccgacgacgaagtcgacgagaccacaaccaaattccgcacgatactgacagggctgggagtgcaatga

SEQ ID NO: 36064 - protein, 363 aa, Mycobacterium smegmatis str. MC2 155
MSAPSFVFAGPSGVLIGEGVQTGFATIAGARAALTSGAADLVVGALPFDLTGPAALHAPASARVAGALPDWPTGTPPVLRTRETLPSGDVHRERVAEAVRRLRDADTPLDKVVLARALRLTAEAPWDPRTVLRRLADADPAATVYLADLSPAGDPHTGTVLVGASPELLVARDGDEVICRPFAGSAPRSADLETDRANAAALAASGKNRHEHELVVDVMRKALDPLCVDLQIAAQPELHATDALWHLSTPIRGRLRDKAITAIDLAVALHPTPAVGGVPTDLAASLITELEGDRGFYAGAVGWCDSAGNGRWVVSIRCAVLSADRRVALANAGGGIVAESDPDDEVDETTTKFRTILTGLGVQ

SEQ ID NO: 36065 - DNA, 1287 bp, Nocardioides sp. JS614
  CDS (1)..(1287): transl_table=11
gtgagtaccctcggcagggtgacgagcagccccacacccggcgatccgccgccggccccggcggacgcgctcgtcgtccgcacggtccgcctcgatctcgaccaggcggcgagcctgctggacctggtcccggccgaccggccggtcacctggttgcggcggggcgacggcctggtcggttggggcgtcgccgcccaggtgcgcaccagcggggccacccggttcgccgacgccgtgaagtggtggagcgagaccatcgctcgggcggacgtgcacgacgacgtcaacgagcctggcaccggcctcgtgtcgttcgggtcgttcgcgttcgccgacgacccgggcgactcgatcctggtcctcccccgcgtggtcgtcggacgccgcggcgacgtcacgtggctcaccacggtcggcgaggtcggacccccgctcgggccggtggagcgtccagcggccccggccgcggtcagcttcgccgacggcgcgctgaacggcgagcagtggatgtccgtggtcgccgacgccgtggcacggatcaacgccggcgacctggagaaggtcgtgctcgctcgggacctggtcgccacggcgagcgacccggtcgacgtacgctggccgttgggccggctcggcgagacctatccgatgtgctggacgttccacgtcgacggcatgttcggggcgaccccggagatgctggtgcgccgcgagcgcggcctggtgacctcgcgggtgctggccggcaccatccgccgcaccggcgaccacgagcgcgacctggccctggccgcgaccctggcccattcctccaaggacctcgaggagcacgagtacgccgtccgctcggtcgccgacgcgctcgagccgcactgctcgtcgatgaacgtgcccgaggctccgttcgtgctgcacctgccgaacgtcatgcacctggcgaccgacgtggccggcgtggtccatgacgcggccaccgtgtcctcgctccagctcgccgaggcgctgcacccgtcggccgccgtcggcggcacgccgaccccggtcgcgaccgcgttgatcgcggacatcgagggcatggaccgcgaccgctacgccgggccggtcgggtggatggacgcctccggcgacggcgagtggggcatcgccctgcgctccgcccgtctcgagggccgcaccgtccggctgttcgccggctgcggcatcgtcgccgactccgacccagccgcggagctcgccgaggcccaggccaagttcgtcccggtccgcgacgcgctcaccgcgtcctga

SEQ ID NO: 36066 - protein, 428 aa, Nocardioides sp. JS614
MSTLGRVTSSPTPGDPPPAPADALVVRTVRLDLDQAASLLDLVPADRPVTWLRRGDGLVGWGVAAQVRTSGATRFADAVKWWSETIARADVHDDVNEPGTGLVSFGSFAFADDPGDSILVLPRVVVGRRGDVTWLTTVGEVGPPLGPVERPAAPAAVSFADGALNGEQWMSVVADAVARINAGDLEKVVLARDLVATASDPVDVRWPLGRLGETYPMCWTFHVDGMFGATPEMLVRRERGLVTSRVLAGTIRRTGDHERDLALAATLAHSSKDLEEHEYAVRSVADALEPHCSSMNVPEAPFVLHLPNVMHLATDVAGVVHDAATVSSLQLAEALHPSAAVGGTPTPVATALIADIEGMDRDRYAGPVGWMDASGDGEWGIALRSARLEGRTVRLFAGCGIVADSDPAAELAEAQAKFVPVRDALTAS

SEQ ID NO: 36067 - DNA, 1200 bp, Bacillus cereus G9241
  CDS (1)..(1200): transl_table=11
atgaatgaatttacggctgtaaaggaattgtcagaaaagtcattagaagattataagactgaatcttctttctttttcgcttcaccaactcgaacgatattgacagaaggaggatttactgcagtaaagcatcgtgaaattgaaagtttcccagagcttgtgcaagcagtgttacgtaatgcaaaacaagcaggaaatccgaatcctatcgttgttggtgccttgccatttgatcgtagaaaagaagttcaacttatcgtaccagaatatagcagaatttctgagcgtttacaattggatacaacaaatcagtttgaaacaaatgagaacgtaacattcgaaatgacgccaatgccagagcctgaagtgtatatgaatggtgtgaagcaaggagttgaaaaaatacaggacgggtatttaaggaaaatcgttctatccagatcgttagatgttaaatcttccgaaaagattgataagcaaaaacttcttcgaaaattagcagagcataataagcacggctatacatttgctgtgaatttaccgaaagatgaaaacgagaatagtaagacgttaattggagcaagccctgaattactcgtttcacgtaatggtatgcaagttacctctaatccgttagctggttcaagaccgagaagcgatgacccagtggaagataagagaagagcaaaggaattactttcttcttcaaaagatttacatgaacatgcagtagtagtggaagcggttgccactgcgcttcgcccatactgtcatacattacatgttccggaaaaaccatccgttattcatagtgaagcgatgtggcatttgtctactgaagtaaaaggtgaactaaaggattccaatactagttctttagaattagcaattgctcttcatcctacgcctgcagtttgcggaacgccgatggaagaagcgagagaggctattcaaaaaattgagccattggatcgtgaattctttacaggaatgctagggtggagtgatttaaatggagacggtgaatggattgttacaatacgttgtgctgaagtacaagaaaatacactccgtttatatgcaggtgctggagttgttgctgagtcaaaaccagaagatgaattagcagaaacatcagctaagttccaaacgatgctgaaagctttaggattaaatgatagttcacttaatgaaaagtag

SEQ ID NO: 36068 - protein, 399 aa, Bacillus cereus G9241
MNEFTAVKELSEKSLEDYKTESSFFFASPTRTILTEGGFTAVKHREIESFPELVQAVLRNAKQAGNPNPIVVGALPFDRRKEVQLIVPEYSRISERLQLDTTNQFETNENVTFEMTPMPEPEVYMNGVKQGVEKIQDGYLRKIVLSRSLDVKSSEKIDKQKLLRKLAEHNKHGYTFAVNLPKDENENSKTLIGASPELLVSRNGMQVTSNPLAGSRPRSDDPVEDKRRAKELLSSSKDLHEHAVVVEAVATALRPYCHTLHVPEKPSVIHSEAMWHLSTEVKGELKDSNTSSLELAIALHPTPAVCGTPMEEAREAIQKIEPLDREFFTGMLGWSDLNGDGEWIVTIRCAEVQENTLRLYAGAGVVAESKPEDELAETSAKFQTMLKALGLNDSSLNEK

SEQ ID NO: 36069 - DNA, 1395 bp, Bacillus cereus G9241
  CDS (1)..(1395): transl_table=11
gtgattcaaacgaaacaaataggcttgcaagaagttctgagtgcagccattaagcatgcaactgatgaaaaaatattggttagttttgtaaaacaaatagactggatggatcctcttctgttttatgcagcaggaaaaaggattgcattcgaaaatagatgttattttgcagacccagctcagcatgtaatatttgctggaattggctctgttttcactatagcaactgcttctcacaaacgctttcaaactgctcgtgacgagtgggataaagtaaaagagaaagcatttgtacaaagagaaagatacgaatttggaacaggtcctcttttatttggtggattttcatttgaccaagaaaaagagaaaacagatttatggaaagaatttgatgatacgacattttcactaccggcatttttattaactgtaaaaaatgaaaaagcatggttaacgatgaatacattcgtttcagcaacagattgtgcagaaactctttataacgaaattgtttctttagaagagaaaatttttggggagagtaaatgtgcactagaaggatcgaaattaacagttacttctaaagtagaagtggatccgaaaggctggatgaaggccattgagaaagtgcaagatgagatgaagcaggggaacgtgcagaaggttgtattagcgagggagctaaaagtagagacggatcatcatattgattctgcgcttgttttagaagcacttcgcattgggcaaccagattgttacgtattttcttttgattataaaggagcatgcttcttaggagcgacgccagagagattaattcgcaaagaaggtgaaaagtttacttcgatgtgtcttgctggttcaactggtcatggtcaatctatagaagaaagtaagcgaaatagtgatgcgcttcttcatgatgaaaagaatttagctgaacacggttatgttgtgaacatgattcgaggagtattaaatgagcactgcgaatccgttaatattccggaaaatccaggtctgttaacaacgaaaaacttaattcatttatatactcctgtagaggcaaaaggcgatgcgagtcttttaacgatggtagaagaattacatccaacaccagctcttggcgggacacctcgtttggaagcgatgaaactgattcgtgatgttgaattgttagacagaggattatatggtgcaccgattggctggatagatgatgaaggaaatggtgaatttgcggttgcacttcgctgcggattattaaatggagagaaagcatccttatttgccggttgcgggattgtaattgattcagtaccgcaacttgaatatgaagaaacaagtttgaagtttagaccgatgcttggtgctttggaggaattaatgaaatga

SEQ ID NO: 36070 - protein, 464 aa, Bacillus cereus G9241
MIQTKQIGLQEVLSAAIKHATDEKILVSFVKQIDWMDPLLFYAAGKRIAFENRCYFADPAQHVIFAGIGSVFTIATASHKRFQTARDEWDKVKEKAFVQRERYEFGTGPLLFGGFSFDQEKEKTDLWKEFDDTTFSLPAFLLTVKNEKAWLTMNTFVSATDCAETLYNEIVSLEEKIFGESKCALEGSKLTVTSKVEVDPKGWMKAIEKVQDEMKQGNVQKVVLARELKVETDHHIDSALVLEALRIGQPDCYVFSFDYKGACFLGATPERLIRKEGEKFTSMCLAGSTGHGQSIEESKRNSDALLHDEKNLAEHGYVVNMIRGVLNEHCESVNIPENPGLLTTKNLIHLYTPVEAKGDASLLTMVEELHPTPALGGTPRLEAMKLIRDVELLDRGLYGAPIGWIDDEGNGEFAVALRCGLLNGEKASLFAGCGIVIDSVPQLEYEETSLKFRPMLGALEELMK

SEQ ID NO: 36071 - DNA, 1134 bp, Kineococcus radiotolerans SRS30216
  CDS (1)..(1134): transl_table=11
gtgtcagaacccgaggcggcagcgctcgcggtgcgggcgggtgccaccgtcttctccaacgagaagtccacgctcgtgcagaccggcccccggcccctggtccccggggccagcgggctggagcagctgcggcgcacgacggcggccctggagggggcgcccgtcgggctgatcgccgccggcgcggtccccttcgacctgcgcggccccggcgccctgcggctggggacctcggcctccacccccggccccctgcacctgcccccggccacgcgccggcgccaggtcaccgtcgcccgcagccgcccccggcccgcgccctccggctacgccgacgccgtgcgcaccgccctggcccgcatcgccgacggcgaggtcgccaaggtcgtcctggcccgcaccctggagctggaggcgctggacgactggtcggtgcccgacctcgtcgccgagctcgtcacccgcaaccccggcgcgacggcgctcgccgtccccctcgacgaccccgacgacccccgggcccgctggctggtcggcgccagccccgagctgctgctgcgccgccgggggcccagcgtcctgctgcgcccgctggccggttccgccccccgctccccggagccggacgaggacatccgccgcgccgacgcgctgctggcctcggacaaggaccgccgcgagcacgccttcgtcgtcgacgccatcgtcgaggccctccagcccttctgccgcaccatcaccaccccggagccggagctcgtcgcgaccccggccgtgtggcacctcgcgacccggatcaccgccctgctcaccgacaccggcaccacctccgtcgacctcgtcgccgccctgcacccgaccccggcggtcggcggctcgccgcggcccgcggccatgcgggtgatcgacgaggtggagggcctggaccgcggctgctacgccggggccgtgggctggcaggacgtgcacggggacggggagtgggtcgtcgccgtgcgctgcgcggaggtcagcggccgccggctgcgcgtcttcgccggcgcgggcatcgtcgccgggtccgaccccgacgccgaggtggccgagaccgcggccaagatgcgcaccgtcctggactccgcgatcccgcgctga

SEQ ID NO: 36072 - protein, 377 aa, Kineococcus radiotolerans SRS30216
MSEPEAAALAVRAGATVFSNEKSTLVQTGPRPLVPGASGLEQLRRTTAALEGAPVGLIAAGAVPFDLRGPGALRLGTSASTPGPLHLPPATRRRQVTVARSRPRPAPSGYADAVRTALARIADGEVAKVVLARTLELEALDDWSVPDLVAELVTRNPGATALAVPLDDPDDPRARWLVGASPELLLRRRGPSVLLRPLAGSAPRSPEPDEDIRRADALLASDKDRREHAFVVDAIVEALQPFCRTITTPEPELVATPAVWHLATRITALLTDTGTTSVDLVAALHPTPAVGGSPRPAAMRVIDEVEGLDRGCYAGAVGWQDVHGDGEWVVAVRCAEVSGRRLRVFAGAGIVAGSDPDAEVAETAAKMRTVLDSAIPR

SEQ ID NO: 36073 - DNA, 1416 bp, Synechococcus sp. RS9917
  CDS (1)..(1416): transl_table=11
atgacggccgcgcccgccaatccccacgctgtgagcagcttcagcgatctgctggatcaggccctgacggcctggcgcgggcgtcagggggaggaaggggtgttcagcctggccctgccgctgcatggggtcgatcccctgctccagctgccgttgctgagcagcgccgatccgttccgcttcctctgggacagcgctcccggcctgagcctggccgcagctgggcgctgccatcacctcgacctggctggcccgcgtcggtttgaactcgcccagcgcttcagcgatacaaccctggcgcggattctggatgcaacgccggaggccccggcgcaggcgcgctcacggatcctgctggccttcgcctttttcgagagcaacagcgagcagcagcccaggcccaccatgccctcggttcaggcggtgctaccccgctggcaactcagtcgccatggccgccagggctggctgcgcctgcatggcagcgtcagccagagcgccgatgtgcgccacctggcggaaacgctctggcagatggcccaacgactggagcagtgtcctcacgcccccttgcccgcatggtcgaccaccatcagtggcaccaccacccctggagcctggcaggagcgctatgcgccggctctgcgccgaggcctggatctggtgaatgggggcgacctgcacaaactggtgttggcggtgcgccagtcgattcagctccgggccccgctcgatcccctgcccctcctgcaacgcctgcggcagcagcaagccggcagctgccgattcctctggcaacgcaacagcgacgacagtttcttcggcgcctcgcccgagcggttgctctgcctgcgcagcgatcagctgcgcagcgatgccctggcagggacggcgggccaaggcgatcgcggtgatgccctgctccgttccgacaaagatcgacgcgagcacgagctggtggtgcaggcgatcaccgaccacctgcgcgcccaggggctcagcccccgcaggccgcgccgcccccagctggcgcgccatggccaactcgtgcatctccacaccccgatcacggccgctgccgctgggcgggcaccgcttgctctcgcggaagcccttcaccccacacccgccgttgccggcctgccgcggcgggaggcgatcagctggctgcgcagcctcgagccttttgaacgcgggggctatgcggctccgatcggctggatcgacaacgccggtgatgccgatctgcgcgtggccatccgctgcggccatgccaatggctgccagctcgatctcaccgcgggggccgggctcgtgcgcggttcggtggcggaacgggagctgcaggaagtgggcctcaaactcaccgtgctggccgatcagctggagcttcaggccgttccgctcgccacctga

SEQ ID NO: 36074 - protein, 471 aa, Synechococcus sp. RS9917
MTAAPANPHAVSSFSDLLDQALTAWRGRQGEEGVFSLALPLHGVDPLLQLPLLSSADPFRFLWDSAPGLSLAAAGRCHHLDLAGPRRFELAQRFSDTTLARILDATPEAPAQARSRILLAFAFFESNSEQQPRPTMPSVQAVLPRWQLSRHGRQGWLRLHGSVSQSADVRHLAETLWQMAQRLEQCPHAPLPAWSTTISGTTTPGAWQERYAPALRRGLDLVNGGDLHKLVLAVRQSIQLRAPLDPLPLLQRLRQQQAGSCRFLWQRNSDDSFFGASPERLLCLRSDQLRSDALAGTAGQGDRGDALLRSDKDRREHELVVQAITDHLRAQGLSPRRPRRPQLARHGQLVHLHTPITAAAAGRAPLALAEALHPTPAVAGLPRREAISWLRSLEPFERGGYAAPIGWIDNAGDADLRVAIRCGHANGCQLDLTAGAGLVRGSVAERELQEVGLKLTVLADQLELQAVPLAT

SEQ ID NO: 36075 - DNA, 1440 bp, Synechococcus sp. WH 7805
  CDS (1)..(1440): transl_table=11
atgtcggccgagtccttccccagctcgatggcgatgcgcttcggcgatcggctccagcaggccctgcaggcctgggagcagcgccagggtgaggactgtgtaatgagtctggccgtccccatcggcggcctcgatcccctgcggcacctgccagacctgcgatcctccgaccccttccgcttcctctgggacggggcaccgggtctgtgcctggccgcgtctggtcgctgccaccacctggatctcgccggtccgaaacgattcgaactagcacagcgtttctgcgatgccaccctttgcagggtcgtggaaggctctccggatgcaccggcgcaggcccgatcccgcatccttctggccttttcgtttttcgagcagccgagcgaacagcagcccaggggaggcatgccctccgtgcaggccgtgctgccccgatggcaactgagtcgtcagggtcgccagtgctggcttcggatccacggggtcgcccacgaaatcgaagacgtccgcctgctgatcgaaacgctttggttgatggccgagcggcttcaagcccagccccagctgtcagaaccgtggccggaaacggtgcggggcagtgtcagccctggcgattgggaatcgcgctacgcgtcggcccttgaacgggggttggagctggtgaaccagggtgaactccacaagctcgtgctggccgttcggcaatcgattcaactcagcgcgcccctcaatcccctgccgctgcttgatcgattgcggcaccagcaggccggcagctgtcgcttcctctggcagcgtgacgcgcaggactccttttttggagcctctcctgaacggttgctcagtctgcgcaatggacaactccgcagcgatgctctggccgggacagccggtcggcttgaaaccggagagtcgcttctgaattccgagaaggaccgcagagaacatgaattagtggtgcaggcgatcactgatcacctgaagagcctcgggctgaccccccgcagaccaaggcgcccccaactcgctcggcacggacggttgatgcatctccacacgccaattacagcggcggccgaggaacagttgccgctgagtctggctggtgccctgcaccccacaccagcggtagcaggtctccccagacgccaggccatgggttggctgcgcagccttgagcccttcgagcgcggaggctatgcggctccaatcggctggattgacagtgccggcgacgccgaactgcgggttgccatccgctgcggccacgcccacggttctcaactcgacctcaccgctggagccggactggtgagggggtcagtggcggaacgggagctgcaggaagttgctctcaaactgaccgtgctggccgatcagttggacctccaatcacaacagggttccaaccctctcgatcctccgttgcctcgcctgtga

SEQ ID NO: 36076 - protein, 479 aa, Synechococcus sp. WH 7805
MSAESFPSSMAMRFGDRLQQALQAWEQRQGEDCVMSLAVPIGGLDPLRHLPDLRSSDPFRFLWDGAPGLCLAASGRCHHLDLAGPKRFELAQRFCDATLCRVVEGSPDAPAQARSRILLAFSFFEQPSEQQPRGGMPSVQAVLPRWQLSRQGRQCWLRIHGVAHEIEDVRLLIETLWLMAERLQAQPQLSEPWPETVRGSVSPGDWESRYASALERGLELVNQGELHKLVLAVRQSIQLSAPLNPLPLLDRLRHQQAGSCRFLWQRDAQDSFFGASPERLLSLRNGQLRSDALAGTAGRLETGESLLNSEKDRREHELVVQAITDHLKSLGLTPRRPRRPQLARHGRLMHLHTPITAAAEEQLPLSLAGALHPTPAVAGLPRRQAMGWLRSLEPFERGGYAAPIGWIDSAGDAELRVAIRCGHAHGSQLDLTAGAGLVRGSVAERELQEVALKLTVLADQLDLQSQQGSNPLDPPLPRL

SEQ ID NO: 36077 - DNA, 1176 bp, Pseudomonas fluorescens
  CDS (1)..(1176): transl_table=11
atgagaacgggcaccctaagaacgaccgagatggaagaggtgcaactcgcagaggtacaacgtagtttttcgttcacatccggcgatcgcgagttagcggtcaccgggatgctgcagagaattgaaacacctgccattggcggcgatgacgccaatagcctgttccagcagacaattgcgcaagcgcttgatcgggcgcgcgaagctggccagagcaacccaatcatcgttggcgccatccctttcgaccctgctgaaccttcctgcctctacattcccgaacacgcgcaatggcggacccgagacatccacgcgaaaacgggtatgtcgacgctgcctgagttgatcgaacagaaaaacattccggacgaacaggccttcaaacgggcggtggaacacgccgtcgtcaacttccgccacagcgacgtacgcaaggctgtgctctcggttcaacgcgagctgatatttgcaaacgatgtggatgtgagtgccctgcagcacaacctgaaagcccagaacccgagcggctaccacttccgtgtgccaatgcctgatggcaccacgctgatcggtgtcagtcccgaacttctggtccgcaaggaaggcctgagctctctgtccaacccgctggcagggtcagccaagcgcatggccgatccagaagccgaccggcgcaatgcagactggttgctgacatcggaaaaagatcactacgaacacgggttcgtgacccaggacatcgtcagccaactggggaaactgtgcacgcagctgaatgtgccgcaacgcccctccctcatcagcacgcccgcgctctggcacctctcgacccgcatcgaaggtacgctggcagacccggctgtatcggccttgcagcttgcctgccgcttgcaccccacaccggctgtgtgcggcttccccaccgagcgcgcccggcgcctgattcgcttcgtcgaacccttcgagcgcggcctgttcaccggcatggtgggttggtgcgatgcccagggcaatggcgaatgggtcgtaacgattcgttgcggcacggtcaggcgaaacaaggtccgcctgttcgccggcgcaggcatcgttgaagcctcaagccccgactccgaatgggcagaagtccagaccaaacttggcaccatgctgcgcgcctgcggattggcccactaa

SEQ ID NO: 36078 - protein, 391 aa, Pseudomonas fluorescens
MRTGTLRTTEMEEVQLAEVQRSFSFTSGDRELAVTGMLQRIETPAIGGDDANSLFQQTIAQALDRAREAGQSNPIIVGAIPFDPAEPSCLYIPEHAQWRTRDIHAKTGMSTLPELIEQKNIPDEQAFKRAVEHAVVNFRHSDVRKAVLSVQRELIFANDVDVSALQHNLKAQNPSGYHFRVPMPDGTTLIGVSPELLVRKEGLSSLSNPLAGSAKRMADPEADRRNADWLLTSEKDHYEHGFVTQDIVSQLGKLCTQLNVPQRPSLISTPALWHLSTRIEGTLADPAVSALQLACRLHPTPAVCGFPTERARRLIRFVEPFERGLFTGMVGWCDAQGNGEWVVTIRCGTVRRNKVRLFAGAGIVEASSPDSEWAEVQTKLGTMLRACGLAH

SEQ ID NO: 36079 - DNA, 1182 bp, Listonella anguillarum serovar O2
  CDS (1)..(1182): transl_table=11
atgaaacgtgaagttattgggttttcaaaaatggctaatcagctattggatgagcacttaaaagaatctcccttcttttttgcttcgcctcacaacaccatgcttggcgtgggaattgctcatcagttcaatcaggcgatcccattccgcgagctggcggatcaagcaaccaagatgctagaagcagcaaaaacagatgagtacgataatcctattttatttgcgacgattccttttaatgaagagacggcgacgcgtttctttattccagaaaagctctatgtttctggtagcccgcgggccagtgaaaaagaggagcagcagagccacaaagcgaccattgtttcaccgccaacaggcaacgactacaaacaaggagtcacaaccttacttgagctgtttaataccaccgaactatcaaaagtggtgctatcacgtttagtgaaactctcgactccgcaacacatcgatcaaactcgtttattgcgtaatctgttgtccatcaatcgcaatggctacactttttctactgaaattggccctaacgccaagttaatgggcgccagtcccgagttgttgttggcgaagaaaggcgggtttatcgtttctaaccccctagcgggctcgcggcctaaatcaaacaatgcggtgcaaaaccaacagcgctccgcttcattacttgatacgcaaaaagatctgaatgaacatgccttcgtcgtcgaggaagtcgagaaagtactcagccgctactgccataacttatttacccctatggttccatcagtgattgaaaccgaaacgatgctgcatttatcaacagtgcttgaagggcaagccgatgatccgatgattaactcgctgcgcattgcagcagagttacacccaacacccgcggtgtgtggttatccaagattatcggcttatcaagcgattaagcagatcgaaaccttcgaccgcggctacttcactggcatgatcggttggtgcgatgctagggggaatggcgagtgggttgtcacgatacgctgcgctgaagtgagccaaaatgagatgagtgtgttcgctggagctggcattgtgaatgaatcctcaccgcagagtgaactcgatgaaacaggggcaaaaatgagcaccattttgaaagccgctggtattgaaattgatgaattacttaccgcctaa

SEQ ID NO: 36080 - protein, 393 aa, Listonella anguillarum serovar O2
MKREVIGFSKMANQLLDEHLKESPFFFASPHNTMLGVGIAHQFNQAIPFRELADQATKMLEAAKTDEYDNPILFATIPFNEETATRFFIPEKLYVSGSPRASEKEEQQSHKATIVSPPTGNDYKQGVTTLLELFNTTELSKVVLSRLVKLSTPQHIDQTRLLRNLLSINRNGYTFSTEIGPNAKLMGASPELLLAKKGGFIVSNPLAGSRPKSNNAVQNQQRSASLLDTQKDLNEHAFVVEEVEKVLSRYCHNLFTPMVPSVIETETMLHLSTVLEGQADDPMINSLRIAAELHPTPAVCGYPRLSAYQAIKQIETFDRGYFTGMIGWCDARGNGEWVVTIRCAEVSQNEMSVFAGAGIVNESSPQSELDETGAKMSTILKAAGIEIDELLTA

SEQ ID NO: 36081 - DNA, 1182 bp, Vibrio anguillarum
  CDS (1)..(1182): transl_table=11
atgaaacgtgaagttattgggttttcaaaaatggctaatcagctattggatgagcacttaaaagaatctcccttcttttttgcttcgcctcacaacaccatgcttggcgtgggaattgctcatcagttcaatcaagcgatcccattctgtaagctggcggatcaagcaacaaagatgctagaagcagcaaaaacagatgagtacgacaatcctattttatttgcgacgattccttttaatgaagagacggcgacgcgtttctttattccagaaaagctttatgtttctggtagcccacgtgccagtgaaaaagaagggcagcagagccacaaagcgaccattgtttcaccgccaacgggcaacgactacaaacaaggagtcacaaccttacttgagctgtttaataccaccgaactatcaaaagtggtgctatcacgtttagtgaaactctcgactccacaacacatcgatcaaactcgtttattgcgtattctgttgtccatcaatcgcaatggctacactttttctactgaaattggccctaacgccaagttaatgggagccagtcccgagttgttgttggcgaagaaaggcgggtttatcgtttctaaccccctagcaggctcgcgtcctaaatcaaacaatgcggtgcaaaaccaacaacgctccgcttcattacttgatacgcaaaaagatctgaatgaacatgccttcgtcgtcgaggaagtcgagaaagtactcagccgctactgccataacttatttacccctatggtcccatcagtgattgaaaccgaaacgatgctgcatttatcaacagtgcttgaaggacaagccgatgatccgatgattaactcgctgcgcattgcagcagagttacaccccacacccgcagtgtgtggttatccaagattatcggcctaccaagcgattaagcagatcgaaaccttcgaccgcggctacttcactggcatgatcggttggtgcgacgctcgggggaatggcgagtgggttgtcacgatacgctgcgcggaagtgagccaaaatgagatgagtgtgttcgctggagctggcattgtgaatgaatcctcaccgcagagtgaactcgatgaaacaggggcaaaaatgagtaccattttgaaagccgctggtattgaaattgatgaattacttaccgcctaa

SEQ ID NO: 36082 - protein, 393 aa, Vibrio anguillarum
MKREVIGFSKMANQLLDEHLKESPFFFASPHNTMLGVGIAHQFNQAIPFCKLADQATKMLEAAKTDEYDNPILFATIPFNEETATRFFIPEKLYVSGSPRASEKEGQQSHKATIVSPPTGNDYKQGVTTLLELFNTTELSKVVLSRLVKLSTPQHIDQTRLLRILLSINRNGYTFSTEIGPNAKLMGASPELLLAKKGGFIVSNPLAGSRPKSNNAVQNQQRSASLLDTQKDLNEHAFVVEEVEKVLSRYCHNLFTPMVPSVIETETMLHLSTVLEGQADDPMINSLRIAAELHPTPAVCGYPRLSAYQAIKQIETFDRGYFTGMIGWCDARGNGEWVVTIRCAEVSQNEMSVFAGAGIVNESSPQSELDETGAKMSTILKAAGIEIDELLTA

SEQ ID NO: 36083 - DNA, 1731 bp, Capsicum annuum
  CDS (1)..(1731)
atggctgtaggtgcaagacactgcaccttaaggttcatggaacaacttgaatcaacatcactcatgaaatgctccctttcctcttcacctctatatcaaaagcaatatgttcacttcttcaactctagccaaagatatagtcagtgttgttcattgtcgatgaatggatgccaaggcgatccaagagctcctattggaaccattgaaactcgaacgttgcctgcagtttctagtcctgcattggccatggaacgtctcaattctgccatatccgacttggttaagtccgagcctccgccttacagctctggcactattcgcctcgaggtgccaattgaagagcagatagaagcacttgaatggcttcatgcgcagaaccatctgctcctccctcgctgcttcttctccggtcgaagaccaccaactgaaatcatgtgtatcaatggaacttcttctcattctaaattggtcagtgttgctggtgttggctctgctgtcttctttactcatttacgtcccttctcatttgacgattggcgtgctattagaaggttcctctccaagaaatgtccactaattcgtgcttacggggcaatccgatttgatgcaacagccaatatagcttctgaatggagtgcttttggctcattttatttcatggttcctcaggttgagtttgatgagcttgaaggaagttcaattattgctgcaacaattgcatgggataatgctgcctcatggacataccagagggcaatagatgaacttcgcgccacaatatggcagctttcctccattcttatgacagtgcagaaaaaaattcctcattcacatatactcgccagaactcatgtgccgggtaaatcatcttgggaccatgcagttaagcgtgctttgcaaataataagcagaaatgactccgtactgatcaaggtagttcttgctcgtagcaccagagttgttacagcagcagatattgatccgttaacatggctggcttgcttaaaggttgaaggagaaaatgcatatcagttctgtttgcaacctccccattcccccgcattcattggaaacactccagagcagctatttcatcgggaccgcctcagcatttgtagtgaggctttagcaggaacacgggctagaggtggatcagagcttctggatgttaagatagaacaggatttactgtccagtgctaaggaccataatgagtttgctatagtacgggagtgcataagaagaagattggaggctgtgtgttcaagcgttttaattgaaccaaagaaagcaataagaaagttttcaagagttcagcatctttatgctcgattgagggggagactccaggctgaagatgatgagtttaagattttgtcatcggtgcacccaactccagcagtttgtgggtatcctacagaagatgcacgggcttttatttcagaaactgaaatgtttgaccgaggaatgtatgctggtcttgttggttggtttggaggggaagagagtgaatttgctgttggaataaggtcagctttggttgaaaagggtcttggtgcattaatttatgcggggactggaatagtggagggaagtgattcatctctagaatgggaagagctagagctgaagacttcacagttcaccaagttgatgaaacttgaggcacctcttgtgactagaggacaacgtaggattatcaatcagaatcagaaagttcaaagagcctga

SEQ ID NO: 36084 - protein, 576 aa, Capsicum annuum
MAVGARHCTLRFMEQLESTSLMKCSLSSSPLYQKQYVHFFNSSQRYSQCCSLSMNGCQGDPRAPIGTIETRTLPAVSSPALAMERLNSAISDLVKSEPPPYSSGTIRLEVPIEEQIEALEWLHAQNHLLLPRCFFSGRRPPTEIMCINGTSSHSKLVSVAGVGSAVFFTHLRPFSFDDWRAIRRFLSKKCPLIRAYGAIRFDATANIASEWSAFGSFYFMVPQVEFDELEGSSIIAATIAWDNAASWTYQRAIDELRATIWQLSSILMTVQKKIPHSHILARTHVPGKSSWDHAVKRALQIISRNDSVLIKVVLARSTRVVTAADIDPLTWLACLKVEGENAYQFCLQPPHSPAFIGNTPEQLFHRDRLSICSEALAGTRARGGSELLDVKIEQDLLSSAKDHNEFAIVRECIRRRLEAVCSSVLIEPKKAIRKFSRVQHLYARLRGRLQAEDDEFKILSSVHPTPAVCGYPTEDARAFISETEMFDRGMYAGLVGWFGGEESEFAVGIRSALVEKGLGALIYAGTGIVEGSDSSLEWEELELKTSQFTKLMKLEAPLVTRGQRRIINQNQKVQRA

SEQ ID NO: 36085 - DNA, 1182 bp, Vibrio anguillarum
  CDS (1)..(1182): transl_table=11
atgaagcgtgaagttgtcgggttttcaaaaatggctaatcagctattggatgagcacttaaaagaatctcccttcttttttgcttcgcctcacaacaccatgcttggcgtgggaattgctcatcagttcaatcaagcgatcccattctgtaagctggcggatcaagcaacaaagatgctagaagcagcaaaaacagatgagtacgacaatcctattttatttgcgacgattccttttaatgaagagacggcgacgcgtttctttattccagaaaagctttatgtttctggtagcccacgtgccagtgaaaaagaagggcagcagagccacaaagcgaccattgtttcaccgccaacgggcaacgactaccaaaaaggagtcacaaccttacttgagctgtttaataccaccgaactatcaaaagtggtgctatcacgtttagtgaaactctcgactccacaacacatcgatcaaactcgtttattgcgtaatctgttgtccatcaatcgcaatggctacactttttctactgaaattggccctaacgccaagttaatgggagccagtcccgagttgttgttggcgaagaaaggcgggtttatcgtttctaaccccctagcaggctcgcgtcctaaatcaaacaatgcggtgcaaaaccaacaacgctccgcttcattacttgatacgcaaaaagatctgaatgaacatgccttcgtcgtcgaggaagtcgagaaagtactcagccgctactgccataacttatttacccctatggtcccatcagtgattgaaaccgaaacgatgctgcatttatcaacagtgcttgaaggacaagccgatgatccgatgattaactcgctgcgcattgcagcagagttacaccccacacccgcagtgtgtggttatccaagattatcggcttaccaagcgattaagcagatcgaaaccttcgaccgcggctacttcactggcatggtcggttggtgcgacgctcgggggaatggcgagtgggttgtcacgatacgctgcgcggaagtgagccaaaatgagatgagtgtgttcgctggagctggcattgtgaatgaatcctcaccgcagagtgaactcgatgaaacaggggcaaaaatgagtaccattttgaaagccgctggtattgaaattgatgaattacttaccgcctaa

SEQ ID NO: 36086 - protein, 393 aa, Vibrio anguillarum
MKREVVGFSKMANQLLDEHLKESPFFFASPHNTMLGVGIAHQFNQAIPFCKLADQATKMLEAAKTDEYDNPILFATIPFNEETATRFFIPEKLYVSGSPRASEKEGQQSHKATIVSPPTGNDYQKGVTTLLELFNTTELSKVVLSRLVKLSTPQHIDQTRLLRNLLSINRNGYTFSTEIGPNAKLMGASPELLLAKKGGFIVSNPLAGSRPKSNNAVQNQQRSASLLDTQKDLNEHAFVVEEVEKVLSRYCHNLFTPMVPSVIETETMLHLSTVLEGQADDPMINSLRIAAELHPTPAVCGYPRLSAYQAIKQIETFDRGYFTGMVGWCDARGNGEWVVTIRCAEVSQNEMSVFAGAGIVNESSPQSELDETGAKMSTILKAAGIEIDELLTA

SEQ ID NO: 36087 - DNA, 1200 bp, Bacillus cereus
  CDS (1)..(1200): transl_table=11
atgaatgaacatatagctgtaaaggaattgtcagaaaaacttttagatgattataagactgaatcttcattcttttttgcttcaccaactcgaacgatattaacagaaggagagtttactacagtaaagcatcgtgaaattgaaagtttcccagagcttgtgcaaacgacattaagtaatgcgaaacaagctggaaatccaaatcctatcgttgtgggtgctttgccatttgatcgtagaaaagaagtccaactcatcgtaccagaatatagcagaatttctgagcggttacaattggatacaacaaatcagcttgaaacaaatgagaacgcaacatttgaaatgatgccaatgccagaccctgaagtttatatgaatggtgtgaagcaaggaattgaaaaaatacaggacggtgatttaaagaaaatcgttctatccagatcgttagatgttaaatcttccgaaaagattgataagcaaaaacttctgcgagaattagcagagcataataagcatggttatacatttgctgtgaatttaccgaaagatgaaaaggagaacggtaaaacgctaattggagcaagccctgaattacttatttcacgtaatggtatgcaagttatttctaacccgttagctggttcaaggccacgtagtgaggacccagtagaagataaaagaagagcagaggaattactttcttctccaaaagatttacatgaacatgcggtagtagtggaagcggttgccgctgcacttcgtccgtattgtcatacattacatgttccagaaaagccatcagttattcatagtgaagcgatgtggcatttgtctacagaagtgaaaggtgaacttaaggatccaaatacttcttctttacaattagcaattgcccttcatcctacgccagcagtttgcggaactccgatggaaaaagcaagagaggctatacagcatattgagccatttgaccgcgagttctttacaggaatgctaggatggagcgatttaaatggagatggagaatggattgttacaattcgttgtgctgaagtacaagaaaatacacttcgtttatatgcaggagctggagttgttgctgagtcaaaaccagaagatgagttagcagaaacatcagctaagttccaaacaatgctaaaagctttagggttaagagatagttcacttaatgaaaaatag

SEQ ID NO: 36088 - protein, 399 aa, Bacillus cereus
MNEHIAVKELSEKLLDDYKTESSFFFASPTRTILTEGEFTTVKHREIESFPELVQTTLSNAKQAGNPNPIVVGALPFDRRKEVQLIVPEYSRISERLQLDTTNQLETNENATFEMMPMPDPEVYMNGVKQGIEKIQDGDLKKIVLSRSLDVKSSEKIDKQKLLRELAEHNKHGYTFAVNLPKDEKENGKTLIGASPELLISRNGMQVISNPLAGSRPRSEDPVEDKRRAEELLSSPKDLHEHAVVVEAVAAALRPYCHTLHVPEKPSVIHSEAMWHLSTEVKGELKDPNTSSLQLAIALHPTPAVCGTPMEKAREAIQHIEPFDREFFTGMLGWSDLNGDGEWIVTIRCAEVQENTLRLYAGAGVVAESKPEDELAETSAKFQTMLKALGLRDSSLNEK

SEQ ID NO: 36089 - DNA, 1170 bp, Acinetobacter baumannii
  CDS (1)..(1170): transl_table=11
atgatgcagactcaaatatcagtagagcaaaatttagatcatatcggtcaaaagaaattttcatgtttttctacgaagaattattatcttgaggtcaacgaattcgttaaaacgttaaatacacctgcagcaaataccgcactattgaatgaagagattgcaaaatgctttgaagaaattaaaaagcaaggccatcaaaatccagttttaattggtgctataccttttgatattacaaagaaaagtagcttaaatttttatgctgatcataaaaaaataacacaagcatcttctacgattaactcattaaaaaatcgtaataacattgagataattaataaatcattactcattcaacgccaaaaatttgaaggtacagtacagttagcattagatgcttttgagaaaaagaaggtagaaaaagttgttctttctcaggctgttgaatatgagttcaaccgtcatcaagagccagaaaacttattggctgctttattaaaacaaaatccaaatgcttataattttgtgattccagtagaacataataattatattctaggcgcaagcccagaactgcttttatcaaaacaaggtcgtattgtaaccagtaatcctttggccggttctagacccaaatctcagatttccgaaaaaaatttcgtcagccaacaagaattaaatcattctgagaaagaccaacatgaacatcgaattgtggttgaaaatattattagaaatttagccactcattgtgtagagcttaaggtttctgaatttccagatattttagaaacatcaacaatgttgcatttatcatcagaattccaaggtgtgcttaagcaacaagctcccgatgccttaaaccttgcattagaattacatccaacaccagcagtttgtggctcaccaactcatgttgctaagcagtttattttagatcatgaaggttatgaccgacattattacacggggttagtcggctggatggatgcggagggtaatggtgagtgggtagtgacaattcgatgtggtctactcagtgaaaataaaatgcgcttatatgctggtgcggggattgttgaagggtcagatgctgaagctgaatggctagaaacagaagctaaaatgcaaaccatgctaaatattctaaatacaaaagttgctgtgtaa

SEQ ID NO: 36090 - protein, 389 aa, Acinetobacter baumannii
MMQTQISVEQNLDHIGQKKFSCFSTKNYYLEVNEFVKTLNTPAANTALLNEEIAKCFEEIKKQGHQNPVLIGAIPFDITKKSSLNFYADHKKITQASSTINSLKNRNNIEIINKSLLIQRQKFEGTVQLALDAFEKKKVEKVVLSQAVEYEFNRHQEPENLLAALLKQNPNAYNFVIPVEHNNYILGASPELLLSKQGRIVTSNPLAGSRPKSQISEKNFVSQQELNHSEKDQHEHRIVVENIIRNLATHCVELKVSEFPDILETSTMLHLSSEFQGVLKQQAPDALNLALELHPTPAVCGSPTHVAKQFILDHEGYDRHYYTGLVGWMDAEGNGEWVVTIRCGLLSENKMRLYAGAGIVEGSDAEAEWLETEAKMQTMLNILNTKVAV

SEQ ID NO: 36091 - DNA, 1224 bp, Acinetobacter baumannii
  CDS (1)..(1224): transl_table=11
atgtcggtacagcatccgtattttatccaacgagaaaattttactgaaagcagaattacactcgcaaaagaagttttaaattgcactgataacgctggttttatatttacgactcctgaatacatcatatcgagtcatcaaaaacttaaagatattgaggttacaaaagacactcagctaaaagagtggctaaacgaagcccgtctacaattacaacaagcaattgcagatggttatagcgatgccaaggttatgggtgggttgccatttagttcatcggcagatgtcaatttaatgctaatgctagatgccaaggtttaccagaaagctttattttcacaaactgatattaatcttgatgacttaatcttaaagcaggccgattatttaccttcaggtgaacactataaacaacaggttgaatatttagtacaacaaatgcgggcacaaaagctagataaagcagtacttgcacgtattttacaacttgaatttgaagagaatcttccagtctcagatgtattttataacttggccaagcataatcctgaaggatataactatgcagtcgcaagacaccctcaaagcgaaggttggtttgttggtgcaagtcctgaactattaattgcaaagcaaaataataaaatctggagtaaacctgttgcgggcacattagcacgcgatgatgacccaattgttgaccaaaataatgcaagagctttactggcttcacaaaaagatcaacatgagcatgctcttgtcatcgaaatgattgccgatgaactcactcctttctgcaagcaactacatgtgcccaaacaaccttcacttattcgcaccaaacgtctttggcacttggcctcacacattacgggcgagcttaagcaagccgatactcatgtttttgacttaattgaacgtctacatccaacacctgcaatttgtggtgagccaagttccgtagcaaaaaatttgattcagcaacttgaaccatttaaccgtgaactattcgccggaaccatgggttgggccgatgccgaaggtaatggtgaatggtctgtgaccgtgcgctgtgctcgtatttatcaaaatattgcccgtttatttgccggtgcaggaattgtggaagcctcacgtccacaagctgaacatgctgaaactgctgcaaagttccgtactgtacttgatggcctgcacatttcaccagaccaattaccacgataa

SEQ ID NO: 36092 - protein, 407 aa, Acinetobacter baumannii
MSVQHPYFIQRENFTESRITLAKEVLNCTDNAGFIFTTPEYIISSHQKLKDIEVTKDTQLKEWLNEARLQLQQAIADGYSDAKVMGGLPFSSSADVNLMLMLDAKVYQKALFSQTDINLDDLILKQADYLPSGEHYKQQVEYLVQQMRAQKLDKAVLARILQLEFEENLPVSDVFYNLAKHNPEGYNYAVARHPQSEGWFVGASPELLIAKQNNKIWSKPVAGTLARDDDPIVDQNNARALLASQKDQHEHALVIEMIADELTPFCKQLHVPKQPSLIRTKRLWHLASHITGELKQADTHVFDLIERLHPTPAICGEPSSVAKNLIQQLEPFNRELFAGTMGWADAEGNGEWSVTVRCARIYQNIARLFAGAGIVEASRPQAEHAETAAKFRTVLDGLHISPDQLPR

SEQ ID NO: 36093 - DNA, 1227 bp, Stigmatella aurantiaca
  CDS (1)..(1227): transl_table=11
atgaccgaacgtcccatgtcgccgcagaagctggccgcgcaattgctcgagagttacgaggccggctcatcattcttctttgccacccccaagcggaccatgttggcacggggcacgttcgccaccgtgccgcacatcggcggcgcggacgcacttcagcgtctgccggagcgagtggccgcagtcctcaacaacgcgcgggaggctgcccacgacattccggtggcagtcggcgcggtgcccttcgacggttcaattcccgcccagatggtggtccccatgacgcttcagcgggcgggccccctggtattcgacaccgacgtgcccgtgcaccagcccctggcggcacgttacacggtccaacccgtgcccgagcccgcggcctacctcgacggcgtcacgcaggcattgaagctgatgcagaccggctctctgcgcaaagtggtgttgtcccgctccctgcacctgagcgccaccacgccgattgatcttccgcagttgctgcgcaacctggcccagcgcaacccctctgggtacaccttcgcggtggatctgccccccggggccacccaggccgcgggcggactcaggcgtacgctcatcggcgccagccccgaattgctggtttcacgctccggtctgcaggtcctcgccaaccccctggcgggctccgcggcacgcagtgccaatcccatcgaggatcaggagcgggcagccacgctgctcaaatcatccaaggatctccacgagcacgccgtggtcatcgaagcggtcgtggaggccatgcggccctactgcaagaagctggatgtgccctcgggcccctcgctggtcagcacgcaaaccatgtggcacctgtcgagccggatctgcggcgagttggcggacccatcgattacctcgctggcgctggcggtcgcgctgcaccccactcccgcggtgtgcggctaccccaccgagttggcccatgaggcgatcaccacgatcgagccattccagcgaggcttctacacgggcacggttggctggtgcgatgcgagtggagacggccagtgggccgtgaccatccgctgcgccgaggccgacgagcgcacgctgagactgttcgcgggggcgggcatcgtggtgggttcgaagcccgagtccgagctggccgagaccgaagccaagttccgcaccatgcttcaagcgatggggctgggccagaacgcagaggtgcagtcgtga

SEQ ID NO: 36094 - protein, 408 aa, Stigmatella aurantiaca
MTERPMSPQKLAAQLLESYEAGSSFFFATPKRTMLARGTFATVPHIGGADALQRLPERVAAVLNNAREAAHDIPVAVGAVPFDGSIPAQMVVPMTLQRAGPLVFDTDVPVHQPLAARYTVQPVPEPAAYLDGVTQALKLMQTGSLRKVVLSRSLHLSATTPIDLPQLLRNLAQRNPSGYTFAVDLPPGATQAAGGLRRTLIGASPELLVSRSGLQVLANPLAGSAARSANPIEDQERAATLLKSSKDLHEHAVVIEAVVEAMRPYCKKLDVPSGPSLVSTQTMWHLSSRICGELADPSITSLALAVALHPTPAVCGYPTELAHEAITTIEPFQRGFYTGTVGWCDASGDGQWAVTIRCAEADERTLRLFAGAGIVVGSKPESELAETEAKFRTMLQAMGLGQNAEVQS

SEQ ID NO: 36095 - DNA, 1197 bp, Bacillus subtilis
  CDS (1)..(1197): transl_table=11
atgttggatcaaaacgttataacagaaacaaaagcggagcatttgcttcatgaatatcagccgggcgcctttttcttagcgtctcctcatcgtgtactgttagcgaaaggcatatgtgaaattgtaccggaggcagacgggcaaaaccaaatggaaaccctttctggccgaattgcagaggcgttacgtcaggcaaaacaatcagggcaaagccggccgcttgttgtcggggccgttccttttgatcaagtaaaagcagcgcggctcgttgtacctgaagaagtgcgctggtcaggaccgcttcaatttgatcatgaggaaaaggaacagcaggctgggcatacataccacataaagcctgttcctgaacctgaggattataaaaatggtgttgaacaagggctggcacgcattgccgatggaacactcagcaaaatcgtcctgtccagatcgctgcatttgacatcgcctgaaccgattcagacggatgaattgcttcgccatctggctcagcataactcgcatggctacacgtttgccgcagacgtgtccagtcaggaggaaacgtctccccgcagaacattgctcggagcaagtccggagcttctcgtttcaaggatgggaacacaggtcgtttccaacccattagccggctcaagaccgcgcagtaatgatcctgttgaagaccagcgccgggcagctgaattgctttctcccgcaaaggatcttcatgagcacgcggttgtcgctgacgcggttgcggcagcgctgagacctttctgccggacgctggaggttccggagaagccttcactgatcaaaacggaaacgatgtggcacctgtccagcgtgattaagggagagctttccgacccgtctgtaaccgcacttgaattggcggcggcgctccacccgacgccagccgtctgcggaacaccgactgatcttgcaagagaagcgattctcagcattgaaccatttgaccgcggtttctttaccggcatggtcggatggtgtgacgatgccggtgacggagaatggatcgtgaccatccgttgtgcagaagcagaagaacgctcactccgcctgtatgctggagctggtgttgtggccggttcaaagcctgaggacgagcttcaggagacgtccgcaaagtttcggacaatgctgcgggcaatgggcgtggatcacatatga

SEQ ID NO: 36096 - protein, 398 aa, Bacillus subtilis
MLDQNVITETKAEHLLHEYQPGAFFLASPHRVLLAKGICEIVPEADGQNQMETLSGRIAEALRQAKQSGQSRPLVVGAVPFDQVKAARLVVPEEVRWSGPLQFDHEEKEQQAGHTYHIKPVPEPEDYKNGVEQGLARIADGTLSKIVLSRSLHLTSPEPIQTDELLRHLAQHNSHGYTFAADVSSQEETSPRRTLLGASPELLVSRMGTQVVSNPLAGSRPRSNDPVEDQRRAAELLSPAKDLHEHAVVADAVAAALRPFCRTLEVPEKPSLIKTETMWHLSSVIKGELSDPSVTALELAAALHPTPAVCGTPTDLAREAILSIEPFDRGFFTGMVGWCDDAGDGEWIVTIRCAEAEERSLRLYAGAGVVAGSKPEDELQETSAKFRTMLRAMGVDHI

SEQ ID NO: 36097 - DNA, 1710 bp, Arabidopsis thaliana
  CDS (1)..(1710)
atggcttcacttcaattttcttctcagtttctgggctcaaacactaaaacacacagctctatcatttccatctctcgtagttactctccaactccattcactagattctcccgcaagaagtatgagtcatgttcgatgtctatgaatggttgtgatggagatttcaagacgccacttggtacagtggagacaaggactatgactgctgttttatctccggcagccgccactgaaaggctaatctccgccgtctctgaactcaaatctcaacctccgtcgttttcctccggcgtcgttcggttacaggttccaattgaccagcaaatcggagcaattgattggcttcaagcccagaatgagattcagcctcgctgtttcttctctcgtcgcagtgacgttggtcgtcccgatcttcttctcgatctagctaacgagaacggaaacggaaacggaaacggaacagtgtcatctgatcgtaatctggttagcgttgctggtatcggctctgcagttttcttccgtgaccttgatcctttctctcatgacgattggagatccatcagaaggtttttgtcttcaacgtcacctctgattcgtgcctatggtggtatgcgttttgatcctaatggcaagatcgctgttgaatgggaaccttttggtgcattttacttttcagtccctcaggttgagtttaatgagtttggtggaagttcaatgttggctgcaactattgcttgggatgatgaactctcttggactctggaaaatgctattgaagcactccaggagactatgcttcaagtttcttctgttgtaatgaagttgagaaacagatctttaggagtatctgttttaagcaagaatcatgttcctaccaaaggagcttatttccctgctgtagagaaggctttagagatgattaaccagaaaagttcaccccttaacaaggttgttcttgctcgtaacagcaggataattacggataccgacattgatcccattgcttggctagcacagttacagcgtgaagggcatgatgcatatcagttctgtcttcaaccacctggtgcaccagcttttatcggaaacacgcctgagagactattccaaaggactcaattaggtgtctgcagtgaagctttggctgcaactaggcctagagctgcttctagtgctcgtgatatggagatagagcgtgacttactaaccagtccgaaagacgacctcgagttctctatcgtacgagagaatataagagaaaagttaaacggtatatgtgacagagttgttgtcaagcctcaaaaaactgtgaggaagcttgcaagagtgcaacatctatattctcaattggcagggagacttacgaaggaagatgatgagtataaaatattggctgctctgcatccaactccagctgtttgtgggcttccagcagaagaagcaaggcttttgattaaggagatagaatcattcgatagaggaatgtatgcgggacctattggattttttggtggcgaggagagtgaatttgcagtcgggatcagatcagctctagtcgaaaagggtcttggggcattgatctatgcggggacagggatagtagctggaagtgacccatcttcagagtggaatgagcttgatcttaagatatctcagttcaccaagtcaattgaatatgaagcaacaacatctctacaggcgattaattga

SEQ ID NO: 36098 - protein, 569 aa, Arabidopsis thaliana
MASLQFSSQFLGSNTKTHSSIISISRSYSPTPFTRFSRKKYESCSMSMNGCDGDFKTPLGTVETRTMTAVLSPAAATERLISAVSELKSQPPSFSSGVVRLQVPIDQQIGAIDWLQAQNEIQPRCFFSRRSDVGRPDLLLDLANENGNGNGNGTVSSDRNLVSVAGIGSAVFFRDLDPFSHDDWRSIRRFLSSTSPLIRAYGGMRFDPNGKIAVEWEPFGAFYFSVPQVEFNEFGGSSMLAATIAWDDELSWTLENAIEALQETMLQVSSVVMKLRNRSLGVSVLSKNHVPTKGAYFPAVEKALEMINQKSSPLNKVVLARNSRIITDTDIDPIAWLAQLQREGHDAYQFCLQPPGAPAFIGNTPERLFQRTQLGVCSEALAATRPRAASSARDMEIERDLLTSPKDDLEFSIVRENIREKLNGICDRVVVKPQKTVRKLARVQHLYSQLAGRLTKEDDEYKILAALHPTPAVCGLPAEEARLLIKEIESFDRGMYAGPIGFFGGEESEFAVGIRSALVEKGLGALIYAGTGIVAGSDPSSEWNELDLKISQFTKSIEYEATTSLQAIN

SEQ ID NO: 36099 - DNA, 1743 bp, Catharanthus roseus
  CDS (1)..(1743)
atggcatctatcacagggcattgtgttgctcatttcacagacctttcaaccaggaaatcttcttttttctctaattctaataataactcttccctttttagaagaaagtctacaaatatagtcaccagaaaaaaatatatattttgttctacatcattgtccatgaatggttgcaatggtgatccaagagctccggttggaactatagaaacgaggacacttccggcggtttcgacgccggcattggccatggaacgtcttagctccgccgtggctaacttgaaatcaactctaccttctgctcaatcagggatcatccgtcttgaggtaccaattgaagaacatatagaagcactagactggcttcattcgcaagaccaaaaaaaccttcttccccgttgctatttctctggtagaagtcaagttaccttctctgatttcacatctaacgaccttacaaatagaaatgggagtgccgccaatggacatcttcaacgaatttctacttcatctgatgataagaatctggtcagtgttgctggtgtcggttctgcagtcctcttccggagcccaaatccattttcttttgatgattggctctcaattaagaggtttttgtccaagaactgcccattaatccgtgcttatggagcaattcgctttgatgcaaggcctcatatagcaccagagtggaaggcttttggctcattttacttcgtggttcctcaggttgagtttgatgagctacatggaagttccatgattgctgcaacagttgcatgggataatgctctctctttgacatatcaacaagcaatagttgcacttcaaacaacaatggagcaggtttcctctaccgtctccaaactaagacaagatgtctctcatacttctttggtgagcaaggctaatattcctgatagaacatcctgggatcttactcttaaccgagttttggaagaaataggcaacaaatattcgccattgacaaaggttgtacttgcacgtcgtagtcaagttatcacaacatcagatattgatcctttggcttggctgagtagtttcaaggctgatgggaaagatgcttaccaattttgccttcagcctcatgaagcaccagcattcattggaaacactccagagcaactatttggccgggaccagctaaccgtttttagtgaggctttggctgcaacccgagccaggggtgaatcagattcgttagatcttcagatggcacatgatctcttttccagtcccaaggataaccacgagtttgccatagtacgagagaacatcagacagaaactagatgccatttgtactagtgtagaaactgaaccaatgaagtcagtaagaaagcttaagagaattcaacatctttatgctcgatttgcaggcagattacgctctgaagatgatgagttcaagattttgtcttcccttcatcctactccagctgtttgtgggtttcctatggaagatgcacggaaatttattgcggaaaatgaaatgtttgaccgaggattatacgctggccctgttggtttctttggaggagctcagagtgatttttctgttggaataagatctgccttgattggaaaggatgccggtgcattaatatatgcggggcttggggttgtagaaggaagtgatccagctctagaatggcaggaactagagctcaaggcatcgcagtttatgaagttgatgaaattagaggcacctgctttgaagtga

SEQ ID NO: 36100 - protein, 580 aa, Catharanthus roseus
MASITGHCVAHFTDLSTRKSSFFSNSNNNSSLFRRKSTNIVTRKKYIFCSTSLSMNGCNGDPRAPVGTIETRTLPAVSTPALAMERLSSAVANLKSTLPSAQSGIIRLEVPIEEHIEALDWLHSQDQKNLLPRCYFSGRSQVTFSDFTSNDLTNRNGSAANGHLQRISTSSDDKNLVSVAGVGSAVLFRSPNPFSFDDWLSIKRFLSKNCPLIRAYGAIRFDARPHIAPEWKAFGSFYFVVPQVEFDELHGSSMIAATVAWDNALSLTYQQAIVALQTTMEQVSSTVSKLRQDVSHTSLVSKANIPDRTSWDLTLNRVLEEIGNKYSPLTKVVLARRSQVITTSDIDPLAWLSSFKADGKDAYQFCLQPHEAPAFIGNTPEQLFGRDQLTVFSEALAATRARGESDSLDLQMAHDLFSSPKDNHEFAIVRENIRQKLDAICTSVETEPMKSVRKLKRIQHLYARFAGRLRSEDDEFKILSSLHPTPAVCGFPMEDARKFIAENEMFDRGLYAGPVGFFGGAQSDFSVGIRSALIGKDAGALIYAGLGVVEGSDPALEWQELELKASQFMKLMKLEAPALK

SEQ ID NO: 36101 - DNA, 1431 bp, Pseudomonas aeruginosa
  CDS (1)..(1431): transl_table=11
atgagccggctggcgcccctgagccagtgcctgcacgccttgcgcggcaccttcgagcgcgccatcggccaggcgcaggcgctcgatcgtccggtgctggtggcggcatcgttcgagatcgacccattggacccgctgcaggtattcggtgcctgggacgaccggcaaacgccctgcctgtactgggaacagcccgagctggcgttcttcgcctggggctgcgccctggagctgcaaggccacggcgaacagcgcttcgcccggatcgaggaaaactggcaattgctctgcgccgacgccgtggtcgagggcccgctggcgccgcgcctgtgcggcggattccgcttcgatccgcgcggcccgcgcgaggaacactggcaagccttcgccgatgccagcctgatgctcgccggcatcaccgtgctgcgcgagggcgaacgctaccgggtactctgccaacacctggccaagcccggcgaagatgccctggccctggccgcctaccactgctcggcgctactgcgcctgaggcagccggccagacgccggccctcggggccgaccgctggcgcgcagggcgacgcttcggcgcaggagcgcaggcaatgggaagccaaggtgagcgacgcggtaagcagtgtccgccagggacgcttcggcaaggtcgtgctggcccgcacccaggcccggcctctcggcgacatcgagccgtggcaggtcatcgaacacctgcgtctgcaacatgccgacgcccagctgttcgcctgtcgccgcggcaacgcctgcttcctcggcgcctccccggaacgcctggtccgcattcgcgccggcgaggcactcacccatgccctggccgggaccatcgcccgcggcggcgatgcccaggaagatgcgcggctcggacaggccctgctggacagcgccaaggacaggcacgaacaccagttggtggtggaggcgatccgtacggccctggaacccttcagcgaggtgctggaaatccccgatgcgcccggcctgaaacgactggcgcgagtccagcacctgaacacgccgatccgcgcccgcctcgctgacgcaggcggcatcctgcggctgctacaagcgctgcatccgacccccgcggtgggcggctacccacgcagcgcggcgctggactacatccgccagcacgaagggatggaccgcggctggtacgccgcgccgctgggctggctcgacggcgaaggcaacggcgatttcctggtggcgctgcgctcggccctgctcacgccgggccggggctacctgttcgccggctgcggtctggtaggcgattcggaaccggcccacgagtatcgcgaaacctgccttaagctcagtgccatgcgggaagctctatccgccataggcggcctggacgaagtgcccttgcagcgcggcgtcgcctga

SEQ ID NO: 36102 - protein, 476 aa, Pseudomonas aeruginosa
MSRLAPLSQCLHALRGTFERAIGQAQALDRPVLVAASFEIDPLDPLQVFGAWDDRQTPCLYWEQPELAFFAWGCALELQGHGEQRFARIEENWQLLCADAVVEGPLAPRLCGGFRFDPRGPREEHWQAFADASLMLAGITVLREGERYRVLCQHLAKPGEDALALAAYHCSALLRLRQPARRRPSGPTAGAQGDASAQERRQWEAKVSDAVSSVRQGRFGKVVLARTQARPLGDIEPWQVIEHLRLQHADAQLFACRRGNACFLGASPERLVRIRAGEALTHALAGTIARGGDAQEDARLGQALLDSAKDRHEHQLVVEAIRTALEPFSEVLEIPDAPGLKRLARVQHLNTPIRARLADAGGILRLLQALHPTPAVGGYPRSAALDYIRQHEGMDRGWYAAPLGWLDGEGNGDFLVALRSALLTPGRGYLFAGCGLVGDSEPAHEYRETCLKLSAMREALSAIGGLDEVPLQRGVA

SEQ ID NO: 36103 - DNA, 1188 bp, Vibrio cholerae
  CDS (1)..(1188): transl_table=11
atggtcatgaagcgtgaagtggtcggatacaccactatgtctgaacatctgatcgacacccaactcactcgctcaccgtttttctttgcctcagcaaaccagtcaatgctcggttgtggggtcgctcatgcttttcagcaagccattccttttgctgaactggctaaccaagccaaacagcttttgcagcaggccaaacgtgatgagtgcgacaatccattactgtttggcatagtgccgtttgaccctaaaacaccgactcgatttatgattccgcgcaccttatacgtgtcgagtagcccgcgcttaaaccgtccagctcacctcacccgccaagtggctaaactcatctcctcgccatcaggagagcaatacaagcaaggtgtaagccatctgctcaacatgtttcatcactctgggctgtctaaagtggtgctgtcgcgcgccattgaaattgccaccgagcaagagatagcactaccgaccttgctgcgtagtctgctcgccattaatcatcacggctatacttttgcggccagcttggacgagcagagaaagctgattggtgcaagccctgaactcttggtcgccaaacgcggaaactatctcatctcaaacccactggctggctcgcgcccgagaagtcaagatgcccaagaaaatgcgcagcgccgtgcctcactgctcaataccgccaaagatttgcatgagcacggtttagtcgtcgaagaagtcgagcggatcatgagccgctactgtcgtaacttgtacacccccatggtgccttctgtgattgaaaccgaaaccatgctgcacctctcaaccctacttgaaggacaagtcagcgatcctgaggtttgtgctttgcaagtcgccgccgatttacaccccactccagccgtatgcggttttccgcgcgaatcggcttatcaagcaataagagagctggaagaatttgatcgtggctacttcactggcatggtcggttggtgtgatgcacgtggcaatggtgagtgggtagtcaccattcgctgtgctgaagtgggatctcaccaaatgaagctttttgctggcgcagggattgtcgatgagtcgttaccacaaagtgaactggaagagacgggcgcgaagatgaaaaccatcttggctgcggcaggtattgagctcaacgatgtgctcaccgcttaa

SEQ ID NO: 36104 - protein, 395 aa, Vibrio cholerae
MVMKREVVGYTTMSEHLIDTQLTRSPFFFASANQSMLGCGVAHAFQQAIPFAELANQAKQLLQQAKRDECDNPLLFGIVPFDPKTPTRFMIPRTLYVSSSPRLNRPAHLTRQVAKLISSPSGEQYKQGVSHLLNMFHHSGLSKVVLSRAIEIATEQEIALPTLLRSLLAINHHGYTFAASLDEQRKLIGASPELLVAKRGNYLISNPLAGSRPRSQDAQENAQRRASLLNTAKDLHEHGLVVEEVERIMSRYCRNLYTPMVPSVIETETMLHLSTLLEGQVSDPEVCALQVAADLHPTPAVCGFPRESAYQAIRELEEFDRGYFTGMVGWCDARGNGEWVVTIRCAEVGSHQMKLFAGAGIVDESLPQSELEETGAKMKTILAAAGIELNDVLTA

SEQ ID NO: 36105 - DNA, 22 bp, Artificial sequence
  primer
atggatacgtcactggctgagg

SEQ ID NO: 36106 - DNA, 26 bp, Artificial sequence
  primer
ttaatgcaatccaaaaacgttcaaca

SEQ ID NO: 36107 - protein, 247 aa, Artificial sequence
  consensus sequence
  Variant (2)..(2): Xaa in position 2 is any amino acid
  Variant (5)..(5): Xaa in position 5 is any amino acid
  Variant (7)..(20): Xaa in position 7 to 20 is any amino acid
  Variant (21)..(21): Xaa in position 21 is any or no amino acid
  Variant (23)..(24): Xaa in position 23 to 24 is any amino acid
  Variant (26)..(34): Xaa in position 26 to 34 is any amino acid
  Variant (36)..(41): Xaa in position 36 to 41 is any amino acid
  Variant (42)..(55): Xaa in position 42 to 55 is any or no amino acid
  Variant (57)..(58): Xaa in position 57 to 58 is any amino acid
  Variant (61)..(61): Xaa in position 61 is any amino acid
  Variant (63)..(74): Xaa in position 63 to 74 is any amino acid
  Variant (78)..(80): Xaa in position 78 to 80 is any amino acid
  Variant (82)..(86): Xaa in position 82 to 86 is any amino acid
  Variant (87)..(94): Xaa in position 87 to 94 is any or no amino acid
  Variant (96)..(97): Xaa in position 96 to 97 is any amino acid
  Variant (99)..(99): Xaa in position 99 is any amino acid
  Variant (101)..(103): Xaa in position 101 to 103 is any amino acid
  Variant (106)..(107): Xaa in position 106 to 107 is any amino acid
  Variant (109)..(115): Xaa in position 109 to 115 is any amino acid
  Variant (117)..(127): Xaa in position 117 to 127 is any amino acid
  Variant (128)..(128): Xaa in position 128 is any or no amino acid
  Variant (130)..(138): Xaa in position 130 to 138 is any amino acid
  Variant (141)..(141): Xaa in position 141 is any amino acid
  Variant (143)..(158): Xaa in position 143 to 158 is any amino acid
  Variant (159)..(162): Xaa in position 159 to 162 is any or no amino acid
  Variant (169)..(170): Xaa in position 169 to 170 is any amino acid
  Variant (172)..(172): Xaa in position 172 is any amino acid
  Variant (174)..(176): Xaa in position 174 to 176 is any amino acid
  Variant (178)..(180): Xaa in position 178 to 180 is any amino acid
  Variant (182)..(184): Xaa in position 182 to 184 is any amino acid
  Variant (186)..(187): Xaa in position 186 to 187 is any amino acid
  Variant (188)..(188): Xaa in position 188 is any or no amino acid
  Variant (190)..(193): Xaa in position 190 to 193 is any amino acid
  Variant (195)..(196): Xaa in position 195 to 196 is any amino acid
  Variant (199)..(199): Xaa in position 199 is any amino acid
  Variant (201)..(202): Xaa in position 201 to 202 is any amino acid
  Variant (204)..(204): Xaa in position 204 is any amino acid
  Variant (206)..(208): Xaa in position 206 to 208 is any amino acid
  Variant (210)..(210): Xaa in position 210 is any amino acid
  Variant (213)..(224): Xaa in position 213 to 224 is any amino acid
  Variant (225)..(226): Xaa in position 225 to 226 is any or no amino acid
  Variant (229)..(229): Xaa in position 229 is any amino acid
  Variant (231)..(231): Xaa in position 231 is any amino acid
  Variant (233)..(234): Xaa in position 233 to 234 is any amino acid
  Variant (236)..(236): Xaa in position 236 is any amino acid
  Variant (238)..(239): Xaa in position 238 to 239 is any amino acid
  Variant (241)..(242): Xaa in position 241 to 242 is any amino acid
  Variant (244)..(246): Xaa in position 244 to 246 is any amino acid
KXVLXRXXXXXXXXXXXXXXXLXXLXXXXXXXXXFXXXXXXXXXXXXXXXXXXXXGXXPEXLXXXXXXXXXXXXLAGXXXRXXXXXXXXXXXXXLXXSXKXXXEHXXVXXXXXXXLXXXXXXXXXXXXPXXXXXXXXXHLXTXXXXXXXXXXXXXXXXXXXXLHPTPAXXGXPXXXAXXXIXXXEXXXRXXXXGXXGWXDXXGXGXXXVXIRXXXXXXXXXXXXXXAGXGXVXXSXPXXEXXEXXXK

SEQ ID NO: 36108 - protein, 26 aa, Artificial sequence
  protein pattern
  Variant (2)..(4): Xaa in position 2 to 4 is any amino acid
  Variant (5)..(6): Xaa in position 5 to 6 is any or no amino acid
  Variant (8)..(8): Xaa in position 8 is any or no amino acid
  Variant (12)..(12): Xaa in position 12 is Ala or Pro
  Variant (14)..(14): Xaa in position 14 is Ile, Leu or Val
  Variant (15)..(15): Xaa in position 15 is Ala, Cys, Gly or Ser
  Variant (17)..(17): Xaa in position 17 is any amino acid
  Variant (19)..(21): Xaa in position 19 to 21 is any amino acid
  Variant (22)..(22): Xaa in position 22 is Ala or Ser
  Variant (23)..(25): Xaa in position 23 to 25 is any amino acid
  Variant (26)..(26): Xaa in position 26 is Ile or Leu
LXXXXXLXHPTXAXXGXPXXXXXXXX

SEQ ID NO: 36109 - protein, 16 aa, Artificial sequence
  protein pattern
  Variant (2)..(4): Xaa in position 2 to 4 is any or no amino acid
  Variant (6)..(7): Xaa in position 6 to 7 is any amino acid
  Variant (8)..(8): Xaa in position 8 is Phe or Tyr
  Variant (9)..(9): Xaa in position 9 is Ala, Gly, Ser or Thr
  Variant (11)..(11): Xaa in position 11 is any amino acid
  Variant (12)..(12): Xaa in position 12 is Ile, Leu or Val
  Variant (14)..(14): Xaa in position 14 is Phe, Trp or Tyr
  Variant (15)..(15): Xaa in position 15 is any amino acid
  Variant (16)..(16): Xaa in position 16 is Asp, Gly, Asn or Ser
EXXXRXXXXGXXGXXX

SEQ ID NO: 36110 - protein, 14 aa, Artificial sequence
  protein pattern
  Variant (2)..(2): Xaa in position 2 is Asp or Asn
  Variant (4)..(4): Xaa in position 4 is Asp, Glu, His or Arg
  Variant (5)..(5): Xaa in position 5 is Phe, Trp or Tyr
  Variant (6)..(6): Xaa in position 6 is any amino acid
  Variant (7)..(7): Xaa in position 7 is Ile or Val
  Variant (8)..(8): Xaa in position 8 is Ala, Gly, Ser, Thr or Val
  Variant (9)..(9): Xaa in position 9 is Ile, Leu or Val
  Variant (11)..(11): Xaa in position 11 is Cys or Ser
  Variant (12)..(12): Xaa in position 12 is Ala or Gly
  Variant (13)..(13): Xaa in position 13 is any amino acid
  Variant (14)..(14): Xaa in position 14 is Ala, Ile, Leu or Val
GXGXXXXXXRXXXX

SEQ ID NO: 36111 - protein, 14 aa, Artificial sequence
  protein pattern
  Variant (3)..(3): Xaa in position 3 is Ala, Cys or Gly
  Variant (5)..(5): Xaa in position 5 is Ile, Leu or Val
  Variant (7)..(7): Xaa in position 7 is any amino acid
  Variant (8)..(8): Xaa in position 8 is Ala, Asp, Glu or Gly
  Variant (10)..(10): Xaa in position 10 is any amino acid
  Variant (11)..(11): Xaa in position 11 is Ala or Pro
  Variant (12)..(13): Xaa in position 12 to 13 is any amino acid
AGXGXVXXSXXXXE

SEQ ID NO: 36112 - protein, 18 aa, Artificial sequence
  protein pattern
  Variant (2)..(3): Xaa in position 2 to 3 is any amino acid
  Variant (4)..(4): Xaa in position 4 is Asp, Asn, Ser or Thr
  Variant (5)..(5): Xaa in position 5 is any amino acid
  Variant (7)..(7): Xaa in position 7 is Asp, Glu or Asn
  Variant (8)..(9): Xaa in position 8 to 9 is any amino acid
  Variant (12)..(13): Xaa in position 12 to 13 is any amino acid
  Variant (15)..(15): Xaa in position 15 is any amino acid
  Variant (16)..(16): Xaa in position 16 is Ala, Asp, Glu, Asn or Gln
  Variant (17)..(17): Xaa in position 17 is any amino acid
  Variant (18)..(18): Xaa in position 18 is Ile, Leu, Met or Val
LXXXXKXXXEHXXVXXXX

SEQ ID NO: 36113 - protein, 18 aa, Artificial sequence
  protein pattern
  Variant (2)..(2): Xaa in position 2 is Asp, Glu, Gly, Gln, Ser or Thr
  Variant (3)..(3): Xaa in position 3 is Ile, Leu, Pro or Val
  Variant (4)..(8): Xaa in position 4 to 8 is any amino acid
  Variant (9)..(9): Xaa in position 9 is Ile, Leu, Met or Val
  Variant (10)..(10): Xaa in position 10 is any amino acid
  Variant (13)..(13): Xaa in position 13 is any amino acid
  Variant (14)..(14): Xaa in position 14 is Ser or Thr
  Variant (15)..(15): Xaa in position 15 is any amino acid
  Variant (16)..(16): Xaa in position 16 is Phe, Ile, Leu or Val
  Variant (17)..(17): Xaa in position 17 is any amino acid
  Variant (18)..(18): Xaa in position 18 is Ala or Gly
PXXXXXXXXXHLXXXXXX

SEQ ID NO: 36114 - DNA, 942 bp, Escherichia coli
  CDS (1)..(942): transl_table=11
atggcgcactcacactcacacacgtcctcacacctgccagaagataataatgctcgtcgcttgttgtatgctttcggcgtgactgccgggtttatgctggtagaagtcgttggtggttttctttctggttctctggcattgctggccgatgcgggtcatatgttgaccgatactgccgccctgcttttcgccctactcgccgtgcaattttcacgtcgtcctcccaccattcgccacactttcggttggctaagactgaccacgctcgcggcgtttgtgaatgccatagccctcgtggtaattaccattttgattgtctgggaggcgatagaacgcttccgcacgccgcgtccggtcgagggcggcatgatgatggcaattgccgtggctgggttgctggcaaatatactttctttctggttacttcatcacggcagcgaagagaaaaacctcaacgtacgagcagcggcactgcatgtgctcggggacctgctgggttcggttggggctattattgccgcgttgattattatctggactggctggacacctgctgaccccattctctcgatactggtgtcgcttctggttctgcgtagcgcgtggcgactgttgaaagatagcgtgaatgaattacttgaaggtgcaccggtatcgctggatatcgctgaactgaagcgtcgtatgtgccgggaaatcccggaagtccgcaatgtgcaccatgtacatgtatggatggtaggcgagaagccggtgatgacgttgcatgtgcaggtgatcccgccacacgatcacgatgccttgttggatcagatccaacactacctgatggatcactatcagattgagcacgccaccattcagatggaatatcaaccttgtcatgggccagactgccacctgaatgaaggggtgtctggccattcacatcatcaccattaa

SEQ ID NO: 36115 - protein, 313 aa, Escherichia coli
MAHSHSHTSSHLPEDNNARRLLYAFGVTAGFMLVEVVGGFLSGSLALLADAGHMLTDTAALLFALLAVQFSRRPPTIRHTFGWLRLTTLAAFVNAIALVVITILIVWEAIERFRTPRPVEGGMMMAIAVAGLLANILSFWLLHHGSEEKNLNVRAAALHVLGDLLGSVGAIIAALIIIWTGWTPADPILSILVSLLVLRSAWRLLKDSVNELLEGAPVSLDIAELKRRMCREIPEVRNVHHVHVWMVGEKPVMTLHVQVIPPHDHDALLDQIQHYLMDHYQIEHATIQMEYQPCHGPDCHLNEGVSGHSHHHH

SEQ ID NO: 36116 - DNA, 912 bp, Listeria monocytogenes
  CDS (1)..(912): transl_table=11
atggcacataaccacgatcatgctcatggacacaatcataatcatgcgcataatgccaacaaaaaatcattatttatcagttttattctaattgctacatttatggtagtcgaagttattggtggaattatgaccaatagtttggcgctactttctgatgcggggcacatgctctctgacgccgtggcgctcggtttaagtttagctgcattcaaatttggcgaaaaagcagcgagctccgataaaacatatggctataaacgatttgaaattttagcagcatttcttaatgggttaacgctcgttgggatttctgtttttatattctatgaagcaattggtcgtttctttgatccgccacaagtcattggagcgggaatgatgaccatttcagttatcggattgcttattaatattttagtcgcttggattttaatgaaaggtgacactagcgagaatttgaatatgcgtagtgcgttcttgcatgtgcttggagatttgcttggctctgttggtgcgattattgccgcgttactcattattttcctcggctggaatatcgccgatccaatcgccagtgttatcgttgcagcgcttatcttagttagtggctggcgcgtgctgaaagatgctattcatattttgatggaaggaaagccagcgaatgtggatacagaagaaatcaaaacgtttttccagcaacaagacggtgtgaaggaagtacatgatttacatgtatgggcgattacttctgatttcaatgctctttcagctcatttgaccgtatgcgaagatgccgaccgagataaaattttggcagatattgagcattatttgcaagaaaatttctctttagaacatagtacgattcaacttgaaggaaatcacgctcaccatcatcactgcaattaa

SEQ ID NO: 36117 - protein, 303 aa, Listeria monocytogenes
MAHNHDHAHGHNHNHAHNANKKSLFISFILIATFMVVEVIGGIMTNSLALLSDAGHMLSDAVALGLSLAAFKFGEKAASSDKTYGYKRFEILAAFLNGLTLVGISVFIFYEAIGRFFDPPQVIGAGMMTISVIGLLINILVAWILMKGDTSENLNMRSAFLHVLGDLLGSVGAIIAALLIIFLGWNIADPIASVIVAALILVSGWRVLKDAIHILMEGKPANVDTEEIKTFFQQQDGVKEVHDLHVWAITSDFNALSAHLTVCEDADRDKILADIEHYLQENFSLEHSTIQLEGNHAHHHHCN

SEQ ID NO: 36118 - DNA, 1029 bp, Staphylococcus epidermidis
  CDS (1)..(1029): transl_table=11
atgatatacacgtttcaactttacttaaacaagccattcaccactccaaacatcctagtgaaggtggaatttctaatgacaaatcataatcatcaacatcatcattctcatgcacacggacacgttcatacagataataaaaaggtactcatgttttctttcattatcattagtctcttcatgcttgtagaaattataggtgggtttttagcaaatagtctagcattattgtctgatggttttcacatgctaagtgacgctatatccttaggagtagctcttatagcttttatatatgctgaaaagcatgctacaaaaagtaaaacatatggttacaagcgttttgagattttagcagcacttttcaatggagttaccctatttatcatcagtattattataataatcgaagcgatacgaagatttttagaacctcctgaggttcaatcgaaggaaatgttcatcattagtgtgattggtcttatggtaaatatcattgtagcgatacttatgtttaaaggaggagatacctctcacaaccttaatatgagaggcgcatttttacatgtacttggagacttgttcggctctgttggcgcaatcgttgcttctcttttaatttggggctttaattttacaatagcggatcctatagctagtattttagtttcgttaattattttaaaaagtgcttacggcatttctaaatcatcccttaacatattgatggaaggaacgcctaatgatatagatttaaatgctgtaattaaagcaattagtaaagatgaaagaattcaaaatgtacatgattgtcatgtatggaccatttcaaatgatatgaatgcattaagttgtcatgcagttgtaccagaatatttatcagttcaaacgtgtgaaacaatgttaaagtcaatcgaaagtgacctattgcaattaaatattcagcatatgacaatacaacttgaaacaccagaacacaaacacgatgaatcaacattgtgctcaggtatacatgaacactctcattag

SEQ ID NO: 36119 - protein, 342 aa, Staphylococcus epidermidis
MIYTFQLYLNKPFTTPNILVKVEFLMTNHNHQHHHSHAHGHVHTDNKKVLMFSFIIISLFMLVEIIGGFLANSLALLSDGFHMLSDAISLGVALIAFIYAEKHATKSKTYGYKRFEILAALFNGVTLFIISIIIIIEAIRRFLEPPEVQSKEMFIISVIGLMVNIIVAILMFKGGDTSHNLNMRGAFLHVLGDLFGSVGAIVASLLIWGFNFTIADPIASILVSLIILKSAYGISKSSLNILMEGTPNDIDLNAVIKAISKDERIQNVHDCHVWTISNDMNALSCHAVVPEYLSVQTCETMLKSIESDLLQLNIQHMTIQLETPEHKHDESTLCSGIHEHSH

SEQ ID NO: 36120 - DNA, 1098 bp, Mesorhizobium loti MAFF303099
  CDS (1)..(1098): transl_table=11
atggctcgacccggccaatttcgacggcgccggccagcagaagcgacggctcgaggattgtcgcgcagaattcggcgcttaagtccggctggggcgcatgacaggagctgccatttggcgcacacccattcccacgaccatagcgggcatgatcacgagggcgccggccatgtgcatggcgcgaccgacaagaagcgcgtgctgatcgccgcctgcctgacggcgggcttcatggtggcggaagcgcttggcggcctgttcaccgggtcgctggcgctgctggcggacgccggccacatgctggccgacgccatcgccctcggccttgcctggtatgccttccatctagccgggcggccggcgacgggccagctcacctatggttttggccgggtcaagacgctggtcgcctacaccaacggcatcgccatcttcgtcatcgcgctgtggatcgtctacgaggcctggcagcgcctgctcacaccggcgccggtgcttggcggaccgatgctggtcgtggcgatcctcggcctgctggtcaatatcggttccttcctggtgctgcatggcggcgatcgcgaaagcctcaacatgcgcggcgccatcctgcatgtgcttggcgacctgctcggctcggcggcggcgatcgtggcggcggtggtgatccttgttaccggctggacgccgatcgacccgatcctgtcggtgctggtctcgctgctgatcctgtcgacggcctggtcgctgatgcgcgccgccgcccatgtgctgctcgaaggcgtgccgccaagcctcgaccgcgacctcatcgcaacggacttggaaaccacgatccaaggcgtgcgcgaagtgcaccatatgcatgtctggtcgatcgatgggtcaagcaacatggcgacgctgcatgcctgccttgacgagggtgtcgatgcgcatcgggccgtcagcgccatcaagaagcggcttgccagcgagcacggcatcagccatgccaccgtggaaccggaattcggccaatgcgccgacgaggccggcgaccacgagcatgaacatgagcatgagcacgatgcggccgcgcatcacagccaccatcactaa

SEQ ID NO: 36121 - protein, 365 aa, Mesorhizobium loti MAFF303099
MARPGQFRRRRPAEATARGLSRRIRRLSPAGAHDRSCHLAHTHSHDHSGHDHEGAGHVHGATDKKRVLIAACLTAGFMVAEALGGLFTGSLALLADAGHMLADAIALGLAWYAFHLAGRPATGQLTYGFGRVKTLVAYTNGIAIFVIALWIVYEAWQRLLTPAPVLGGPMLVVAILGLLVNIGSFLVLHGGDRESLNMRGAILHVLGDLLGSAAAIVAAVVILVTGWTPIDPILSVLVSLLILSTAWSLMRAAAHVLLEGVPPSLDRDLIATDLETTIQGVREVHHMHVWSIDGSSNMATLHACLDEGVDAHRAVSAIKKRLASEHGISHATVEPEFGQCADEAGDHEHEHEHEHDAAAHHSHHH

SEQ ID NO: 36122 - DNA, 1299 bp, Arabidopsis thaliana
  CDS (1)..(1299)
atggtgacacccaaattacatctcgatctctctcttacaaaaaaggtatcttacttgtttgtctctagacaaacactatatcgtctttcttcctcctgtcttgcgtccttatttctctcttttgatgcgtttttaattgcaaggagttgttttttttttcagatgaaagaccatattcatgagcatgaccacatggttcagatttgtggggaagtttcatcaggagaaacaagcttggtgggcatcaagaagacatgtggagaagcgccttgcggattctcagatgccaagaccagttcaatagaagctcaagagcgtgcagcatcaatgagaaagctattaatagctgttcttctctgtgccattttcatagttgtagaagtcgttggaggaatcaaggccaacagtcttgcgattctcacagatgcagctcatctgttatctgatgttgcagcctttgcaatatctttgttctcgctctgggcttcgggatggaaggcaaaccctcagcaatcttatgggtttttcagaatagagattcttggtgctcttgtctccattcaaatgatttggcttcttgctggtatcttggtttatgaagccattgttagacttaacaacggtagtggtgaagtggagggatctcttatgtttgctgtctctgcagttggcttacttgtgaacattgcaatggctattctgttaggtcatgaccatggtcatggtcatggtcatagtcatgacaatggtcacggtcatagtcatgatcatggccatggaatagccgcaaccgagcatcatcatgactctggtcatgatgaatcacaactatctgatgtcttaatcgagcaaaagaagcagcgtaatgtaaatattcaaggggcttatcttcacgtgctgggagattcgatacagagcgtaggagtgatgataggaggagcaatcatatggtataagccggagtggaagatccttgatttgatatgcacattggttttctctgtgattgtgttagggacaacaattgggatgcttaggaacattctagaggttttaatggagtcaacaccacgagagattgacccgacaatgcttgaaaagggagtgtgtgaaattgaagaagtggtggctgttcatgagcttcacatttgggcgattactgtcggcaaacttttgttggcatgtcatgttaaaatcagacctgaggcagaggcagatatggttttggacaagattatcgattacattaagagggaacacaacattagtcacgtgactattcagatcgaacgtcaatga

SEQ ID NO: 36123 - protein, 432 aa, Arabidopsis thaliana
MVTPKLHLDLSLTKKVSYLFVSRQTLYRLSSSCLASLFLSFDAFLIARSCFFFQMKDHIHEHDHMVQICGEVSSGETSLVGIKKTCGEAPCGFSDAKTSSIEAQERAASMRKLLIAVLLCAIFIVVEVVGGIKANSLAILTDAAHLLSDVAAFAISLFSLWASGWKANPQQSYGFFRIEILGALVSIQMIWLLAGILVYEAIVRLNNGSGEVEGSLMFAVSAVGLLVNIAMAILLGHDHGHGHGHSHDNGHGHSHDHGHGIAATEHHHDSGHDESQLSDVLIEQKKQRNVNIQGAYLHVLGDSIQSVGVMIGGAIIWYKPEWKILDLICTLVFSVIVLGTTIGMLRNILEVLMESTPREIDPTMLEKGVCEIEEVVAVHELHIWAITVGKLLLACHVKIRPEAEADMVLDKIIDYIKREHNISHVTIQIERQ

SEQ ID NO: 36124 - DNA, 927 bp, Aquifex aeolicus VF5
  CDS (1)..(927): transl_table=11
atggaaagggaaaaaagcttaaaagttcttgcttttagtttcctattaatatttctctttgcttttattgaattcctcggcggactgctcacaaacagtttggctctcctctcagatgccggccacatgctcacggacgctgtatccctttctatagcactcgttgcccagtacttagctctcaaagtaaagacgaagaggacgacttacggactctacagactcgaagttctcgccgcactcgtaaacggagtcttcctcttaggacttataggctacataatcctcgaagctattcacagatttgaaaaccctgaaccagtgaaacctcagatgatatacatagcctttgcgggactgattgttaacctcgtagtgggatacatactcctgaagcattctgaagagaacataaacattaagagtgcgctgcttcacgtggcgacggacacactcggttcggttgcagcgataatagcggggatagcgatcgttttctggaagttttaccttgcggacccaattctgagcgttgctgtagcccttttaatcctgccttccgcctactcggttataaaggaaaccgtaaacgtactccttgaagttgccccttcccacattaacacggaagaactcgaaaaggaactcttgaaccttcaaggtgtaaaaggcgttcacgaccttcacgtctggtccataacacccggaacggaagtacttacggttcatgtggttgttgaagacacgagtatatgcaacgacatattgaaggaagttgaaaagatagcccacaagtacggtataaaacataccacggtacagcttgaaaaggaaggttacgcctgtgccgagtgctgtccccttctctctcctcaagggttaaagttccatcaccaccatcaccacggccacgagcacgaacactga

SEQ ID NO: 36125 - protein, 308 aa, Aquifex aeolicus VF5
MEREKSLKVLAFSFLLIFLFAFIEFLGGLLTNSLALLSDAGHMLTDAVSLSIALVAQYLALKVKTKRTTYGLYRLEVLAALVNGVFLLGLIGYIILEAIHRFENPEPVKPQMIYIAFAGLIVNLVVGYILLKHSEENINIKSALLHVATDTLGSVAAIIAGIAIVFWKFYLADPILSVAVALLILPSAYSVIKETVNVLLEVAPSHINTEELEKELLNLQGVKGVHDLHVWSITPGTEVLTVHVVVEDTSICNDILKEVEKIAHKYGIKHTTVQLEKEGYACAECCPLLSPQGLKFHHHHHHGHEHEH

SEQ ID NO: 36126 - DNA, 900 bp, Pseudomonas aeruginosa PAO1
  CDS (1)..(900): transl_table=11
atgagcgccggacacgagcacagcttcgcccagaccaactcgacccgcctgaaatgggcgttgctgctgaccggaagcttcctcgtcgccgaggtcgtcggcggcatcctcaccggcagcctggcactgatctccgatgccgcgcacatgctcaccgacgccgtggccctggccatcgccctggccgcgatcaacatcgccaggcgcccgaccaacgatcgcctgacctacggctaccaccgcttcgagatcctcgccgcggcgttcaacgccttcctcctgttcggcgtggccttctatatcctctacgcggcctacgagcggctcaaccagccggcggagatccagtccgtgggcatgctggtgatcgccgtgctcggcctgctggtgaacctggccagcatgcgcctgctggcgccggcccagggcaacagcctgaacgtcaagggcgcctacctggaggtctggagcgacatgctcggctcgctgggggtgatcgtcgccgcgatcgtgatccgtttcaccggctgggcctgggtcgactcgctggtggcggtgctgatcggtttctgggtcctgccgcgcacctggatcctgctgcgcgagagcctgcatgtgttgctcgaaggggtgccgaaggaaatccagttggccgagctgcgcgaagcgctactggggattcccggcgtgaccgggctgcacgacctgcatgtgtggtcgatcaccagcggcaagatcagcctgaccagccatctggtgtacgacccggccctggtcgatgccgaggcgctgctgggaacggtgaaggcgctgctgcacgaccgctacgagatcgaacacagcaccctgcaactggaaacctcggcctgcgcccaggccgaggagccgctggcctactga

SEQ ID NO: 36127 - protein, 299 aa, Pseudomonas aeruginosa PAO1
MSAGHEHSFAQTNSTRLKWALLLTGSFLVAEVVGGILTGSLALISDAAHMLTDAVALAIALAAINIARRPTNDRLTYGYHRFEILAAAFNAFLLFGVAFYILYAAYERLNQPAEIQSVGMLVIAVLGLLVNLASMRLLAPAQGNSLNVKGAYLEVWSDMLGSLGVIVAAIVIRFTGWAWVDSLVAVLIGFWVLPRTWILLRESLHVLLEGVPKEIQLAELREALLGIPGVTGLHDLHVWSITSGKISLTSHLVYDPALVDAEALLGTVKALLHDRYEIEHSTLQLETSACAQAEEPLAY

SEQ ID NO: 36128 - DNA, 978 bp, Deinococcus radiodurans R1
  CDS (1)..(978): transl_table=11
atgaccggtcacaaccacccgcatgagcatgacccgcaccaccatgaccgggcggacacccaggagcacggtcatgctcacggccacgcacacggacatgaccacgccgcccataatcacgccgctggcgcgggtgagcggcaactgaccggggcgctggtgctgacgggggcgttcctggtcctcgaagtcgcctacgccctgagcagccgcagcctcgcgctgctgtccgacgcggggcacatgctgaccgacgtggcggcgctcgctctggcgctttttgccattcgcatggggcgccggcccgccgatcgtcagcgcaccttcggctaccgccgcaccgaggttcttgccgccgcgctcaatgccggggcgctgttcgccatcgggctctacatcctctgggaagccgtgcaacgcttccggcagccggtggaggtgcagaccacgtccatgctggtggtggcggtcgccgggctggtcgtcaacctgctgagcgcccggctgctcgcgggcggcgagggcctcaacctgcgcgccgcttacttggaggtgctgggcgacctgctcggctctgtcgcggtcatcgcgggcgccctgctcattcgcctgaccggatggagctgggtggacccgctgctcggcgcgggcatcgggctgtgggtgctgccgcgcacctggtcgctgctcaagacgagtgtgaacgtgctgctcgaaggggtgcccgagggcctggatttggacgctctgcgcgctgaactgcgggcgctgcccggtgtgcaagacgttcacgacctgcacgtctggagcgtgaccggcggagtcgtcaacctcaccgcccacctcgtcagcgaccgtgcgcccgccgaactgctgcccgctgtccacgaggtcgcgcacggcgccggcatcgaacacgtcaccgtgcaggtggagccgccgggcctgcacgcgacggacgcagcgctgcacccctga

SEQ ID NO: 36129 - protein, 325 aa, Deinococcus radiodurans R1
MTGHNHPHEHDPHHHDRADTQEHGHAHGHAHGHDHAAHNHAAGAGERQLTGALVLTGAFLVLEVAYALSSRSLALLSDAGHMLTDVAALALALFAIRMGRRPADRQRTFGYRRTEVLAAALNAGALFAIGLYILWEAVQRFRQPVEVQTTSMLVVAVAGLVVNLLSARLLAGGEGLNLRAAYLEVLGDLLGSVAVIAGALLIRLTGWSWVDPLLGAGIGLWVLPRTWSLLKTSVNVLLEGVPEGLDLDALRAELRALPGVQDVHDLHVWSVTGGVVNLTAHLVSDRAPAELLPAVHEVAHGAGIEHVTVQVEPPGLHATDAALHP

SEQ ID NO: 36130 - DNA, 966 bp, Xylella fastidiosa 9a5c
  CDS (1)..(966): transl_table=11
gtgttatacctttcagcagatgtcgaaagtaagctacacctattgcaaatagggaggtgtcacatgggacacgaccacacgcatgtaccgaaggggatgcatcacgagcgccccttgtggtgggcgcttgggcttacggcgagtttcctagtggccgaaattattggtgcggtgctgacacgtagtttggcgttgttgtctgatgcggtgcacatggctaccgacgtgttcgcgttaatgattgcattggtcgcggtgcgtctgagtcggcgtccgcctgatgtgcgtcgtacctatggttatgcacggttagaggcgtttggtgcgttggttaacggggtattgctgtttggtgtcggcggttacattttgtgggaggctgtgcagcgcttgcgcgctccgcaggagattgtgtccagcggtatgctggtcattgccgtcttgggtttggtcatcaatctgatcgtaatgcgtttgttgcatgccggtcgtggtgagaacctcagtatgaagggggcttaccttgaggtgtggagcgatatgctcggttcggtcgctgtcatcgttgctgcgatagtgatctatgtgactggttggtattgggttgatccggtattggctgtgttgatcgggctatgggttttgccgcgcacctgggtgttgttaggtgaggccgtcaatgtgttgttggaaggggtgcctaagggatttgagttgttgcccatacgtgatgcgctcagccatcatcctggtgtggccaatgtgcatgatgtgcatctctgggcattagggtccaggatgccgttgctgacggcgcatgtggttgcactccaaggcactgcaccggataggttgcgccgcatgttgcaggagttgttgcatgagcgctttagtattgaacatgtgacgttgcaaattgagatcgagcattgtgggagtgatgcttgtgacgcgaagcgttcatag

SEQ ID NO: 36131 - protein, 321 aa, Xylella fastidiosa 9a5c
MLYLSADVESKLHLLQIGRCHMGHDHTHVPKGMHHERPLWWALGLTASFLVAEIIGAVLTRSLALLSDAVHMATDVFALMIALVAVRLSRRPPDVRRTYGYARLEAFGALVNGVLLFGVGGYILWEAVQRLRAPQEIVSSGMLVIAVLGLVINLIVMRLLHAGRGENLSMKGAYLEVWSDMLGSVAVIVAAIVIYVTGWYWVDPVLAVLIGLWVLPRTWVLLGEAVNVLLEGVPKGFELLPIRDALSHHPGVANVHDVHLWALGSRMPLLTAHVVALQGTAPDRLRRMLQELLHERFSIEHVTLQIEIEHCGSDACDAKRS

SEQ ID NO: 36132 - DNA, 912 bp, Clostridium acetobutylicum ATCC 824
  CDS (1)..(912): transl_table=11
atggagaagcacagccatgagcaccaccatcatcatgatatttcatccataagtaaaaataaactattctttgttattatatttaattttattattgcgttagcagaggttataggaggctcaatttctggaagtctttctcttatttctgatgcgctgcacaatttaagtgatactgcctcactaatattaagttatgtatctattaaaatatcagagaaaccaaaaaataaagctaaaacctatggatataaaagagcaaatattttggctgcttttataaattcagctgcgttaataggaatttcaatatttttaggagttcaggcactagaaaagcttacaagtcttaaaaaaatcaatgcaaatatagtaattgtagttgctttgattggtcttttaggaaattttcttagtgtgattattttgaaaaaaggtgcggagaaaagcttaaatgtaagatcctcttatttacatatgctaagtgatgctatggcatctttagctgtaataatttctggagtttttataaagtactttgctatttattggatagattcggttttaactatttttataaatatgctaattcttaaatcaagttataatattttaaaggaaagcatcaatattttaatgcagacaactcccgtgaaccttgatatggatgatgttaaggagcaattgttaaaaataaaagaaataaagggagtgcatcattttcatatatggactttagatgaaaacaatattgttttagaggggcatattgaaattgatgatatattggtcagcgaaactagagccattagtgataaaattgaacatatattgaatgaagattttcatataacacatgttgtgatacagtttgaaagcacaagctgtgaagataatatttgtaaaatttag

SEQ ID NO: 36133 - protein, 303 aa, Clostridium acetobutylicum ATCC 824
MEKHSHEHHHHHDISSISKNKLFFVIIFNFIIALAEVIGGSISGSLSLISDALHNLSDTASLILSYVSIKISEKPKNKAKTYGYKRANILAAFINSAALIGISIFLGVQALEKLTSLKKINANIVIVVALIGLLGNFLSVIILKKGAEKSLNVRSSYLHMLSDAMASLAVIISGVFIKYFAIYWIDSVLTIFINMLILKSSYNILKESINILMQTTPVNLDMDDVKEQLLKIKEIKGVHHFHIWTLDENNIVLEGHIEIDDILVSETRAISDKIEHILNEDFHITHVVIQFESTSCEDNICKI

SEQ ID NO: 36134 - DNA, 915 bp, Nostoc sp. PCC 7120
  CDS (1)..(915): transl_table=11
atgtctcacagtcacagtcacggacacagccacgaaccgactaattacaaccgtgccttcattattagcgttgctctcaacactggatttgttgtcattgaagtagtttatgggttagctgccaattcccttgccctacttgccgatgctggtcacaatttgagtgatgttctaggtttgttacttgcctggggagcgagcttcctcggccgtcgccaaccaacaccacgccgcacttatgggttacgtcgctcctctattttggcagctcttttgaacgctgttctcgtactcgtagcttctggcgcagttgcctgggaagccatacagcgttttgctcaacctagtccagtatcaggtagtacaattatcggcgtggctgcggtaggtattgccatcaatatgggaagtgccttaatgttcttatctggtcgtgaaagagacttgaatattaggggagcctttattcacttagttgctgacgcggcggtgtctttgggtgcagtcctggctggtattgcgattgttgctactggttggctatggtttgacccagttgtaagtttgatgatcgttgtcgtgattattgtgagtacttggcaattattccaagaatctttgaacttagtcacagatgcagtaccagcaggtattgaaccacttgcagtccgtacattcttagctgaacttcccggtgtatctagtattcatgacttgcacatctgggcgatgagtaccacagaaacagctctcactgctcacttaattatgcctgctggaaatcttagtgatgcttttttagttcaggtaaatcaacaacttcacgaccattttggtatcgaacacactacaattcacatagaaacaggcgatccaagttatccatgtcctcttgctcaagaaaacgtggtttaa

SEQ ID NO: 36135 - protein, 304 aa, Nostoc sp. PCC 7120
MSHSHSHGHSHEPTNYNRAFIISVALNTGFVVIEVVYGLAANSLALLADAGHNLSDVLGLLLAWGASFLGRRQPTPRRTYGLRRSSILAALLNAVLVLVASGAVAWEAIQRFAQPSPVSGSTIIGVAAVGIAINMGSALMFLSGRERDLNIRGAFIHLVADAAVSLGAVLAGIAIVATGWLWFDPVVSLMIVVVIIVSTWQLFQESLNLVTDAVPAGIEPLAVRTFLAELPGVSSIHDLHIWAMSTTETALTAHLIMPAGNLSDAFLVQVNQQLHDHFGIEHTTIHIETGDPSYPCPLAQENVV

SEQ ID NO: 36136 - DNA, 906 bp, Brucella melitensis 16M
  CDS (1)..(906): transl_table=11
atgggaggatgcatgggcgccgatcacgaacatgccgatgtgaagaacacgccgatttcccgattatggatcgctttcggcctgaccggcatcttcatgattgccgaagtcatcggcagctttgccaccggcagtctggcgcttctttcagacgccatgcacatggcgaccgatgcattcgccctcttgctggcgctgatcgccatctatctggggcgccgcccggccgatgttctgcgcacctatggctatgcgcggttcgagatattggcggcggcgttcaatgcgctcctgctgctgggtgttgccttctatattctctatgaagcctgggagcgcctgtccgaaccggccgatgtccagtctctcggcatgttggcggtggctatcgtcgggctggtcatgaacttcatctccatgcggatactgaccgtgcacaaggatgacagcctgaacgtcaagggcgcttatctggaagtctgggccgatatgctgggctctgtcggggtgatcgccgctgcaatcatcatctatctgactggctgggaatgggtcgattcagccatcgcggtcggtatcggcttcatggtttttccacgcacatgggttttgctcaaggaatgtatcaacattcttctggaaggtgtgccggcagggggcgacgtgaaaaagctcgaagctgcaatccttgccgtgccgggtgtcgcctccgtccacgacctccatgtctggtcgctcaccaagaccgagcactcgctgaccgcacatctcgtgctggcgcaggaagccgatggcgaaacggtgcgccgtgccgtggaacatgtgctccagaacgattatgacctgcaccacacgaccttgcagaccgaaaaagtgacctgcgcggcgaaggaactaatccattga

SEQ ID NO: 36137 - protein, 301 aa, Brucella melitensis 16M
MGGCMGADHEHADVKNTPISRLWIAFGLTGIFMIAEVIGSFATGSLALLSDAMHMATDAFALLLALIAIYLGRRPADVLRTYGYARFEILAAAFNALLLLGVAFYILYEAWERLSEPADVQSLGMLAVAIVGLVMNFISMRILTVHKDDSLNVKGAYLEVWADMLGSVGVIAAAIIIYLTGWEWVDSAIAVGIGFMVFPRTWVLLKECINILLEGVPAGGDVKKLEAAILAVPGVASVHDLHVWSLTKTEHSLTAHLVLAQEADGETVRRAVEHVLQNDYDLHHTTLQTEKVTCAAKELIH

SEQ ID NO: 36138 - DNA, 888 bp, Pyrococcus furiosus DSM 3638
  CDS (1)..(888): transl_table=11
atggaagagagtggggaaaggctcaaaagaagaatgataatttcctttgccctcaatatggggatagccttagttgaaatcattggaggcatagtttccagaagtttagccttgtttagtgattcccttcacaatttcagcgattctatgagcatactaacaagctacattgccataaaaataggagaaagagagaaaaacgagaaatatactttcgggtataaaagggccgaaattctggtcgcatttgtaaattcagcaattcttgtgggagttgcccttttcctcatagtagaagcatataagagattcaagactcctgaaccgattaatgggcctttaatgttctcagttgctttgattggctttctagctaatttgatttccgttcttctccttcacgagcattctcacgagaacatcaacgttcgttccgcctatctccatctcctaagcgataccttgtcatcagtagctgttgttctggggggtattgcaataatcaagtggaatgccatttgggttgatcctctccttagcgcgctaatctcaatttacatccttcgcgaagcttatgaaattctcaaggaaagcgttgaagtgcttatggaagcttctcctaatctagatttcaatgagataaagagggaaattgaaagcattccaggggttaagaatgctcatcactttcatgcctggagggtgggagaaaaggaggttcactttgagtgccatgttgaagttaatgacatgttgataagtgaggcccagcaaataatagatgttatcgcggagaggcttagaagatttggaataacccatgtaactgtccagcttgaggcgggaagatgtaaagaaaagggcatgatctgtgatgagggtgtttaa

SEQ ID NO: 36139 - protein, 295 aa, Pyrococcus furiosus DSM 3638
MEESGERLKRRMIISFALNMGIALVEIIGGIVSRSLALFSDSLHNFSDSMSILTSYIAIKIGEREKNEKYTFGYKRAEILVAFVNSAILVGVALFLIVEAYKRFKTPEPINGPLMFSVALIGFLANLISVLLLHEHSHENINVRSAYLHLLSDTLSSVAVVLGGIAIIKWNAIWVDPLLSALISIYILREAYEILKESVEVLMEASPNLDFNEIKREIESIPGVKNAHHFHAWRVGEKEVHFECHVEVNDMLISEAQQIIDVIAERLRRFGITHVTVQLEAGRCKEKGMICDEGV

SEQ ID NO: 36140 - DNA, 1419 bp, Drosophila melanogaster
  CDS (1)..(1419)
atgtccaggaacgaggatacaccgattgccaaacgcgactctggacggacgcgccgtagcaactatggcacggccccatcctttcacctgatggagcagggacaaccaggtgtgaacgtagtcgctggcaatggcaacaacaatcacccggcaacgcctgcaacacctgctcaaattttttgtttacacgggcggtccaacaacgtcgaagtccgggatcattgtcatcgtgcccgcagcgagggcgtggatgtgaaggctcgccgaaaactgatcattgcgagcattttgtgtctggtttttatgattgccgaaatcgtgggtggcgtcctatcgaacagcctggccatcgcaacagacgccgctcatttgctaacggatttcgccagttttatgatctcgttgtttgccatctggattgccgggcgaccatctacgcagcggatgtccttcggctggtatcgggctgaggttattggcgccatggcctccgtcttcatgatctgggtcatcacgggcatcctcgtttggctggccatcggacgactcatcagcggcgactacgaggtgaatgcgaagatcatgctgatcacatccggcctggccatattggtgaatgtcatcatgggcgttcagctgcagcatggccattcgcatggcctgggcggtgggcatggtcacagccatggtggttccaagaacgcatcccatgtgcaggccacatccacaccatgctccgattcgcccagccagcgtattgagggcggtgtggcctacgcgcccgaggatgccgaattgcctggcggcgggctgccaacgttctcctaccaaaataccaagttggtcgatcccacactggatttggaaattgctgccgttctggccgaaacggcacccggatcacatcatcacggcggaccggttggacgcgaggccgtcaacatgaatgtccgggcagccctcatccatgtgattggcgatgtcatccagagcgtgggagtttttgtcgccgctggcgtgatttacttttggccagagtactccatcgttgatcccatttgcacgtttgtgttctccatcattgtgctcttcaccacgttcacgatcatgaaggatgcgttgctggtgctcatggaggggactcccaactatatgcactacgccgaggtactgcagattttccaaggcatcgagggcgttgagcgggtgcacaatttgcgcatctgggcgctgagcattaataaagtggcgctatctgcacatttggccattgctgaaaatgcgaatccgaagaggatcctggatgcggccacatcggcggttcatttgcgctataacttctttgagaccaccatccagatcgaggactataccgcccaaatggagagctgcctgcagtgcaatgtgcccgagaagtag

SEQ ID NO: 36141 - protein, 472 aa, Drosophila melanogaster
MSRNEDTPIAKRDSGRTRRSNYGTAPSFHLMEQGQPGVNVVAGNGNNNHPATPATPAQIFCLHGRSNNVEVRDHCHRARSEGVDVKARRKLIIASILCLVFMIAEIVGGVLSNSLAIATDAAHLLTDFASFMISLFAIWIAGRPSTQRMSFGWYRAEVIGAMASVFMIWVITGILVWLAIGRLISGDYEVNAKIMLITSGLAILVNVIMGVQLQHGHSHGLGGGHGHSHGGSKNASHVQATSTPCSDSPSQRIEGGVAYAPEDAELPGGGLPTFSYQNTKLVDPTLDLEIAAVLAETAPGSHHHGGPVGREAVNMNVRAALIHVIGDVIQSVGVFVAAGVIYFWPEYSIVDPICTFVFSIIVLFTTFTIMKDALLVLMEGTPNYMHYAEVLQIFQGIEGVERVHNLRIWALSINKVALSAHLAIAENANPKRILDAATSAVHLRYNFFETTIQIEDYTAQMESCLQCNVPEK

SEQ ID NO: 36142 - DNA, 939 bp, Streptomyces coelicolor A3(2)
  CDS (1)..(939): transl_table=11
atgggggctgggcacgatcacgggcacgcgcacggggggcacgccggcgggacggcgaccgccgcgtaccggggcaggctgcgcgtggcgctgtcgatcaccctcaccgtcatggtcgtcgagatcgtcggcggtctggtcgccgactccctcgccctgatcgccgacgccgcgcacatggcgaccgatgccctgggcctcggcatggccctgctggccgtgcacttcgcgagccgaccgccgagcgaccggcgcaccttcggctacgcccgcgccgagatcctcgccgccctggccaactgcctgctgctgctcggggtcggcggttacgtcctgtacgaggcgatcgaccggttcgtcacgccggccgacaccgcggccggcccgaccgtcgtcttcggcgcgatcggtctggtggcgaacatggtgtcgctgtcgctgctgatgcgcggccagaaggagagcctgaacgtgcggggcgccttcctggaggtggcggccgacgcgctgggctccctggcggtgatcgtctcggcgctggtgatcctggccaccggctggcagcccgccgacccgatcgcgtcgctgctgatcggtctgatgatcgtgccgcgaaccttgcggttgctgcgcgagaccctggacgtgctgctcgaggcggctcccaagggcgtggacatcgcggaggtgcgcgcccacatactggccctcgacggggtcgaggacgtgcacgacctgcacgcctggaccatcacctccggcatgcccgtgctgtcggcgcacgtggtggtggacggcgaagcgctgagcgcgatcggccacgagaagatgctccacgagttgcagggctgtctgggcgaccacttcgacgtggagcactgcacgttccagctggagcccagcggtcacgcggagcacgaggcgcgactgtgccgctga

SEQ ID NO: 36143 - protein, 312 aa, Streptomyces coelicolor A3(2)
MGAGHDHGHAHGGHAGGTATAAYRGRLRVALSITLTVMVVEIVGGLVADSLALIADAAHMATDALGLGMALLAVHFASRPPSDRRTFGYARAEILAALANCLLLLGVGGYVLYEAIDRFVTPADTAAGPTVVFGAIGLVANMVSLSLLMRGQKESLNVRGAFLEVAADALGSLAVIVSALVILATGWQPADPIASLLIGLMIVPRTLRLLRETLDVLLEAAPKGVDIAEVRAHILALDGVEDVHDLHAWTITSGMPVLSAHVVVDGEALSAIGHEKMLHELQGCLGDHFDVEHCTFQLEPSGHAEHEARLCR

SEQ ID NO: 36144 - DNA, 966 bp, Xanthomonas axonopodis pv. citri str. 306
  CDS (1)..(966): transl_table=11
atgggacacgaccacaaccacgcacccagcgaaatccgtcacgaagcgcccttgtggtgggcactggggctgaccgccaccttcctgctggcagagatcgtcggcgcattcgtgaccaacagcctggcgctgctgtccgacgctgcgcatatggccaccgacaccgtcggactgatgattgcgctggtcgcggtgcgcctgagccgtcgcccggccgacgcgcgtcgcacctatggctatgtgcggctcgaagcgcttggcgcattggccaacggcgcgctgctgttcgcagtcggcgcctatatcttgtgggaagccgcgcagcgctttcgcgcaccgcaggacatctcttccagcggcatgctgttgatcgccggcttcggcctggtgatcaatctggtcgcgatgaagctgctgcacgccggcagcggcgaaagcctcaacgtcaagggtgcctatctggaggtgtggagcgacatgctcggctcggtggcggtgatcgtcggtgccttgctgatccgctggaccggctggcaatggatcgacccggtgttggccgtgctgatcggcctgtgggtattgccgcgcacctgggtgctgctgcgcgaggcgatcaacgtgttgcttgaaggcgtgcccaaggggatcgacctggcccaggtgcagcaggcgctgaccagccaccctggcgtcgaagacgtgcacgacctgcatgtgtgggcattggcctccagcacgccggcgctcaccgcgcacatcgtggtcaacgaggccaccgaccgcgaccgtctgcgtgacgcgctcggcgccctgttgcatgagcgcttcgatatcgcccacgtcaccttgcaggtggaaagtggcgactgcggtactgagccttgcggcacaccaaagccggctgcagacgctggccatgacgcgcaccatgagcacggtcatgcgcacgggcattcccatcattaa

SEQ ID NO: 36145 - protein, 321 aa, Xanthomonas axonopodis pv. citri str. 306
MGHDHNHAPSEIRHEAPLWWALGLTATFLLAEIVGAFVTNSLALLSDAAHMATDTVGLMIALVAVRLSRRPADARRTYGYVRLEALGALANGALLFAVGAYILWEAAQRFRAPQDISSSGMLLIAGFGLVINLVAMKLLHAGSGESLNVKGAYLEVWSDMLGSVAVIVGALLIRWTGWQWIDPVLAVLIGLWVLPRTWVLLREAINVLLEGVPKGIDLAQVQQALTSHPGVEDVHDLHVWALASSTPALTAHIVVNEATDRDRLRDALGALLHERFDIAHVTLQVESGDCGTEPCGTPKPAADAGHDAHHEHGHAHGHSHH

SEQ ID NO: 36146 - DNA, 903 bp, Oceanobacillus iheyensis HTE831
  CDS (1)..(903): transl_table=11
ttggaacacaatcatgatcattcccatcatcaccatacaacaaataagaaagtactattttggagctttcttattatattctcatttatgattatggaagctgttgggggtatactcacaaatagtttagcattactatcggatgcagggcatatgttaagtgatgcagctgctttagggttaacactccttgcatttaatatcggagaaaaaagcattaccgctaataaaacgtttggttataagcggtttgaaattatagctgcgtttattaatggtgtaacgcttattttaatttcgatctttatttttatcgaagcccttcgacgatttgttgaaccacctgaagttagtggagctatgatgattatagcttttatcggtttctgtgttaatatactcgttgcttggctattaatgaaagggaacgcagaagaaaatttaaatttaaaaagtgccctactccatgtaatgggtgatctattaggatctatcggagctttggttgcaggagctttgattttactatttaattggaatattgcggacccaatagcgagtattatcgtagcaatattaattattatttctggcattcgtattactaaagattcgttgcatattttaatggaaggtaagccaacgaatgttaatattgatgaaatgaaaagaagtttactgtcattatcaggagtacaagacgtacacgatcttcatgtatggtctattacttccgaatttccatccatgagttgtcatatacaagtaacagaacaaacaaatagagatcaattattagaagaagcaacaaaaatacttcaagattcattctctatatctcattgcacaattcaaatggaaggaaggaacatctcttcttgtgaatcatgtgatcactcctaa

SEQ ID NO: 36147 - protein, 300 aa, Oceanobacillus iheyensis HTE831
MEHNHDHSHHHHTTNKKVLFWSFLIIFSFMIMEAVGGILTNSLALLSDAGHMLSDAAALGLTLLAFNIGEKSITANKTFGYKRFEIIAAFINGVTLILISIFIFIEALRRFVEPPEVSGAMMIIAFIGFCVNILVAWLLMKGNAEENLNLKSALLHVMGDLLGSIGALVAGALILLFNWNIADPIASIIVAILIIISGIRITKDSLHILMEGKPTNVNIDEMKRSLLSLSGVQDVHDLHVWSITSEFPSMSCHIQVTEQTNRDQLLEEATKILQDSFSISHCTIQMEGRNISSCESCDHS

SEQ ID NO: 36148 - DNA, 2010 bp, Drosophila melanogaster
  CDS (1)..(2010)
atggtcaagattcccgatattgatataatacccagaaagagtagcgaaagtgtaagggaaaaagagtcgactggaaatgtacttaagaaaaatcatgatgaacgtggatcgcaaacgggtgatggaaaagatacaacttcaaaaacgaggcaaaagaagttagaaagcgatgatagttgggcagcacttcttcggaaaaggtttgcttggacaaaggacaataaaacggatgcagttaatcaaaatatacctaatactaaagggtcctcaaaggattttacagaaaataaaggaagtggaaacaaacattctacagttacctctaacgaaaagctgatacgatcggaatattatgagaattctcaaacaaaatctgatgcaatcaaatcactttcaaataatcagttgagtgaagaatcgccggagtttctgaacaaattaagacgaatcgaagaggcatcgaagcctaaaacttggaagaggccaacgccagtagttttgaaatcaaatcaaaattattccgccaacaaaaacagtgaaaatgcgttggatgcgaagccacaaactgctacgaatactgaagaaacgcatgggtgtataaatattttaaaggttcccttccaaagcaatttatattatgttccagaaaagccatcacgccaggataagggttctggaacatcggactttcaaccaggagctccggaaacaccaattgttgaaaactccgccgtggactccgatcgaaaagccgttgaaattatgccagaaaatgtaaaaaattcggaagagaaaaaaattgacaattccgattcgacgaaaactgtcacaattacaggacattcgcatataaccgccaaatgggatggccactgtcatttcaaggagagggaaactggtgttgacaaggccgccaggcgagttttaataatcgcctgcattctgtgcaccatcttcctgatactcgaagtcatcggaggcattttgtccaatagcctggcgattgccacagatgccgcacatttgctgacggatctggcctcgtttctcatttcgatttctgcacttcatttggctggcagaccctcatcggagcgtctgaactacggatggcatcgggctgaggtcattggggccatggtatccatattcttcatctgggtagtcacaggcatcctcgtgtacatggccataatgcgatgggttaaccaagatttcgaactggatgccaagataatgctgatcacatcggcactggctatactatttaatgtgatcatggccatgcagttgcaacacggccattcgcactctctgccaggagtccacaaaatgtcaaaggacgcaggatcggtgctaggaagtaagatgatcttattgttgggaaaatccgtttccatgcagtatgcggcaaaggggcatgagaacatcaatgtccgagctgctatcatccacgtggttggtgatatcatccagagttttggcgttttcgttgccgccctgataatattcttttggccggaatgggccttcatggattcggtttgcacatttgtcttttcagtgctggttcttgtcgttacgttcaaaatcttaagggacgtcctcatggttctgatggaggccacgcccgattttatggattacgaggaggtgaaacagacatttttgtccatttcgggtgtggagcatgtgcataacctgaggatatgggctctgtccatcaataaggtggctttatccgctcatttggccatttccaaggatgccgatccccagctgattctcgaggaggccaccactctgattcacaagcgcttcaaattcttcgagacaaccatacaaattgaggagtattcgccaggcatggagaactgcgggcaatgtttgagcccttcggataaaagtggaaaacggaaatcctcggatccggaaaagggcgaaggaaaagctggccgcaaaagaggatctgatgtgggaaaaattaagaatcactcgggatctgaatga

SEQ ID NO: 36149 - protein, 669 aa, Drosophila melanogaster
MVKIPDIDIIPRKSSESVREKESTGNVLKKNHDERGSQTGDGKDTTSKTRQKKLESDDSWAALLRKRFAWTKDNKTDAVNQNIPNTKGSSKDFTENKGSGNKHSTVTSNEKLIRSEYYENSQTKSDAIKSLSNNQLSEESPEFLNKLRRIEEASKPKTWKRPTPVVLKSNQNYSANKNSENALDAKPQTATNTEETHGCINILKVPFQSNLYYVPEKPSRQDKGSGTSDFQPGAPETPIVENSAVDSDRKAVEIMPENVKNSEEKKIDNSDSTKTVTITGHSHITAKWDGHCHFKERETGVDKAARRVLIIACILCTIFLILEVIGGILSNSLAIATDAAHLLTDLASFLISISALHLAGRPSSERLNYGWHRAEVIGAMVSIFFIWVVTGILVYMAIMRWVNQDFELDAKIMLITSALAILFNVIMAMQLQHGHSHSLPGVHKMSKDAGSVLGSKMILLLGKSVSMQYAAKGHENINVRAAIIHVVGDIIQSFGVFVAALIIFFWPEWAFMDSVCTFVFSVLVLVVTFKILRDVLMVLMEATPDFMDYEEVKQTFLSISGVEHVHNLRIWALSINKVALSAHLAISKDADPQLILEEATTLIHKRFKFFETTIQIEEYSPGMENCGQCLSPSDKSGKRKSSDPEKGEGKAGRKRGSDVGKIKNHSGSE

SEQ ID NO: 36150 - DNA, 1323 bp, Drosophila melanogaster
  CDS (1)..(1323)
atgctcgctaattggcagacggcacggaaatcgtcggaaatgaatgatgcccggctatataggaatgcggcaacttcgctggataaaagccgcttggaaatgctgcacgaatatgtccgggatcattgtcatcgtgcccgcagcgagggcgtggatgtgaaggctcgccgaaaactgatcattgcgagcattttgtgtctggtttttatgattgccgaaatcgtgggtggcgtcctatcgaacagcctggccatcgcaacagacgccgctcatttgctaacggatttcgccagttttatgatctcgttgtttgccatctggattgccgggcgaccatctacgcagcggatgtccttcggctggtatcgggctgaggttattggcgccatggcctccgtcttcatgatctgggtcatcacgggcatcctcgtttggctggccatcggacgactcatcagcggcgactacgaggtgaatgcgaagatcatgctgatcacatccggcctggccatattggtgaatgtcatcatgggcgttcagctgcagcatggccattcgcatggcctgggcggtgggcatggtcacagccatggtggttccaagaacgcatcccatgtgcaggccacatccacaccatgctccgattcgcccagccagcgtattgagggcggtgtggcctacgcgcccgaggatgccgaattgcctggcggcgggctgccaacgttctcctaccaaaataccaagttggtcgatcccacactggatttggaaattgctgccgttctggccgaaacggcacccggatcacatcatcacggcggaccggttggacgcgaggccgtcaacatgaatgtccgggcagccctcatccatgtgattggcgatgtcatccagagcgtgggagtttttgtcgccgctggcgtgatttacttttggccagagtactccatcgttgatcccatttgcacgtttgtgttctccatcattgtgctcttcaccacgttcacgatcatgaaggatgcgttgctggtgctcatggaggggactcccaactatatgcactacgccgaggtactgcagattttccaaggcatcgagggcgttgagcgggtgcacaatttgcgcatctgggcgctgagcattaataaagtggcgctatctgcacatttggccattgctgaaaatgcgaatccgaagaggatcctggatgcggccacatcggcggttcatttgcgctataacttctttgagaccaccatccagatcgaggactataccgcccaaatggagagctgcctgcagtgcaatgtgcccgagaagtag

SEQ ID NO: 36151 - protein, 440 aa, Drosophila melanogaster
MLANWQTARKSSEMNDARLYRNAATSLDKSRLEMLHEYVRDHCHRARSEGVDVKARRKLIIASILCLVFMIAEIVGGVLSNSLAIATDAAHLLTDFASFMISLFAIWIAGRPSTQRMSFGWYRAEVIGAMASVFMIWVITGILVWLAIGRLISGDYEVNAKIMLITSGLAILVNVIMGVQLQHGHSHGLGGGHGHSHGGSKNASHVQATSTPCSDSPSQRIEGGVAYAPEDAELPGGGLPTFSYQNTKLVDPTLDLEIAAVLAETAPGSHHHGGPVGREAVNMNVRAALIHVIGDVIQSVGVFVAAGVIYFWPEYSIVDPICTFVFSIIVLFTTFTIMKDALLVLMEGTPNYMHYAEVLQIFQGIEGVERVHNLRIWALSINKVALSAHLAIAENANPKRILDAATSAVHLRYNFFETTIQIEDYTAQMESCLQCNVPEK

SEQ ID NO: 36152 - DNA, 1497 bp, Drosophila melanogaster
  CDS (1)..(1497)
atgccaaaatatcagaagcttgacaacacactgttgcccaacgctcacgatgacgactctgaagggggtttcccgggttactttgatgataatcatcaaagtttgggaatccaacaggatccagatactagagatgatcgactgtcagattaccaagataggtattacagcgttaacaacaatagtgttaatagggaggtggtgacaattgggtcaaatgtcgtccgggttccagaggagcaaacctgggaagtgccactgttgggcgattgtggtgacagtgcgagaaaccagagctcggaaacggaatttgatatgcagcgtgagtgctgcaatcatcaaccagggttcagagccaactcgaagagcaaatctgcacaggaggccaagtataaaattatgctcgcagttgctctgtgttgcgtatttatgatcattgaatttcttggcggctatgtcgccggaagtctggccataatgacggatgccgcccatttagcatctgattgcattagtttcgtcatcggtctagtcgccatatggatagggggtcgcccgccagacgagcgtatgtcctttgggtacaaacgctttgaggttatcggagctctggcttctattttgggaatctggttcgtaactaccctgctcgtggttgtggctattgagaggatcttctcccaagactttgaattaaacgccgatatgatgatgctgatttcaggcattggcatagtcataaatatcgtaatgatgtttgttttgcatggatcctggttcgtgaacgggaatggtcatggccacagtcacagccatagtcatagtcacagccacagtcacggaaacggacatgagccaaacgatagtctttcacaaacacgttccaattcgaactttcttacgaccattggaagtcaaagcgcttcaacggcagatgaggaggattcaataaggaaagaaattaattcaaacgagcataagattgttattacaaatgggaaaaaaccaactctgactgggacttcaaacatggagctggcacacgaggataaaaacctgaacctgcgtgctgctatgattcatgtgattggagacctagtgcagagcattggcgtttttttggccgccgtcctaattaaagtttgtccaggtgccaagtatgctgatcccctgtgtactctcatattctcaattattgtaataatgactaccttgcgtctgtttcgggagtctttgggcatcatcgtgaatgcagttccacaaaaccttaatatgcgcactctgcacttggagctgggcagcatcgaaggtgtcagatctttgcaccacctaaacgtgtggcaacagacctctcagcaaagggtgctgatggtgcatctcgttacagactcccgagcggacggcaatgaggtactgcaggctgccacggcgctcgtatccagcccaagatataacatcaagcattcaaccattcaattggaacctacaacagagtag

SEQ ID NO: 36153 - protein, 498 aa, Drosophila melanogaster
MPKYQKLDNTLLPNAHDDDSEGGFPGYFDDNHQSLGIQQDPDTRDDRLSDYQDRYYSVNNNSVNREVVTIGSNVVRVPEEQTWEVPLLGDCGDSARNQSSETEFDMQRECCNHQPGFRANSKSKSAQEAKYKIMLAVALCCVFMIIEFLGGYVAGSLAIMTDAAHLASDCISFVIGLVAIWIGGRPPDERMSFGYKRFEVIGALASILGIWFVTTLLVVVAIERIFSQDFELNADMMMLISGIGIVINIVMMFVLHGSWFVNGNGHGHSHSHSHSHSHSHGNGHEPNDSLSQTRSNSNFLTTIGSQSASTADEEDSIRKEINSNEHKIVITNGKKPTLTGTSNMELAHEDKNLNLRAAMIHVIGDLVQSIGVFLAAVLIKVCPGAKYADPLCTLIFSIIVIMTTLRLFRESLGIIVNAVPQNLNMRTLHLELGSIEGVRSLHHLNVWQQTSQQRVLMVHLVTDSRADGNEVLQAATALVSSPRYNIKHSTIQLEPTTE

SEQ ID NO: 36154 - DNA, 1350 bp, Drosophila melanogaster
  CDS (1)..(1350)
atggccaagtactcgggcaaaaaatgccggctgctctcgatgatgtggcttacggcgttcttcttcttcgtggagatcatagtgggctatgtgaccaattcgatggctctggtggcggatagtttccacatgctgggcgacattgcggccctggtcatatcattcctgtctgtgaagatgtcaccgaaaaagtggtcaaagaacacttttggctgggccagggcagaagtcttgggtgctttggtcaacgccgttttcctggtggccttgtgcttcagcatcaccatcgaggcttgcaaaagattcattgaggaggagccgattcacgagcctgaactgcttgtcatcgtgggagccttgggtcttctggtgaatgttattggactttgtctgctttacgagcacggcggtcaccatggacactcacatggcggcggactcacccgtaaccacagccgcctcactgagttggccaacatggacgagggcgaggatgagcaaaacgactttgcctacgagaagcagaaggaaaaggcaccggtcaagaaatccagccatggacacagccatgatcccggccagatgaatatgcgcggcgccttcttgcacgttttgagcgatgcccttggcagcatcattgtcgtaatcagtgctgtggtggtgtggaagacggagtggaagtaccggtactacatggatcccgctctgtccatcgttttggttgttttgatcctgcactccgtgtggccgctgctgcgcgagtccgctttaattctgctccaaacggtgcccacccacatccaggtggatgccattcagaagaggcttctggagaaagttgatggcgtgctggctgtgcacgagttccatgtgtggcaactggccggcgaccgcatcatcgcctctgcccatattaggtgccgtaacctttcggagtacatgaagattgccgaaaaggtgaaggagttcttccacaacgagggtatccactctaccaccattcagccagagttcagcgagatcgaaggctgcaacatgtccgatggcacctccagcatcaacatcagcggctccgactgctgcgcgttggattgtcctaccacggaagaaggatgtgtcaaggccacgtgctgccaaaacaacaacaaattgaaccaactgccctcacccaccaactcgccgtatctgtgccgccagcggaatgccgcccgacaggccggcgatgtggaggcgggttccctgctggaggccacgtccagtggcaaccagggagccactggtggggccagcacaggagcgcccgtggctgcgataggggccacgtcaacgccgaagagcgatttggtttga

SEQ ID NO: 36155 - protein, 449 aa, Drosophila melanogaster
MAKYSGKKCRLLSMMWLTAFFFFVEIIVGYVTNSMALVADSFHMLGDIAALVISFLSVKMSPKKWSKNTFGWARAEVLGALVNAVFLVALCFSITIEACKRFIEEEPIHEPELLVIVGALGLLVNVIGLCLLYEHGGHHGHSHGGGLTRNHSRLTELANMDEGEDEQNDFAYEKQKEKAPVKKSSHGHSHDPGQMNMRGAFLHVLSDALGSIIVVISAVVVWKTEWKYRYYMDPALSIVLVVLILHSVWPLLRESALILLQTVPTHIQVDAIQKRLLEKVDGVLAVHEFHVWQLAGDRIIASAHIRCRNLSEYMKIAEKVKEFFHNEGIHSTTIQPEFSEIEGCNMSDGTSSINISGSDCCALDCPTTEEGCVKATCCQNNNKLNQLPSPTNSPYLCRQRNAARQAGDVEAGSLLEATSSGNQGATGGASTGAPVAAIGATSTPKSDLV

SEQ ID NO: 36156 - DNA, 906 bp, Pseudomonas putida KT2440
  CDS (1)..(906): transl_table=11
gtgggttcaaatcatgaccatggcagcgctgcagtacgcgaggggcatcagaagaagctaatcatggcgctcggcttgactggcagcttcatgattgcagaagtgatcggtgcgtggattaccggcagcctggcgctgctgtcggacgcatctcacatgttcacagatactgccgccttggcgatctcactgattgcacttcagatagccaagcggccggcggatcagaaaagaaccttcggctatgcgcgcctggaaattctggcttcgacgttcaacgccgtgctgctcttcctggtggcgatgtacatcttgtatgaggcctaccagcgcttcttcatgccggcggagatcgctaccggagcgatgatgtggatcgcaatcgccggcctgatcatcaacctaatttcgatgcgccttctggcatctgcgagcaacgaaagcctcaacgtcaaaggagcctacctcgaagtttggagcgacatgctcggctcgcttggcgtaatcatcgcggcacttatcatccgcttcaccggctggacctgggtcgacacgattgtcgctgtggcgatcggcctttgggttctgccgcggacgtggcagttgcttcgcgaaagcctggggatcctcatggagggtgtcccgagggggctcgacgttacggcaatcgaggccaccatcctcggagtagatggcgtgacggacgttcatgacttgcacgtgtgggctgtcagcagtggcagtaacgtgatgacgtcgcacgtagtggttcgggattctgcagatggggatgctgtgttggcggccgtcgtggatgctgtcagcgatgcattcgaaatccatcactgcaccatccagatcgagcgggcagctttccacgagagcgttccctcaccctcgcactga

SEQ ID NO: 36157 - protein, 301 aa, Pseudomonas putida KT2440
MGSNHDHGSAAVREGHQKKLIMALGLTGSFMIAEVIGAWITGSLALLSDASHMFTDTAALAISLIALQIAKRPADQKRTFGYARLEILASTFNAVLLFLVAMYILYEAYQRFFMPAEIATGAMMWIAIAGLIINLISMRLLASASNESLNVKGAYLEVWSDMLGSLGVIIAALIIRFTGWTWVDTIVAVAIGLWVLPRTWQLLRESLGILMEGVPRGLDVTAIEATILGVDGVTDVHDLHVWAVSSGSNVMTSHVVVRDSADGDAVLAAVVDAVSDAFEIHHCTIQIERAAFHESVPSPSH

SEQ ID NO: 36158 - DNA, 894 bp, Coxiella burnetii RSA 493
  CDS (1)..(894): transl_table=11
atgcatactcacgaacatcatcatcataagcaccacacttcccatcgagtcttaggatgggcgattctattgactttgggctttgcgctggtcgaagccttgggtggctattttgcgcattctctggcgcttttaggcgatgccggccacatggcttcggatgccgtagcattgggaattgccgcctttgcttcgtggattgcacttcgccctccatctcataaacacagctacgggtttgggcgcgctgaagtcatcgcagcttgggcatcaagcttgctaatggttatcatcgctctagcagtcatcgtagaagcgatcaagcgtatccaacagccttcctctgtccacagcgtcccggtgatgcttattgctgtctttggcattttattaaatgtacttctcgcaggcctgatttcacgcagcgaaaagaccttaaatatccgcgccgtattgttacatgtggtgagcgatatcgttggtacatgcgcggttttgctttccggcattgtcattttcttcagccattgggccctgattgaccctttgctctccgtccttatcggtatcctcattattatttcgagtgttcgattatggcgagaatccatgactgttctgatggaaggcgttcccgcccacttaaatattaaacaagtctctcaaacgatggtccgttttgaaggtgtgaaagcggtgcacgacgttcatatctggacgctctcatccggcgtgactgccctttcagcccatgtcaatattaaaaatataacttcctgggatgacgttttattagggttgaaatcgaccttgaaacaacaatatgatattgatcatattacgcttcagcctgaagcggataatgaagaatgtacaccttgttataagctttaa

SEQ ID NO: 36159 - protein, 297 aa, Coxiella burnetii RSA 493
MHTHEHHHHKHHTSHRVLGWAILLTLGFALVEALGGYFAHSLALLGDAGHMASDAVALGIAAFASWIALRPPSHKHSYGFGRAEVIAAWASSLLMVIIALAVIVEAIKRIQQPSSVHSVPVMLIAVFGILLNVLLAGLISRSEKTLNIRAVLLHVVSDIVGTCAVLLSGIVIFFSHWALIDPLLSVLIGILIIISSVRLWRESMTVLMEGVPAHLNIKQVSQTMVRFEGVKAVHDVHIWTLSSGVTALSAHVNIKNITSWDDVLLGLKSTLKQQYDIDHITLQPEADNEECTPCYKL

SEQ ID NO: 36160 - DNA, 1116 bp, Streptomyces avermitilis MA-4680
  CDS (1)..(1116): transl_table=11
gtgcagcctttgccgatcagcaccgcgatgcgtttgactgcggtggaggcacccgacgcgagggggaaggcgcacgacatgagcgaccacggccatgaccacggcccgcacggccataccgggcactccgggcactccgggcacgccggtcactcccacggagtgtcggcggacgccgaccgccggtggctggggatcgcgctcgctctgatcaccctgttcatggcggccgaggtggtcgtcggtgtcgtcgcgagctcgctggccctcatctcggacgcggcgcacatgctcaccgacgccgcctcgatcgtgctcgcgctgatcgcgatgcgactggccgcgcgcccggccaagggcggcttcacctacggactcaaacgcgcggagatcctctccgcccaggccaacgggctgacgctgctcctgctgggtgtctggctggcgtacgaggccgtacgacggctcgtcgagccgcccgacgtcgagggcggcctgatgctgatcaccgcgctcgccgggatcgtcgtgaacgtggccgccgcctggtgcatctccaaggccaaccgcacctcgctcaatgtcgagggcgcctaccagcacatcctcaacgacctgttcgccttcatcggtaccgcgatcgccggcctggtcgtcgtcgtgacgggcttcgcccgcgccgacgccatcgccacgctcgtggtcgtggtcctcatggtcaaggccggctacgggttgctgcgcgactccggccggatcttcctggaggccgcaccggccgacgtggacccggacgcgctcggcgacaagctcgtcgcgcaggcggccgtcgtcgaggtccacgacctgcacgtctggcagatcacctcggggcaggccgccctgtcggcccacgtcctggtgcagcccggcagcgactgccacgcggtccgccgcgacctcgaggaactgctgcgccaggactacggcatcacccacacgacacttcaggtcgaccacatcccggaacagctcctccaggtggccctgcgcggcgaccggatcccgccggacggcgcgccgcactgcgaggacgcccacgggccggtccaccgggaggagccgcacggacactga

SEQ ID NO: 36161 - protein, 371 aa, Streptomyces avermitilis MA-4680
MQPLPISTAMRLTAVEAPDARGKAHDMSDHGHDHGPHGHTGHSGHSGHAGHSHGVSADADRRWLGIALALITLFMAAEVVVGVVASSLALISDAAHMLTDAASIVLALIAMRLAARPAKGGFTYGLKRAEILSAQANGLTLLLLGVWLAYEAVRRLVEPPDVEGGLMLITALAGIVVNVAAAWCISKANRTSLNVEGAYQHILNDLFAFIGTAIAGLVVVVTGFARADAIATLVVVVLMVKAGYGLLRDSGRIFLEAAPADVDPDALGDKLVAQAAVVEVHDLHVWQITSGQAALSAHVLVQPGSDCHAVRRDLEELLRQDYGITHTTLQVDHIPEQLLQVALRGDRIPPDGAPHCEDAHGPVHREEPHGH

SEQ ID NO: 36162 - DNA, 900 bp, Bacillus anthracis str. Ames
  CDS (1)..(900): transl_table=11
atgggacattcgcataatcatgggcattctaaaaataaaaaagcgttgctacttgcattcttactaacaacaagttttatgattgctgaagttattgggggatttgtaacaaatagtttagcactactatctgacgcggggcatatgttaagtgatgcggtatctttagctttaagtttacttgcgtttaagctaggagaaaaaacagcaacagctgcgaaaacatacgggtataagcgagtcgaaatgttagcggcattatgtaacggtgtcgttcttattgtcgtttcagtatacatttttattgaagcaattcgccgttttaaagaaccagttgagattgctagtaatgggatgctcattattgctgtacttggtctgcttattaatattttatcagcttggatattaatgagaggcggagatgtaaaggggaatttgaatttaaggagtgctttcctacacgtattaggcgatttattaggatccgtcggagcgattattgctgcgttacttattaaattttttggatggactgctgcagatgcgattgctagtattcttgtgtctattttagtcattattagtggatggcgtgtaacacgtgatacagtccatatattaatggaaggtgcaccacagcacataaatgttgaagaggtaaaaagtacattattaaatattacggttgtaaaagaagttcatgatttgcacatatggtctgtcacatcggattttcaagtattaacttgccacttgattattaaaggaaatgaaacacaaagtgtattaaaagaggctacggaagtattaaaagagaagtttcatgtagaacatgtcaccattcaagtagaaatagatggtgaatttcatcatagtgagacaacttgcaaagtatga

SEQ ID NO: 36163 - protein, 299 aa, Bacillus anthracis str. Ames
MGHSHNHGHSKNKKALLLAFLLTTSFMIAEVIGGFVTNSLALLSDAGHMLSDAVSLALSLLAFKLGEKTATAAKTYGYKRVEMLAALCNGVVLIVVSVYIFIEAIRRFKEPVEIASNGMLIIAVLGLLINILSAWILMRGGDVKGNLNLRSAFLHVLGDLLGSVGAIIAALLIKFFGWTAADAIASILVSILVIISGWRVTRDTVHILMEGAPQHINVEEVKSTLLNITVVKEVHDLHIWSVTSDFQVLTCHLIIKGNETQSVLKEATEVLKEKFHVEHVTIQVEIDGEFHHSETTCKV

SEQ ID NO: 36164 - DNA, 1011 bp, Chromobacterium violaceum ATCC 12472
  CDS (1)..(1011): transl_table=11
atgacgcccagcttccatctgcatgatgagaacggcgtggaccacgcccacgacgacgatcacgacgccaaccatccccaccttcaccgccacggcggtccggcgggcggggagggccggcggctgagcagccgcgcgctggccaaggtgctggcgctgacctgcggcttcgcgctggtggaggcgctgggcggctggtggagcgggtcgctggccttgctgtccgacgccggccacatgctgaccgattcgctgtccctgctgctggccttgtgggcagcccgcatcggcaggcggccggccaccgagcggctgtcgttcggacatggccgggccgaagtgctgggcgcgctgctgaacagcctgctgctgttcggcctgtcggccttcatcgtcgcggaggcggtggagcggctgctgcgcccgcacgcggtgaacggcatgggggtgatgctgatcgccgccatcggactggccgtcaacgtgctggcggcccgggtgctcagccgcggcgcgcattcgctgaacagccgggcggcgctgctgcatgtgctgggcgacctgttcggctcggcggcggccatcgcgtccggcgtggtcatctacctgaccggctggatggcggcggacccgctgttgtccatgctggtggcgctgatgctgctggcagcggcctggcgcctgatccgccaggcggtgatggtgctgatggagggcgtgccgccgcacctggattacaaccgcatcggcgaggcgctgtcggccatcgcgggggtccgctcggtgcatgacctgcacgtgtggacgatgtcggccgagcgggtggcgctgtccgcccacgtgcgcatcgccgcgccgcaggactggccgcgcatcctggccgcctgccagctgatgctgtcgcgcgaattttgcatagatcacgtaaccttgcaggcggaatggccggcgtccgcgcccgccggcaagccggtaccgatagacatcatttccgaggacaagctcccatga

SEQ ID NO: 36165 - protein, 336 aa, Chromobacterium violaceum ATCC 12472
MTPSFHLHDENGVDHAHDDDHDANHPHLHRHGGPAGGEGRRLSSRALAKVLALTCGFALVEALGGWWSGSLALLSDAGHMLTDSLSLLLALWAARIGRRPATERLSFGHGRAEVLGALLNSLLLFGLSAFIVAEAVERLLRPHAVNGMGVMLIAAIGLAVNVLAARVLSRGAHSLNSRAALLHVLGDLFGSAAAIASGVVIYLTGWMAADPLLSMLVALMLLAAAWRLIRQAVMVLMEGVPPHLDYNRIGEALSAIAGVRSVHDLHVWTMSAERVALSAHVRIAAPQDWPRILAACQLMLSREFCIDHVTLQAEWPASAPAGKPVPIDIISEDKLP

SEQ ID NO: 36166 - DNA, 912 bp, Gloeobacter violaceus PCC 7421
  CDS (1)..(912): transl_table=11
atgggaagcggacacgaccacgcccatgcccacggacccgccgaccacaaccgcgcctttgcgatcggcatcgccttgaatgtcggtttcgtggtcatcgaggcggtctacgggatcctggcgggctccctggcgctgctggcggacgccgggcacaacctcagcgacgtgctggggctggccctcgcctggggggcgagcgtgctcaccacccgccacccctcgccgcggcgcacctacgggcttaggcgttcgtcgattttggccgccctgctcaatgccgtcacgctgctggtcgccgtgggggctattgcctgggaggccgtcatccgcctgcaagatcccggtccggtggcgggaggcaccatcgtctgggtggcggccgtcggtgtgctcgtcaactcggtgagcgcctatttgttcgtgaaaggtcaggcagatctcaatgtgcggggggcctttttgcacctcgcctccgacgcggccgtgtcgctggggaccgtgttcgctggggccgccattctgttgacggggtgggcctggctcgacccggtcgtgagcctggtgatcggtgttgtgatcgtggtgggcacctgggggctgttggtggactcgctgaatttggccctcgacgcggtacccgaggggatcgatcccgaggtggtcaaagcgtacctgcagagtctgcgcggagtgggcgaagtccacgacctgcacatctgggcgatgagcaccaccgaaacggccctgaccgcccacctggtaatcccgggcggatttcccggcgacgcctttctggccgccacctgccgccaactgcacgatcgcttcggcatcgagtatgcgacattgcagctcgagacgggcgatcctgcccatccctgctgtctggccccggatacccaggtttga

SEQ ID NO: 36167 - protein, 303 aa, Gloeobacter violaceus PCC 7421
MGSGHDHAHAHGPADHNRAFAIGIALNVGFVVIEAVYGILAGSLALLADAGHNLSDVLGLALAWGASVLTTRHPSPRRTYGLRRSSILAALLNAVTLLVAVGAIAWEAVIRLQDPGPVAGGTIVWVAAVGVLVNSVSAYLFVKGQADLNVRGAFLHLASDAAVSLGTVFAGAAILLTGWAWLDPVVSLVIGVVIVVGTWGLLVDSLNLALDAVPEGIDPEVVKAYLQSLRGVGEVHDLHIWAMSTTETALTAHLVIPGGFPGDAFLAATCRQLHDRFGIEYATLQLETGDPAHPCCLAPDTQV

SEQ ID NO: 36168 - DNA, 984 bp, Vibrio vulnificus YJ016
  CDS (1)..(984): transl_table=11
gtgtggcttgttgcgttttctgcacgcaacaaatcgttgacttactttgataatcaaactaaattgactttcaaatattttgactatcaaacaaatggattttcttttatgtctgcttgctctcaaagccaccgatttaccgcacacaatcaacaaggtgaaaaacgcactttttacgttcttttactcaccctttttactatggtggcggaaattgttgcgggtaccctttacggctccatggcgctactggctgacggttggcacatggggacgcacgcggcggccttttgcatcaccctctttgcgtatcgctatgcgaaaaaacacgcgcacagtgctcgtttctcttttggcacggggaaagtcagcgtgcttggtgggtttaccagcgcgattgctttaggaatcgtcgccttgctgatggtggtggaatcggttcatcgcctgtttaatcctgaaagtattcaatttaatgaagcgatcttggtggcggtggttggattatccgtcaatgtcgccagtatgttcttgctgcatgatcatgaacatgcgcatgagcaccatcacgaccacaatctgcgcgccgcttatcttcatgttttggcggatgccctcacttcaatcttggccattgtggccctcatcattggtaagttctacggctggatttggctcgatgcattgatgggcatcgtgggtgcactggtgattggtaaatggaccttcggactggtgaaacaaacggcgcccattttgcttgatgaaagcattgaatcgaattacatcgagcagcttaaccaaacgttaagtccttatgctaccgtgaccgacttgcatgtgtggcggatcagcggccaccattacggcgcgatcatcagcttggtggatcacagcaaaaccccgtatgaggaatataaacacatgctggaaaaatttgataagattcaccacctcacgttggaactgcaaccggccaagtaa

SEQ ID NO: 36169 - protein, 327 aa, Vibrio vulnificus YJ016
MWLVAFSARNKSLTYFDNQTKLTFKYFDYQTNGFSFMSACSQSHRFTAHNQQGEKRTFYVLLLTLFTMVAEIVAGTLYGSMALLADGWHMGTHAAAFCITLFAYRYAKKHAHSARFSFGTGKVSVLGGFTSAIALGIVALLMVVESVHRLFNPESIQFNEAILVAVVGLSVNVASMFLLHDHEHAHEHHHDHNLRAAYLHVLADALTSILAIVALIIGKFYGWIWLDALMGIVGALVIGKWTFGLVKQTAPILLDESIESNYIEQLNQTLSPYATVTDLHVWRISGHHYGAIISLVDHSKTPYEEYKHMLEKFDKIHHLTLELQPAK

SEQ ID NO: 36170 - DNA, 945 bp, Rhodopseudomonas palustris CGA009
  CDS (1)..(945): transl_table=11
atgagccacgatcatcatcaccatcatgggcccggtgccgcgcacggcgccggtggccacagtcacgccccgcaggatttcggccgcgcgtttgcgatcggcatcgcgctcaacatggtcttcgtggtcgccgaagcggcattcggttacttcagcaattcgatggcgctgatcgccgacgccggccacaacctgtccgacgtcgccgggctggtggtggcgtggatcgccgccgggctgtcgaagcggccgccctcggcgcgctacacctacggactgcgcggctcctcgattctggcagcgctgttcaacgcggtgtttctgctgctcgctgtcggcgcaatcggatgggaagcggtggtgcggctgttcgcgccggagccggtcgcaggtatcaccgtgatggtggtggccgggatcggcatcgtcatcaatgccgtgaccgcctggctgttcgcgtcgggccgtcacagcgacctcaacatccgcggcgcttacttgcacatggcggcggatgctgcggtgtcggccgcagtggtggtggccggcgtgatcatcctgtcgaccggctggtactggattgatccggccgtcagcctgatcgtcgcggtggtgatcgtttggggcacctggggcctattgcgcgattccaccgcgctgtcgctcgccgccgtgccgcgcgacatcgatcccacagcggtgcgggcgttcctgtcgaaacttcccggcgtcacgcaggtccacgacctgcatatctgggggatgtcaaccaccgaagtggcgctgacctgccatctggtgatgcccggcggctcgccgggagatcccttcctggtcgacctcgcccacgaactgcagcacgatttcggcatcgcgcacaccacggtgcagatcgagaccgatcccaacacggtgtgcgcactggcgccggagcacgtggtgtag

SEQ ID NO: 36171 - protein, 314 aa, Rhodopseudomonas palustris CGA009
MSHDHHHHHGPGAAHGAGGHSHAPQDFGRAFAIGIALNMVFVVAEAAFGYFSNSMALIADAGHNLSDVAGLVVAWIAAGLSKRPPSARYTYGLRGSSILAALFNAVFLLLAVGAIGWEAVVRLFAPEPVAGITVMVVAGIGIVINAVTAWLFASGRHSDLNIRGAYLHMAADAAVSAAVVVAGVIILSTGWYWIDPAVSLIVAVVIVWGTWGLLRDSTALSLAAVPRDIDPTAVRAFLSKLPGVTQVHDLHIWGMSTTEVALTCHLVMPGGSPGDPFLVDLAHELQHDFGIAHTTVQIETDPNTVCALAPEHVV

SEQ ID NO: 36172 - DNA, 897 bp, Wolbachia endosymbiont of Drosophila melanogaster
  CDS (1)..(897): transl_table=11
atgacagcagtgcataacggtaaacactcagcagcgcagtccaagcgcttaatctattccataataatagttgcgataacaatgtttatggaaatagtaggtggaataatttcacattcgcttgctctattatcagatgcagggcatatgctcactgacctctttgccttggttttaagctggttagcacataggttttcagctaagaaatccgatttgcagagatcatacggatatcatcggttgcagataattgcagcatttgttaatggtttaactctattcctcattgcagtaatcattataattgagtcaataaagaggtttatttttccagtcaatgttgagtggaaagtaatgttaataattgctacactcggtcttgtctctaacataatagtcttttttatattacatagtaaatgcgagagcaatataaacataaaaagtgctgtactacacgttataggagatattttaggttctgtagctgctatacttgcatctataattatcatgcttactggatggcaaatagtagatccaatcttatcagtatttgttagtgtggtaattctaaatagcggctataaaattctcaaaaattcttgccatatactccttgaaggtacgcctgagggtatatctgctgaagagataaaaagtaagatcacatcagaattacctgaagtgatagatgtgcaccacatacatacatggtcgctgtctgataattattttataattaccatgcatgctaaaataaagcaaaatgtgcagcacaccaatgttttatatgaaataaaaaaaatattgctagataagttcgagatagcacactctacagtcgagatcgaatacgatgagtgtgcggataataagatacttaaacattga

SEQ ID NO: 36173 - protein, 298 aa, Wolbachia endosymbiont of Drosophila melanogaster
MTAVHNGKHSAAQSKRLIYSIIIVAITMFMEIVGGIISHSLALLSDAGHMLTDLFALVLSWLAHRFSAKKSDLQRSYGYHRLQIIAAFVNGLTLFLIAVIIIIESIKRFIFPVNVEWKVMLIIATLGLVSNIIVFFILHSKCESNINIKSAVLHVIGDILGSVAAILASIIIMLTGWQIVDPILSVFVSVVILNSGYKILKNSCHILLEGTPEGISAEEIKSKITSELPEVIDVHHIHTWSLSDNYFIITMHAKIKQNVQHTNVLYEIKKILLDKFEIAHSTVEIEYDECADNKILKH

SEQ ID NO: 36174 - DNA, 1182 bp, Arabidopsis thaliana
  CDS (1)..(1182)
atggtgacacccaaattacatctcgatctctctcttacaaaaaagatgaaagaccatattcatgagcatgaccacatggttcagatttgtggggaagtttcatcaggagaaacaagcttggtgggcatcaagaagacatgtggagaagcgccttgcggattctcagatgccaagaccagttcaatagaagctcaagagcgtgcagcatcaatgagaaagctattaatagctgttcttctctgtgccattttcatagttgtagaagtcgttggaggaatcaaggccaacagtcttgcgattctcacagatgcagctcatctgttatctgatgttgcagcctttgcaatatctttgttctcgctctgggcttcgggatggaaggcaaaccctcagcaatcttatgggtttttcagaatagagattcttggtgctcttgtctccattcaaatgatttggcttcttgctggtatcttggtttatgaagccattgttagacttaacaacggtagtggtgaagtggagggatctcttatgtttgctgtctctgcagttggcttacttgtgaacattgcaatggctattctgttaggtcatgaccatggtcatggtcatggtcatagtcatgacaatggtcacggtcatagtcatgatcatggccatggaatagccgcaaccgagcatcatcatgactctggtcatgatgaatcacaactatctgatgtcttaatcgagcaaaagaagcagcgtaatgtaaatattcaaggggcttatcttcacgtgctgggagattcgatacagagcgtaggagtgatgataggaggagcaatcatatggtataagccggagtggaagatccttgatttgatatgcacattggttttctctgtgattgtgttagggacaacaattgggatgcttaggaacattctagaggttttaatggagtcaacaccacgagagattgacccgacaatgcttgaaaagggagtgtgtgaaattgaagaagtggtggctgttcatgagcttcacatttgggcgattactgtcggcaaacttttgttggcatgtcatgttaaaatcagacctgaggcagaggcagatatggttttggacaagattatcgattacattaagagggaacacaacattagtcacgtgactattcagatcgaacgtcaatga

SEQ ID NO: 36175 - protein, 393 aa, Arabidopsis thaliana
MVTPKLHLDLSLTKKMKDHIHEHDHMVQICGEVSSGETSLVGIKKTCGEAPCGFSDAKTSSIEAQERAASMRKLLIAVLLCAIFIVVEVVGGIKANSLAILTDAAHLLSDVAAFAISLFSLWASGWKANPQQSYGFFRIEILGALVSIQMIWLLAGILVYEAIVRLNNGSGEVEGSLMFAVSAVGLLVNIAMAILLGHDHGHGHGHSHDNGHGHSHDHGHGIAATEHHHDSGHDESQLSDVLIEQKKQRNVNIQGAYLHVLGDSIQSVGVMIGGAIIWYKPEWKILDLICTLVFSVIVLGTTIGMLRNILEVLMESTPREIDPTMLEKGVCEIEEVVAVHELHIWAITVGKLLLACHVKIRPEAEADMVLDKIIDYIKREHNISHVTIQIERQ

SEQ ID NO: 36176 - DNA, 900 bp, Bacillus cereus ATCC 10987
  CDS (1)..(900): transl_table=11
atgggacattcacatgatcatggtcattcaaaaaataaaaaggcgttactattcgcattcttactaacaacaagttttatgattgctgaagttattgggggatttgtaacaaatagtttagcactactatctgacgcggggcatatgctaagtgatgcggtatcgttagctttaagtttacttgcgtttaagcttggagaaaaaacagcaacagctgcgaaaacatatggatataagcgagtcgaaatgttagcggcattatgtaacggtgtcgttcttattgtcatttcaatatacatttttattgaagcaattcgccgttttaaagagccagttgagattgctagtaatgggatgctcattattgctgtacttggtctgcttattaatattttatcagcttggatattaatgagaggcggagatgtgaagggcaatttaaatttaagaagtgctttcttacacgtattaggagatctattagggtcagtcggagcgataattgctgcgttacttattaagttttttggatggactgctgcagatgcgattgctagtattcttgtgtctattttagtcattattagtggatggcgtgtaacacgtgatacggtccatatattaatggagggtgcaccacaacacataaatgtggaagaggtaaaaagtacattattaaatattccggttgtaaaagaagttcatgatttgcacatatggtctgtcacatcggattttcaagtattaacttgccacttgattattaaaggaaatgaaacacaaagtgtattaaaagaggctactgatgtattaaaagagaaatttcatgtagaacatgtcaccattcaagtagaaatagatggtgaatttaatcatagtgagacaacttgcaaagtatga

SEQ ID NO: 36177 - protein, 299 aa, Bacillus cereus ATCC 10987
MGHSHDHGHSKNKKALLFAFLLTTSFMIAEVIGGFVTNSLALLSDAGHMLSDAVSLALSLLAFKLGEKTATAAKTYGYKRVEMLAALCNGVVLIVISIYIFIEAIRRFKEPVEIASNGMLIIAVLGLLINILSAWILMRGGDVKGNLNLRSAFLHVLGDLLGSVGAIIAALLIKFFGWTAADAIASILVSILVIISGWRVTRDTVHILMEGAPQHINVEEVKSTLLNIPVVKEVHDLHIWSVTSDFQVLTCHLIIKGNETQSVLKEATDVLKEKFHVEHVTIQVEIDGEFNHSETTCKV

SEQ ID NO: 36178 - DNA, 1374 bp, Strongylocentrotus purpuratus
  CDS (1)..(1374)
atgctctctaccaagagctgtcgtctcatgacgatgatggtgctgacagcgagcttcttcttcgtggagctcagcgtaggatacatcacacattccctcgctctcgtggcggattccttccacatgctgtccgacatcatcgccctcattgtaggctttgtagcagtcaggtatgctaaacgtgacactccaaagaacacatatggctggcaaagagcggaggtggttggagcccttgtcaatgcagtctttctcttcgccctgtgctttacaatattagtagatgccattgagcgccttgttcagggagataaaatcaaagaccctcgcttggttcttatcgttggtggggtcggccttgcagtcaaccttttaggaattttgctgtttagttcacacggtggaggccatgggcacagccatgcatcatcggtgaaggagcctgaagaaagggtagctctcgctaacggaaccaagggacaggatgatttgaatatttacaaatataccaaaaagagtgataaaagcaaggtgacaacaaataccttctatcacagcccttcagcgcagcaactgaacatgagaggcgttttccttcacgttcttggcgacgccctaggttcggtggtggttataatcagtgccctcgtagtcatgtttgccgacggtgattgggtgttctgcgtggatcctgtactcagtattcttattgttataatcattagcaccacaacgtggccattatttaaacagtctagcatgatcctgttgcagtctatacctactggcattgatattgaagatattgacaagaaactacgagaagagtgtagctatatcgacaacattcatgagttccacgtatggcagttaacaggttccaaactcatcgccacgctgcacatcagtgtttcatcgttagaggagtatggaaaggttattgaacaggccacaaaaatacttcaccaagagggaatccatagcactacaattcaaccagagtttatttgtatgagagaaagctcgaaggagaactgtgtaataccttgtcccactgatgcctgctcagatacaaacaaatgctgcagtgccacacggcgtatcgcagcaggaaacagcaagagtgcccagaccatgtcgcagctgcagatggaagtcaacgacctggaggatgaaccttttacacagtcacctgatgaagagatgcagagcttgacactggatgcaaagttgcaggagctgcccaggatagtggagttgcatgccaccattgtaggcaacaagcttgccgagcaactaggaacaacgaaggactgtgtaggctatccctgcatgtacaaatgtgagatctgtcgaaatgcggttgtaagatga

SEQ ID NO: 36179 - protein, 457 aa, Strongylocentrotus purpuratus
MLSTKSCRLMTMMVLTASFFFVELSVGYITHSLALVADSFHMLSDIIALIVGFVAVRYAKRDTPKNTYGWQRAEVVGALVNAVFLFALCFTILVDAIERLVQGDKIKDPRLVLIVGGVGLAVNLLGILLFSSHGGGHGHSHASSVKEPEERVALANGTKGQDDLNIYKYTKKSDKSKVTTNTFYHSPSAQQLNMRGVFLHVLGDALGSVVVIISALVVMFADGDWVFCVDPVLSILIVIIISTTTWPLFKQSSMILLQSIPTGIDIEDIDKKLREECSYIDNIHEFHVWQLTGSKLIATLHISVSSLEEYGKVIEQATKILHQEGIHSTTIQPEFICMRESSKENCVIPCPTDACSDTNKCCSATRRIAAGNSKSAQTMSQLQMEVNDLEDEPFTQSPDEEMQSLTLDAKLQELPRIVELHATIVGNKLAEQLGTTKDCVGYPCMYKCEICRNAVVR

SEQ ID NO: 36180 - DNA, 2331 bp, Strongylocentrotus purpuratus
  CDS (1)..(2331)
atgatgggttctggtagcagtctggggcgagtccatcatgagagactggccccatatattattctccttgtggttaccaagtgtcttcaggctctgggtatctttatctcatatgatgtccttaaactcgtccaccttgtcatatttgtattcattatgaaatcaggatctgcagctgttctctttgtgttgcagagacctctatctaccggtagaagacttaccaagcgtcagtggattagagttttaagacatgcggtagttcagacccttatatctgtcctttggatatttgggttaacactctgtggcccactcagatcaatcttattatttgagcacaatgacgtaatcatcagtggttttgttgctgcattgtttacgagtcgaggaggtggtccaagcaggacgagaggtgggtttatgtttcttcttgccattttgtctctcttactttttgatgtggatcttcaacaaaagcagcttgaacatcctgagggcccacataaaagtgcagtgacccacatcttttaccaggccatttcttggttaggggtctcggaccataagggtggtgtcatcttgctggtcggcctgctgtttgtgaaagtggccttcaggaatgtgtccaggaagctgtcggtggacgtgggtggttccaagcgtcttcatgctctatcaacgttcatctcggcactcatgcttctaccttggactctaatacatttatttgttcatcagaatgggccggaatcatggagatcgttgatcctcccctttgcagctctcatcttagtcctctgcatcttagactactatgtagaatcagtctccattaaccatctggaggttttcaggacagctagattcagtggatactccctatttctgagtggactggtcctaagctacatctggggctcttcctacaacgcgggagattccattcttggaagggtgggcgagttcaggatggaggaccacgccctgacgggaggggtcatctttagtgcaatattgtttatatgggctaccagggttcttgggtgccccctccccaagcctgggtccaaggggagtctggtagggtacaccgccgggggtctgcccctctacaacttcacaggcgacaccctgcaaaggacatcccagtccctcttcaccctctccaagggcttcttgaggcagatcctggaatcatatgactccaggcagatcttctactacctctgcattaacttggtgttcacatttgttgaactgtcctatggtatgtggactaacagccttggtctgatctctgatggattccacatgttgtttgattgcactgctctagtcctgggtctctgtgctgcagtcatgtcacactggaaagctaccaggacatactcgtatgggtatggcagggtggaggtgttatctggttttatcaacggactcttcttggttgtgattggctgctttgtattcacagctgccattggtcgtctcttggatccgccaaatatcaacacagataaactcatgactgtttcagtaataggcctcatcgtcaatctcatcggcatcatggcattcagccacgcccacactcacagccatgggggaggaggatccagtcatggccactcccatggaagtacaagctcctcctcctcctcagcaagtcacgcccactcccatggtggtggccaatcaggccatgggcacgcgcaccaacacggagcatcagatcaccaaggaggacaagagaagaaagcagcatgtcaggccaagaacacaaacatgcaaggtgtatatctccatgtgctggcggacacaatgggtagcgtgggcgtcatcatctcagcgttcctggtggagcactttggtctcctcgtcgcagaccccatctgctctatcttcatctcggtcatgattctcattagcgtggccccgttgctaggggatacggcagccatcttgcttcagaggataccacccgaactggagcctggcttgaatgaagcattgttcaaagtccagtccataaagggcgtgctttcgttccgcaaaccccatttctggaggcattcgggggacatggctacagggaccctccacatacagcttgaacaagaagccaatgaacagaagatcatccagcagataactgccctattcaaggaacaaggtctgaaaaacttcactgtacaggtagagaaggaggcattcttccagcacatgtccggactgagcgccaactttgaccaagttctcaagatgaccaaccagatgaagcagattggcggcttggactcccagctctatgatatcaaggctgtctaa

SEQ ID NO: 36181 - protein, 776 aa, Strongylocentrotus purpuratus
MMGSGSSLGRVHHERLAPYIILLVVTKCLQALGIFISYDVLKLVHLVIFVFIMKSGSAAVLFVLQRPLSTGRRLTKRQWIRVLRHAVVQTLISVLWIFGLTLCGPLRSILLFEHNDVIISGFVAALFTSRGGGPSRTRGGFMFLLAILSLLLFDVDLQQKQLEHPEGPHKSAVTHIFYQAISWLGVSDHKGGVILLVGLLFVKVAFRNVSRKLSVDVGGSKRLHALSTFISALMLLPWTLIHLFVHQNGPESWRSLILPFAALILVLCILDYYVESVSINHLEVFRTARFSGYSLFLSGLVLSYIWGSSYNAGDSILGRVGEFRMEDHALTGGVIFSAILFIWATRVLGCPLPKPGSKGSLVGYTAGGLPLYNFTGDTLQRTSQSLFTLSKGFLRQILESYDSRQIFYYLCINLVFTFVELSYGMWTNSLGLISDGFHMLFDCTALVLGLCAAVMSHWKATRTYSYGYGRVEVLSGFINGLFLVVIGCFVFTAAIGRLLDPPNINTDKLMTVSVIGLIVNLIGIMAFSHAHTHSHGGGGSSHGHSHGSTSSSSSSASHAHSHGGGQSGHGHAHQHGASDHQGGQEKKAACQAKNTNMQGVYLHVLADTMGSVGVIISAFLVEHFGLLVADPICSIFISVMILISVAPLLGDTAAILLQRIPPELEPGLNEALFKVQSIKGVLSFRKPHFWRHSGDMATGTLHIQLEQEANEQKIIQQITALFKEQGLKNFTVQVEKEAFFQHMSGLSANFDQVLKMTNQMKQIGGLDSQLYDIKAV

SEQ ID NO: 36182 - DNA, 1335 bp, Strongylocentrotus purpuratus
  CDS (1)..(1335)
atgccgcaattttcaaagctcgagaacaacaacgaagagatgacttcttccaagaagcggatgctctctaccaagagctgtcgtctcatgacgatgatggtgctgacagcgagcttcttcttcgtggagctcagcgtaggatacatcacacattccctcgctctcgtggcggattccttccacatgctgtccgacatcatcgccctcattgtaggctttgtagcaggatacatagcctacacatgtatgtacagtcgtacaaacacatatggctggcaaagagcggaggtggttggagcccttgtcaatgcagtctttctcttcgccctgtgctttacaatattagtagatgccattgagcgccttgttcagggagataaaatcaaagaccctcgcttggttcttatcgttggtggggtcggccttgcagtcaaccttttaggaattttgctgtttagttcacacggtatggggcatgggcatagccatggaggtggaggtggaggccatgggcacagccatgcatcatcggtgaaggagcctgaagaaagggtagctctcgctaacggaaccaagggacaggagggggcgctagatgctaacgatgtggaagccggagtagacgtcacagacagcgagaccaagagaaaactcaagcagaggaaacatgaagcttcagcgcagcaactgaacatgagaggcgttttccttcacgttcttggcgacgccctaggttcggtggtggttataatcagtgccctcgtagtcatgtttgccgacggtgattgggtgttctgcgtggatcctgtactcagtattcttattgttataatcattagcaccacaacgtggccattatttaaacagtctagcatgatcctgttgcagtctatacctactggcattgatattgaagatattgacaagaaactacgagaagagtgtagctatatcgacaacattcatgagttccacgtatggcagttaacaggttccaaactcatcgccacgctgcacatcagtgtttcatcgttagaggagtatggaaaggttattgaacaggccacaaaaatacttcaccaagagggaatccatagcactacaattcaaccagagtttatttgtatgagagaaagctcgaaggagaactgtgtaataccttgtcccactgatgcctgctcagatacaaacaaatgctgcagtgccacacggcgtatcgcagcaggaaacagcaagagtgcccagaccatgtcgcagctgcagatggaagtcaacgacctggaggatgaaccttttacacagtcacctgatgaagagatgcaggttggttgttga

SEQ ID NO: 36183 - protein, 444 aa, Strongylocentrotus purpuratus
MPQFSKLENNNEEMTSSKKRMLSTKSCRLMTMMVLTASFFFVELSVGYITHSLALVADSFHMLSDIIALIVGFVAGYIAYTCMYSRTNTYGWQRAEVVGALVNAVFLFALCFTILVDAIERLVQGDKIKDPRLVLIVGGVGLAVNLLGILLFSSHGMGHGHSHGGGGGGHGHSHASSVKEPEERVALANGTKGQEGALDANDVEAGVDVTDSETKRKLKQRKHEASAQQLNMRGVFLHVLGDALGSVVVIISALVVMFADGDWVFCVDPVLSILIVIIISTTTWPLFKQSSMILLQSIPTGIDIEDIDKKLREECSYIDNIHEFHVWQLTGSKLIATLHISVSSLEEYGKVIEQATKILHQEGIHSTTIQPEFICMRESSKENCVIPCPTDACSDTNKCCSATRRIAAGNSKSAQTMSQLQMEVNDLEDEPFTQSPDEEMQVGC

SEQ ID NO: 36184 - DNA, 1158 bp, Nasonia vitripennis
  CDS (1)..(1158)
  misc_feature (74)..(74): n is a, g, c or t
  misc_feature (75)..(75): n is a, g, c or t
  misc_feature (76)..(76): n is a, g, c or t
  misc_feature (77)..(77): n is a, g, c or t
  misc_feature (78)..(78): n is a, g, c or t
  misc_feature (79)..(79): n is a, g, c or t
  misc_feature (80)..(80): n is a, g, c or t
  misc_feature (81)..(81): n is a, g, c or t
  misc_feature (82)..(82): n is a, g, c or t
  misc_feature (83)..(83): n is a, g, c or t
  misc_feature (84)..(84): n is a, g, c or t
  misc_feature (85)..(85): n is a, g, c or t
  misc_feature (86)..(86): n is a, g, c or t
  misc_feature (87)..(87): n is a, g, c or t
  misc_feature (88)..(88): n is a, g, c or t
  misc_feature (89)..(89): n is a, g, c or t
  misc_feature (90)..(90): n is a, g, c or t
  misc_feature (91)..(91): n is a, g, c or t
  misc_feature (92)..(92): n is a, g, c or t
  misc_feature (93)..(93): n is a, g, c or t
  misc_feature (94)..(94): n is a, g, c or t
  misc_feature (95)..(95): n is a, g, c or t
  misc_feature (96)..(96): n is a, g, c or t
  misc_feature (97)..(97): n is a, g, c or t
  misc_feature (98)..(98): n is a, g, c or t
  misc_feature (99)..(99): n is a, g, c or t
  misc_feature (100)..(100): n is a, g, c or t
  misc_feature (101)..(101): n is a, g, c or t
  misc_feature (102)..(102): n is a, g, c or t
  misc_feature (103)..(103): n is a, g, c or t
  misc_feature (104)..(104): n is a, g, c or t
  misc_feature (105)..(105): n is a, g, c or t
  misc_feature (106)..(106): n is a, g, c or t
  misc_feature (107)..(107): n is a, g, c or t
  misc_feature (108)..(108): n is a, g, c or t
  misc_feature (109)..(109): n is a, g, c or t
  misc_feature (110)..(110): n is a, g, c or t
  misc_feature (111)..(111): n is a, g, c or t
  misc_feature (112)..(112): n is a, g, c or t
  misc_feature (113)..(113): n is a, g, c or t
  misc_feature (114)..(114): n is a, g, c or t
  misc_feature (115)..(115): n is a, g, c or t
  misc_feature (116)..(116): n is a, g, c or t
  misc_feature (117)..(117): n is a, g, c or t
  misc_feature (118)..(118): n is a, g, c or t
  misc_feature (119)..(119): n is a, g, c or t
  misc_feature (120)..(120): n is a, g, c or t
  misc_feature (121)..(121): n is a, g, c or t
  misc_feature (122)..(122): n is a, g, c or t
  misc_feature (123)..(123): n is a, g, c or t
atggcaacgctggcagccgacggctcgcccatcactcatcagtatggcctcagactgtattttgtgtactcggnnnnnnnnnnnnnnnnnnnnnnnnnnnnnnnnnnnnnnnnnnnnnnnnnnggatggaagcgactcatttgggcggacaagaatgtcaggaatctgttccttttcctcatattgaacttcagctttgcattcgtagagcttacatatggcgtttggaccaacagtttaggactgatatcggacagttttcacatgttctttgactgcactggcctaatagttggtctatctgcttcagtaataacaaaatggcgagccaatgagcgattttcctatggatacgtgagagctgaagtacttggtggtatggtgaacggactgtttttggtctttgtggcatttttcataatgtcagaagctgtggaaagagccattgaacctccggaagtcaagcatgagagactgttcttggtatctgtacttggccttttggtgaatatcataggaattttcgcatttaaccatggtcatggcggagacagctgtagccatggacatggtcatgggcatagccataaccatggccatagtcatagtcatggacattcgcattctcacaatcatggccattctcataatcatcatgatcatgctcacaatcaccataacattgatattgatcactcccacggaagttccggcaactcgcaaatcatgaagggagttttcttacacatcttggccgataccctcggttcagttggagtaatcatatcggctgtattgatgcaaatgtttggatggatgatagcagatccaatctgctctatgtttatcgctgttttgatattcatcagtgttctgcctcttttaaatgaatctataaatatacttatgcagaggcagcccaagtcattggatcatattttgcctcagtgctacaacaaagttacacagctggctggtgtctacagtgttcaagatccacacttttggactttgtgctctgacatttacgtaggttgtttgaaattagaagttgcaagaactgttgacccgaaatatgttgttgcgcatacacagatgatattccaagcagctggcgttaggcagttgactgtccaactagattattcgtcatcgtga

SEQ ID NO: 36185 - protein, 385 aa, Nasonia vitripennis
  misc_feature (25)..(25): The Xaa at location 25 stands for Ala, Asp, Glu, Gly, or Val.
  misc_feature (26)..(26): The Xaa at location 26 stands for Stop, Ala, Arg, Asn, Asp, Cys, Gln, Glu, Gly, His, Ile, Leu, Lys, Met, Phe, Pro, Ser, Thr, Trp, Tyr, or Val.
  misc_feature (27)..(27): The Xaa at location 27 stands for Stop, Ala, Arg, Asn, Asp, Cys, Gln, Glu, Gly, His, Ile, Leu, Lys, Met, Phe, Pro, Ser, Thr, Trp, Tyr, or Val.
  misc_feature (28)..(28): The Xaa at location 28 stands for Stop, Ala, Arg, Asn, Asp, Cys, Gln, Glu, Gly, His, Ile, Leu, Lys, Met, Phe, Pro, Ser, Thr, Trp, Tyr, or Val.
  misc_feature (29)..(29): The Xaa at location 29 stands for Stop, Ala, Arg, Asn, Asp, Cys, Gln, Glu, Gly, His, Ile, Leu, Lys, Met, Phe, Pro, Ser, Thr, Trp, Tyr, or Val.
  misc_feature (30)..(30): The Xaa at location 30 stands for Stop, Ala, Arg, Asn, Asp, Cys, Gln, Glu, Gly, His, Ile, Leu, Lys, Met, Phe, Pro, Ser, Thr, Trp, Tyr, or Val.
  misc_feature (31)..(31): The Xaa at location 31 stands for Stop, Ala, Arg, Asn, Asp, Cys, Gln, Glu, Gly, His, Ile, Leu, Lys, Met, Phe, Pro, Ser, Thr, Trp, Tyr, or Val.
  misc_feature (32)..(32): The Xaa at location 32 stands for Stop, Ala, Arg, Asn, Asp, Cys, Gln, Glu, Gly, His, Ile, Leu, Lys, Met, Phe, Pro, Ser, Thr, Trp, Tyr, or Val.
  misc_feature (33)..(33): The Xaa at location 33 stands for Stop, Ala, Arg, Asn, Asp, Cys, Gln, Glu, Gly, His, Ile, Leu, Lys, Met, Phe, Pro, Ser, Thr, Trp, Tyr, or Val.
  misc_feature (34)..(34): The Xaa at location 34 stands for Stop, Ala, Arg, Asn, Asp, Cys, Gln, Glu, Gly, His, Ile, Leu, Lys, Met, Phe, Pro, Ser, Thr, Trp, Tyr, or Val.
  misc_feature (35)..(35): The Xaa at location 35 stands for Stop, Ala, Arg, Asn, Asp, Cys, Gln, Glu, Gly, His, Ile, Leu, Lys, Met, Phe, Pro, Ser, Thr, Trp, Tyr, or Val.
  misc_feature (36)..(36): The Xaa at location 36 stands for Stop, Ala, Arg, Asn, Asp, Cys, Gln, Glu, Gly, His, Ile, Leu, Lys, Met, Phe, Pro, Ser, Thr, Trp, Tyr, or Val.
  misc_feature (37)..(37): The Xaa at location 37 stands for Stop, Ala, Arg, Asn, Asp, Cys, Gln, Glu, Gly, His, Ile, Leu, Lys, Met, Phe, Pro, Ser, Thr, Trp, Tyr, or Val.
  misc_feature (38)..(38): The Xaa at location 38 stands for Stop, Ala, Arg, Asn, Asp, Cys, Gln, Glu, Gly, His, Ile, Leu, Lys, Met, Phe, Pro, Ser, Thr, Trp, Tyr, or Val.
  misc_feature (39)..(39): The Xaa at location 39 stands for Stop, Ala, Arg, Asn, Asp, Cys, Gln, Glu, Gly, His, Ile, Leu, Lys, Met, Phe, Pro, Ser, Thr, Trp, Tyr, or Val.
  misc_feature (40)..(40): The Xaa at location 40 stands for Stop, Ala, Arg, Asn, Asp, Cys, Gln, Glu, Gly, His, Ile, Leu, Lys, Met, Phe, Pro, Ser, Thr, Trp, Tyr, or Val.
  misc_feature (41)..(41): The Xaa at location 41 stands for Stop, Ala, Arg, Asn, Asp, Cys, Gln, Glu, Gly, His, Ile, Leu, Lys, Met, Phe, Pro, Ser, Thr, Trp, Tyr, or Val.
MATLAADGSPITHQYGLRLYFVYSXXXXXXXXXXXXXXXXXGWKRLIWADKNVRNLFLFLILNFSFAFVELTYGVWTNSLGLISDSFHMFFDCTGLIVGLSASVITKWRANERFSYGYVRAEVLGGMVNGLFLVFVAFFIMSEAVERAIEPPEVKHERLFLVSVLGLLVNIIGIFAFNHGHGGDSCSHGHGHGHSHNHGHSHSHGHSHSHNHGHSHNHHDHAHNHHNIDIDHSHGSSGNSQIMKGVFLHILADTLGSVGVIISAVLMQMFGWMIADPICSMFIAVLIFISVLPLLNESINILMQRQPKSLDHILPQCYNKVTQLAGVYSVQDPHFWTLCSDIYVGCLKLEVARTVDPKYVVAHTQMIFQAAGVRQLTVQLDYSSS

SEQ ID NO: 36186 - DNA, 996 bp, Nasonia vitripennis
  CDS (1)..(996)
atggcacagcttgaggatcactgtcaccgagagaggaacgaagatatcgataaaaaggcacgtaaaaagctgataatcgccagcgtattatgcgtcgtttttatgataatggaaatagtcggaggagtgatgtcgaacagtttggcgatagccactgacgcggctcacttactcaccgacttcgcgtccttcatgatatcattgttttcgatatgggtggcgagcaggccgccgaccaagaaaatgccctttgggtggtatcgagctgaggttatcggagctttgacatcggttctgttgatttgggtggtgacaggtgttctgttcttccttgcggttgagcggataatcaacaagaacttcgagctcgacgcttccgtgatgttgatcacgtccgcggtgggagttgccgttaatttagtaatgggcctaaccctgcatcagcacggtcacggtcacggcggccacagccacggtcacgaccacggccacgatcacaacggagccaccgacaggaacatcaacgtcagggctgccttcgtacatgtgctcggcgatttcattcaaagcgccggcgtcttcattgccgcgctcgttatctacttcaagccggagtggagcatagtggatccgatctgtacgttcctcttctcgattctggtggtgctgaccacagtggccatcatcaaggacgtcatcaacgtcctcatggaaggtattcccaaaggcttcgattactcgcaggtcgagagcacgtttatgcagatcgacggcgtcgtcaaggtccacaatttgagaatctgggctctctccctggacaagaccgccctgtcggctcacctcgccataagaccaggagttagcccccagacgatcctgcgaacggccacgaggaacatccacgagaagtacagcttcttcgagatgactcttcagatcgaggaattcgacgagaagatggaaaactgcaagcagtgcaagcctccggttcagtaa

SEQ ID NO: 36187 - protein, 331 aa, Nasonia vitripennis
MAQLEDHCHRERNEDIDKKARKKLIIASVLCVVFMIMEIVGGVMSNSLAIATDAAHLLTDFASFMISLFSIWVASRPPTKKMPFGWYRAEVIGALTSVLLIWVVTGVLFFLAVERIINKNFELDASVMLITSAVGVAVNLVMGLTLHQHGHGHGGHSHGHDHGHDHNGATDRNINVRAAFVHVLGDFIQSAGVFIAALVIYFKPEWSIVDPICTFLFSILVVLTTVAIIKDVINVLMEGIPKGFDYSQVESTFMQIDGVVKVHNLRIWALSLDKTALSAHLAIRPGVSPQTILRTATRNIHEKYSFFEMTLQIEEFDEKMENCKQCKPPVQ

SEQ ID NO: 36188 - DNA, 1059 bp, Apis mellifera
  CDS (1)..(1059)
atgcttcctctttcacacaaagattcaagaaaccttggcagtagaataaaggagaaattattaggatggaaacgtttgatattttctgataaaaatactagaaatttatttttatttcttttattgaatttatcctttgcctgcattgaattaatgtatggaatatggacaaacagcttgggtttaatatcggatagtttccatatgttctttgattgtactggcttattatttggtttggctgcatcagttattacaaagtggagagcaaatgaacgatattcttatggctatgtcagagcagaagttttaggaggatttgtcaatgctctgcttttattctttatcgctcttttcattatgtctgaagctgtggaaagagccattgaacctccagagattaaacacgaaagacttttggttgtgtccattatgggattaatagtcaatttagtaggaatgtatgtatttcgtcatggacatggacatagtcatggaatgggacatggtcattcccattcccattctcatggaagtcatacacaatctcatttaaaccacagtcatagtcatgatcatcatgatatagaaattgatccttccttcagtggtacaaattctcagatcatgaaaggagttttcttacatatcttagcagacactcttggatctgtaggtgtaattatatcagcagtactgatgcgtctatttggttggtttatagctgatccaatttgttccatgctgatatcagtattgatagttttaagtgtgctttctttaatgaaagattcatgggaaattttaatgcaaagacaaccagctgcattggatcatattttaccacagtgttataacaaagtgacacaattagctggagtatatagtgtgcaagaaccacatttctggacactttgttcagatgtgtacgtcgggtgcttgaaattggaagttgccagaacagtagagcctaaatatgttgtagcacacactcaaatgatttttcaagctgctggagtaaggcatttaactgttcaattagattatgcacctatgtga

SEQ ID NO: 36189 - protein, 352 aa, Apis mellifera
MLPLSHKDSRNLGSRIKEKLLGWKRLIFSDKNTRNLFLFLLLNLSFACIELMYGIWTNSLGLISDSFHMFFDCTGLLFGLAASVITKWRANERYSYGYVRAEVLGGFVNALLLFFIALFIMSEAVERAIEPPEIKHERLLVVSIMGLIVNLVGMYVFRHGHGHSHGMGHGHSHSHSHGSHTQSHLNHSHSHDHHDIEIDPSFSGTNSQIMKGVFLHILADTLGSVGVIISAVLMRLFGWFIADPICSMLISVLIVLSVLSLMKDSWEILMQRQPAALDHILPQCYNKVTQLAGVYSVQEPHFWTLCSDVYVGCLKLEVARTVEPKYVVAHTQMIFQAAGVRHLTVQLDYAPM

SEQ ID NO: 36190 - DNA, 1221 bp, Apis mellifera
  CDS (1)..(1221)
atggacgacgaaaggatcaagctattcaaagacaaagctgtgtatggatatggaacaagtattccgcccaataataatgaagcggatgagaatgaagcctcgccgaaaaaagtgatcttttgtgtgcacggtaaactttcgggttgctgtacggttgtgaagggcgccacatcgatcgacgagactgcaaacactacaatcaacatttctgccgccactgctatcgatggaactgattttcaacaaacttcttccgctgtactggaagaccattgtcatagggaaaggaacgaggagatcgataaaaaggcaagaaagaaattactgattgctagtacgctatgtgtaatttttatgatagcagaaatcgtaggtggaatattgtcaaatagtttagcgatcgcaacagatgccgcgcatttattaactgatttcgcctcgtttatgatatccttgttctcgatatgggtagcgagcagaccggccacaagaaaaatgccttttggctggtatcgagcagaagtaataggagctctaacatcggttttattgatatggatagttactggaattcttttttacttggcaatcgaaagaataattcataaaaactttgaactaaatacaaccgtcatgttgatcacctctgctgtgggcgttgcggtaaatctagtaatgggtttatcgttgcatcagcatggtcatagtcacggacatagtcatggacatagtcataaaaagaacatcaatgttcgtgctgcttttatccatgttataggagatttcattcaaagcgttggagtttttgttgcagcattagttatttatttcaagccaagctggattatagtcgatccaatttgcacttttctcttttcattattggtaatattaactacagttgcgataattaaagacgtgatgaatgtcttaatggaaggaattccaaaaggatttgaatattcccaagtagagagtacatttatgcaaatcgaaggtgtggttaaagtgcataatcttcgtatctgggcactgtcgttggataaaactgcactctccgctcatctcgcaataaaaccaggtgcaagtcctcacaatatattacgtactgccactagaaatattcacgataaatacaaattcttcgaaatgacacttcaaatagaagaatttgatgaacgaatggaaaattgtaaacaatgcaaggcattatcgcaataa

SEQ ID NO: 36191 - protein, 406 aa, Apis mellifera
MDDERIKLFKDKAVYGYGTSIPPNNNEADENEASPKKVIFCVHGKLSGCCTVVKGATSIDETANTTINISAATAIDGTDFQQTSSAVLEDHCHRERNEEIDKKARKKLLIASTLCVIFMIAEIVGGILSNSLAIATDAAHLLTDFASFMISLFSIWVASRPATRKMPFGWYRAEVIGALTSVLLIWIVTGILFYLAIERIIHKNFELNTTVMLITSAVGVAVNLVMGLSLHQHGHSHGHSHGHSHKKNINVRAAFIHVIGDFIQSVGVFVAALVIYFKPSWIIVDPICTFLFSLLVILTTVAIIKDVMNVLMEGIPKGFEYSQVESTFMQIEGVVKVHNLRIWALSLDKTALSAHLAIKPGASPHNILRTATRNIHDKYKFFEMTLQIEEFDERMENCKQCKALSQ

SEQ ID NO: 36192 - DNA, 1140 bp, Strongylocentrotus purpuratus
  CDS (1)..(1140)
atgaatttggaaaaggggcggcaacggaccacgccctcctatggcgctgtgaaggatgacgaaggggacaaggacaaccccatcaacgccaaaagaggggccctactgaatggagctaaggcgagactcatcttcgcactctgtctttgtatgcttatcgtgatagctgaaattgtaggtagtattttatctggaagtttagccatcgtggctgacgcaggtcatcttctaactgatgttgtcacctacatcatcagtcttacctcaatctggcttgcaaagaaaccgccttccaagaagttcacttacggtttactacgtgccgaggtcgttggggccctgttttctatcatcttatccatctgtctcgcggtcgttctcacctattttgccgctttgaggatcgccaaccgtgacttcgatatcaatggccaggttatggtcatcatcggagttatcaacttcgtcggaaatatcatacaaattatccagctccagttcgggttctgctgctgtgcaaatctatgtggcgaggaggaggaaggtcttcttgccagcgggcacgggcacagccatgggggcgggcacgggcacagccatggctcccttttcggcggtgggagcaaggatgatgagatcaacaatcacatgaatgtacgagccgcatgtctgcacatatttggcgactctcttttcgggtttgggcttcttgtggccgccttgatcatctattttaagcccgagcttaaaattctggatccgattctaaccattatcttcgggttcatcgtactaggcactctcttcggtttgttcaaggaaagcatccatatactcatggcaggtaaaccgacgggtgtagattatgatgaagccaagagaaggctggtcgaaatagacggagttgagggcgtgcattcactcaggatatggtctctaacttcagatgttccccttgtatgcgtccatcttattttagctcggttttatgacggtcggccagttgatgcgcccaagatactccgagacgctcgtcatatcctggagactcacttcggcgtcgtacattccaccattcagatagagactgtggaagatggagtagaattcctatgtgcaagaactaccggacccgcgtag

SEQ ID NO: 36193 - protein, 379 aa, Strongylocentrotus purpuratus
MNLEKGRQRTTPSYGAVKDDEGDKDNPINAKRGALLNGAKARLIFALCLCMLIVIAEIVGSILSGSLAIVADAGHLLTDVVTYIISLTSIWLAKKPPSKKFTYGLLRAEVVGALFSIILSICLAVVLTYFAALRIANRDFDINGQVMVIIGVINFVGNIIQIIQLQFGFCCCANLCGEEEEGLLASGHGHSHGGGHGHSHGSLFGGGSKDDEINNHMNVRAACLHIFGDSLFGFGLLVAALIIYFKPELKILDPILTIIFGFIVLGTLFGLFKESIHILMAGKPTGVDYDEAKRRLVEIDGVEGVHSLRIWSLTSDVPLVCVHLILARFYDGRPVDAPKILRDARHILETHFGVVHSTIQIETVEDGVEFLCARTTGPA

SEQ ID NO: 36194 - DNA, 1221 bp, Strongylocentrotus purpuratus
  CDS (1)..(1221)
atgctctctaccaagagctgtcgtctcatgacgatgatggtgctgacagcgagcttcttcttcgtggagctcagcgtaggatacatcacacattccctcgctctcgtggcggattccttccacatgctgtccgacatcatcgccctcattgtaggctttgtagcagtcaggtatgctaaacgtgacactccaaagaacacatatggctggcaaagagcggaggtggttggagcccttgtcaatgcagtctttctcttcgccctgtgctttacaatattagtagatgccattgagcgccttgttcagggagataaaatcaaagaccctcgcttggttcttatcgttggtggggtcggccttgcagtcaaccttttaggaattttgctgtttagttcacacggtggaggccatgggcacagccatgcatcatcggtgaaggagcctgaagaaagggtagctctcgctaacggaaccaagggacaggatgatttgaatatttacaaatataccaaaaagagtgataaaagcaaggtgacaacaaataccttctatcacagcccttcagcgcagcaactgaacatgagaggcgttttccttcacgttcttggcgacgccctaggttcggtggtggttataatcagtgccctcgtagtcatgtttgccgacggtgattgggtgttctgcgtggatcctgtactcagtattcttattgttataatcattagcaccacaacgtggccattatttaaacagtctagcatgatcctgttgcagtctatacctactggcattgatattgaagatattgacaagaaactacgagaagagtgtagctatatcgacaacattcatgagttccacgtatggcagttaacaggttccaaactcatcgccacgctgcacatcagtgtttcatcgttagaggagtatggaaaggttattgaacaggccacaaaaatacttcaccaagagggaatccatagcactacaattcaaccagagtttatttgtatgagagaaagctcgaaggagaactgtgtaataccttgtcccactgatgcctgctcagatacaaacaaatgctgcagtgccacacggcgtatcgcagcaggaaacagcaagagtgcccagaccatgtcgcagctgcagatggaagtcaacgacctggaggatgaaccttttacacagtcacctgatgaagagatgcaggttggttgttga

SEQ ID NO: 36195 - protein, 406 aa, Strongylocentrotus purpuratus
MLSTKSCRLMTMMVLTASFFFVELSVGYITHSLALVADSFHMLSDIIALIVGFVAVRYAKRDTPKNTYGWQRAEVVGALVNAVFLFALCFTILVDAIERLVQGDKIKDPRLVLIVGGVGLAVNLLGILLFSSHGGGHGHSHASSVKEPEERVALANGTKGQDDLNIYKYTKKSDKSKVTTNTFYHSPSAQQLNMRGVFLHVLGDALGSVVVIISALVVMFADGDWVFCVDPVLSILIVIIISTTTWPLFKQSSMILLQSIPTGIDIEDIDKKLREECSYIDNIHEFHVWQLTGSKLIATLHISVSSLEEYGKVIEQATKILHQEGIHSTTIQPEFICMRESSKENCVIPCPTDACSDTNKCCSATRRIAAGNSKSAQTMSQLQMEVNDLEDEPFTQSPDEEMQVGC

SEQ ID NO: 36196 - DNA, 1290 bp, Tribolium castaneum
  CDS (1)..(1290)
atgcacagtgacagtagcggcactcctaaaaaagtgatattttgtgttcatggaaaaccaagtgctggttgctgcaaagttttacaaagtgaagtcatcgacatcaaagagggagattcggttgatacaccgaccaaagaaaatcaggatgccaccgaaatgattaataaacattgccatcgagggaaatctccggaaattgatcgcaaagctaggcgaaaattaattgtagctagtgtattatgtgtacttttcatgatcggagaagttataggtggctacctgtcaaatagcttggcaatagcctctgatgccgctcaccttcttaccgactttgcgagttttatgatatctctgtttgccttatggatggcaactaggccctccaccaagacaatgcactttgggtggtaccgcgctgaagtgataggtgctctgacttccgtcctactaatttgggtagttactggaatactggtctacattgccgtacaaagagtcatccataagtcctttgatatcgatagtaaagtaatgctaatcacctccggtatcggcgttattgtgaacttaataatgggtttaacactccaccaacatgggcattcccatggaggtggtagcacacattcccacgataacatcaacgtcagagcggcttttattcacgttatcggcgactttttgcaaagttttggtgttttcgtggccgctgctgtgatttatttcaacgaacaatgggtcataattgaccccatctgtaccttcattttttcagtattagtgatgtttaccacgttcaatattatcaaagatacgttaacagtgctgatggaaggagctcccaaaggaattgatttcaatcaagtcatgaaaacgcttctaaatatagaaggagttaaaagagttcataacttgagaatatggggcctaagtttggataaaattgcaatgtctgctcatgttgctattatcacgggacaatcaagttggctacgtgacgtcgggaggctcgatcaccaggcgctcgctgattggctggcgggacacacctccggctccggtaaattccgcggatttaacgctcccagacctggacccacccccgcacttctggacccgaatgaagcaaagatggaacggtggtcatcagttgcttccaacgacagacagcccaactatctctgcctgtacgacttccacaaatttgtcgaatttggaattccagtccagttcgactctcaatcaacaaatttactacgggaacaacttaagaagagcggtacctga

SEQ ID NO: 36197 - protein, 429 aa, Tribolium castaneum
MHSDSSGTPKKVIFCVHGKPSAGCCKVLQSEVIDIKEGDSVDTPTKENQDATEMINKHCHRGKSPEIDRKARRKLIVASVLCVLFMIGEVIGGYLSNSLAIASDAAHLLTDFASFMISLFALWMATRPSTKTMHFGWYRAEVIGALTSVLLIWVVTGILVYIAVQRVIHKSFDIDSKVMLITSGIGVIVNLIMGLTLHQHGHSHGGGSTHSHDNINVRAAFIHVIGDFLQSFGVFVAAAVIYFNEQWVIIDPICTFIFSVLVMFTTFNIIKDTLTVLMEGAPKGIDFNQVMKTLLNIEGVKRVHNLRIWGLSLDKIAMSAHVAIITGQSSWLRDVGRLDHQALADWLAGHTSGSGKFRGFNAPRPGPTPALLDPNEAKMERWSSVASNDRQPNYLCLYDFHKFVEFGIPVQFDSQSTNLLREQLKKSGT

SEQ ID NO: 36198 - DNA, 1041 bp, Tribolium castaneum
  CDS (1)..(1041)
atgttgccactgtcgcacaaggataatttgcaccggggcttcgggtcccgaattaaggagaagttgaacgggtggatgaggttaattttttccgacaggaactcccgcaatttgtttctgttcctgcttctgaacctctcgtttgcgtttgtagagttagtttatggtgtatggtctaatagcttaggtttaatatccgattccttccatatgtttttcgactgtactggcttattagccggcttggccgcgtccgtaatcacgaaatggaaagccaacgagaaatattcgtacggttacgtccgtgctgaggttttggccggttttgttaatgggttgtttttgctttttatctcgttttttatcatgtcggaagctgtagagcgtgcaatagagccccctgaggtgaaacacgagaggttgtttctggtctcagtgctgggccttttagtcaatttggtgggaatttacgccttccagcacggccatgggcactcccacggtggtggcggccacggtcactcccatgggcacaaccacaactcccatggtcactcccacgaccacactctggacatagatatagcagcaagtggtaattcgcaaataatgaaaggagtgttcctccacatcctggccgacactttgggaagtgttggtgtaataatttcggcagtgttaatgcaaatgttcggttggatgattgctgatccaatttgttcgatgtttattgcgattttaatagcgttaagtgtgctagcgttgattaaagattccgttgttattttaatgcagagacagccgtatgcacttgataatgttttgccgcagtgttaccagaaagtggtcagtttgccaggcgtttattcggtgcaagagccccatttttggaccctttgtagtgaggtttacgtgggggcgcttaaattggaagtatcaaaaaatgttgatcctaaatatgtcgtgtcgcacacgcaaatgatttttgcgtcggtgggggttaggcagatttatgtgcaacttgactatactccaatgtga

SEQ ID NO: 36199 - protein, 346 aa, Tribolium castaneum
MLPLSHKDNLHRGFGSRIKEKLNGWMRLIFSDRNSRNLFLFLLLNLSFAFVELVYGVWSNSLGLISDSFHMFFDCTGLLAGLAASVITKWKANEKYSYGYVRAEVLAGFVNGLFLLFISFFIMSEAVERAIEPPEVKHERLFLVSVLGLLVNLVGIYAFQHGHGHSHGGGGHGHSHGHNHNSHGHSHDHTLDIDIAASGNSQIMKGVFLHILADTLGSVGVIISAVLMQMFGWMIADPICSMFIAILIALSVLALIKDSVVILMQRQPYALDNVLPQCYQKVVSLPGVYSVQEPHFWTLCSEVYVGALKLEVSKNVDPKYVVSHTQMIFASVGVRQIYVQLDYTPM

SEQ ID NO: 36200 - DNA, 1332 bp, Tribolium castaneum
  CDS (1)..(1332)
atgccaaaatgggccggaaaaaagtgtcgtctgctctcgatgttggggctgacgacgtccttcttcttcgtcgaaatagtcgtaggttacataacaaattcgatggctttggtcgcggacagtttccacatgctaagcgacgtggccgccttgatggtggcctttgtctcagtcaagatgtctccgaagaagtggtcgaaaaacacgttcggttgggccagagctgaagtccttggtgctttagtcaacgccgtcttcctcgtagctctttgtttttccattacagtggaagcttgcaaacggttcatcgagagcgaagcgattcacgacccacaattgttggtcattgtgggtgcgttgggtctgtttgttaattgtataggactgctgttgtttcatgagcatggtagtagccatggtcattcccatggtcgtttggcccatagtcgaaaccgcctaacacaactagccatgactgacgataacgaaaacgacgaaagttatcccagtcctccgccggagaaatcctcccatcatgggcactcaagccccggacagatgaacatgaggggggttttcctccacgtgttgtccgacgctttaggctcagttatcgtaattatatcagcagttgtcttctggctgtcgtcgtggaaatacaggaattacatcgacccagctttgagcatactgctggtattgttaataatgaactctgtatggcctttgttgcgagactcggctttaattttactacaaactgtcccgacgcatattcaagtcgacgcaatccagcggaggttactggcgaaagtcgacggagtcgtaggagtgcacgagtttcacgtctggcaattggccggagaccgaatcatagcttcagcccacattaagtgccgtaatttatccgaatacatgaaaatcgcggaaaaagtcaaagaattcttccacaacgaaggcatccactcgacgacaatccaaccagagttcattgattaccaagctccggaaatcacagatactgaccaaaccgaagattgtgttcttgattgtcccaaaaccacagacagtgacgactgcgtgcaaaacacatgctgcggtccatcgaaacaaggacgtgagacgccctcgcccaataacaccccgtatatggtccgtcagcgcggcaattccagcaacagttcgaacaattcgcaggaaatgaacgaaatggaggcgggagtgcttttggaaaaaggtaattctccagtgcccaaagactacaattgtatctcaaggggttcacagtgttcgcaatactcagtaagacctggttcagaaccaagtttctga

SEQ ID NO: 36201 - protein, 443 aa, Tribolium castaneum
MPKWAGKKCRLLSMLGLTTSFFFVEIVVGYITNSMALVADSFHMLSDVAALMVAFVSVKMSPKKWSKNTFGWARAEVLGALVNAVFLVALCFSITVEACKRFIESEAIHDPQLLVIVGALGLFVNCIGLLLFHEHGSSHGHSHGRLAHSRNRLTQLAMTDDNENDESYPSPPPEKSSHHGHSSPGQMNMRGVFLHVLSDALGSVIVIISAVVFWLSSWKYRNYIDPALSILLVLLIMNSVWPLLRDSALILLQTVPTHIQVDAIQRRLLAKVDGVVGVHEFHVWQLAGDRIIASAHIKCRNLSEYMKIAEKVKEFFHNEGIHSTTIQPEFIDYQAPEITDTDQTEDCVLDCPKTTDSDDCVQNTCCGPSKQGRETPSPNNTPYMVRQRGNSSNSSNNSQEMNEMEAGVLLEKGNSPVPKDYNCISRGSQCSQYSVRPGSEPSF

SEQ ID NO: 36202 - DNA, 1014 bp, Tribolium castaneum
  CDS (1)..(1014)
atggagacactgtgtgagcatgttgacgccgacgacgaaaatttcctcctcgatgatgaaaacgctatcaaaagctgtaataaatgcaaaagtccttccaatggttttgtaacaatggacgaccacgttgacacccttgaagattcaccacttctcatcaatgattgctatcatgacgaattccattgccacaacattttgcaacaatccgaagacaaaaaagcctggaagaaactcctaattgcggcaattctgtgcttcttttttatgattacggaactaattggtggttttattgccggtagtcttgccgtaatgacagatgcggcgcatcttttctcagattttatcgggtttcttatttcgcttttatcaatttgggtggcacgtaaagctcccacaagaaatatgacttttgggtattacagagcagaggttttgggcgcatttttgagcgttttaaccgtttggttactcgccggcgtttttgcagtacttgcaattaacagattgttgaagaaagaatacgatattgaagctaatactatgatgttggtggcctcattaggccttgttgtaaatattgtgatgggggctgtgcttttcggcttttgtcacaaccacagtcatggccttagcgaccaaagcaattcgaatattaacgtgcgagctgcagcagctcacgttctgggcgaccttttacaaagtttaggggtgcttatagcttcaattattattaaagtgtttcctagtgccaaagtggccgacccgatttgcactttaattttttcagcggttgttattttcacaactgctaaagttgcaaaagattccatttggttgttactggaaggcagtcccaaacattccggtgatctagcatttgagttattaaatatttcgaatgttagacatcttcataatttacatatctgggctctatctcctgggaaggatgccgtttcagtccatttgtgtgttggtgagtttcattatttgtttttattccagtaa

SEQ ID NO: 36203 - protein, 337 aa, Tribolium castaneum
METLCEHVDADDENFLLDDENAIKSCNKCKSPSNGFVTMDDHVDTLEDSPLLINDCYHDEFHCHNILQQSEDKKAWKKLLIAAILCFFFMITELIGGFIAGSLAVMTDAAHLFSDFIGFLISLLSIWVARKAPTRNMTFGYYRAEVLGAFLSVLTVWLLAGVFAVLAINRLLKKEYDIEANTMMLVASLGLVVNIVMGAVLFGFCHNHSHGLSDQSNSNINVRAAAAHVLGDLLQSLGVLIASIIIKVFPSAKVADPICTLIFSAVVIFTTAKVAKDSIWLLLEGSPKHSGDLAFELLNISNVRHLHNLHIWALSPGKDAVSVHLCVGEFHYLFLFQ

SEQ ID NO: 36204 - DNA, 978 bp, Rhodobacter sphaeroides 2.4.1
  CDS (1)..(978): transl_table=11
atgggacacgatcacagtcacgggcacgatcatgcacacgggcatgggcacgcacatcgacatggacatgcggggcattcgcacggtccgaccctctcggccaatgacacgcccgaggcgcgccgctccaaggaacgcgccatcctcatcgccgcagccctgacgggcggcttcatgggggccgaggtcatcggcgggctcatctccggatcgctcgcgcttctggccgatgcgggccacatgctgaccgacttcgcctcgcttctgctggcttggttcgccttccggctggcgcggcgaccggcggattggaagcggacctacggcttcgaccgcttctcggtgctggccgccttcgtgaacggggtcacgctgttcgccatcgcggggtggatcgtcttcgaggccatccagcgcctgcgcgacccgcacggggtgctgggcgggctgatgctctgggtcgccgtggggggactcgtggtgaacgttctggctttctgggtgctcagccgcgcagagggcgacaacctcaacgtccgtgccgccgccctgcacgtcatgggagatctgctcggctcggttgcggcgattgcggcctcgctcatcatcatctggacaggctggacccccatcgacccgatcctgtccgtgctggttgctctcctcatcctgcgctcggcgtggtccgtggtgcgcgagagcggccatatcctgctcgaaggcgcgccggcgggcttcgacgcccgcgccgtcgcgaccgacctcgaagccacgctgcccggagtggcccgcgcctatcacgtccacgcctggtcgatcactcaggagcggcccatggccacgctggagatcgagctcgcgccgggcgcggtggcggacgacgtgcgccgcgccgtgaaaggccgcgtgcgcgagacgaccgggatggagcatgtgaccgtcgaggtggcggcaggcgcagagcacaggaggggttaa

SEQ ID NO: 36205 - protein, 325 aa, Rhodobacter sphaeroides 2.4.1
MGHDHSHGHDHAHGHGHAHRHGHAGHSHGPTLSANDTPEARRSKERAILIAAALTGGFMGAEVIGGLISGSLALLADAGHMLTDFASLLLAWFAFRLARRPADWKRTYGFDRFSVLAAFVNGVTLFAIAGWIVFEAIQRLRDPHGVLGGLMLWVAVGGLVVNVLAFWVLSRAEGDNLNVRAAALHVMGDLLGSVAAIAASLIIIWTGWTPIDPILSVLVALLILRSAWSVVRESGHILLEGAPAGFDARAVATDLEATLPGVARAYHVHAWSITQERPMATLEIELAPGAVADDVRRAVKGRVRETTGMEHVTVEVAAGAEHRRG

SEQ ID NO: 36206 - DNA, 912 bp, Listeria monocytogenes str. 4b F2365
  CDS (1)..(912): transl_table=11
atggcacataaccacgatcatgctcatggacacaatcataatcatgcgcataatgccaacaaaaaatcattatttatcagttttattctaattgctacatttatggtagtcgaagttattggtggaattatgaccaatagtttggcgctactttctgatgcggggcacatgctctctgacgccgtggcgctaggtttaagtttagctgcatttaaatttggcgaaaaagcagcaagctccgataaaacatatggctataaaagatttgaaattttagctgcatttcttaatggattaacgctcgttgggatttctgtttttatattctatgaagcgattggtcgcttctttgatccgccacaagtaattggagctggaatgatgactatttctgttatcggattgcttattaatattttggtcgcttggattttaatgaaaggtgacactagcgaaaatttgaatatgcgtagtgcgttcttgcatgtgcttggagatttgcttggctctgttggtgcgattattgccgcgttactcattattttccttggctggaatatcgctgacccgattgcgagtgttattgttgcggcacttatcttagttagtggttggcgtgtactgaaagatgcgattcatattttgatggaaggaaaaccagcgaatgtcgatacagaagaaatcaaaacgtttttccaacagcaagacggtgtgaaagaagtgcatgatttacatgtatgggcgattacttcggatttcaatgctcttacagctcatttgaccgtatgcgaagatgccgaccgagataagattttggcagatattgagcattatttgcaagaaaatttctcattagaacatagtacgattcaacttgaaggaaatcacgctcaccatcatcactgcaattaa

SEQ ID NO: 36207 - protein, 303 aa, Listeria monocytogenes str. 4b F2365
MAHNHDHAHGHNHNHAHNANKKSLFISFILIATFMVVEVIGGIMTNSLALLSDAGHMLSDAVALGLSLAAFKFGEKAASSDKTYGYKRFEILAAFLNGLTLVGISVFIFYEAIGRFFDPPQVIGAGMMTISVIGLLINILVAWILMKGDTSENLNMRSAFLHVLGDLLGSVGAIIAALLIIFLGWNIADPIASVIVAALILVSGWRVLKDAIHILMEGKPANVDTEEIKTFFQQQDGVKEVHDLHVWAITSDFNALTAHLTVCEDADRDKILADIEHYLQENFSLEHSTIQLEGNHAHHHHCN

SEQ ID NO: 36208 - DNA, 900 bp, Bacillus thuringiensis serovar konkukian str. 97-27
  CDS (1)..(900): transl_table=11
atgggacattcgcatgatcatgggcattctaaaaataaaaaagcgttgctacttgcattcttactaacaacaagttttatgattgctgaagttattgggggatttgtaacaaatagtttagcactactatctgacgcggggcatatgttaagtgatgcggtatctttagctttaagtttacttgcgtttaagctaggagaaaaaacagcaacaactgcgaaaacatatggatataagcgagtcgaaatgttagcggcattatgtaacggtgtcgtccttattgtcatttcaatatacatttttattgaagcaattcgtcgttttaaagagccagttgagattgctagtaatgggatgcttattattgctgtacttggtctacttattaatattttatcagcttggatattaatgagaggcggagatgtaaaggggaatttgaatttaagaagtgctttcttacacgtattaggtgatctattaggatcagttggagcgattattgctgcgttacttattaaatttttcggatggactgctgcagatgcgattgctagtattcttgtgtctattttagtcattattagtggatggcgtgtaacacgtgatacggtccatatattaatggaaggtgcaccacagcacataaatgttgaagaggtaaaaagtacattattaaatattacggttgtaaaagaagttcatgatttgcacatatggtctgtcacatcggattttcaagtattaacttgccacttgattattaaaggaaatgaaacacaaagtgtattaaaagaggctacggaagtattaaaagagaagtttcatgtagaacatgtcaccattcaagtagaaatagatggtgaatttcatcatagtgagacaacttgcaaagtatga

SEQ ID NO: 36209 - protein, 299 aa, Bacillus thuringiensis serovar konkukian str. 97-27
MGHSHDHGHSKNKKALLLAFLLTTSFMIAEVIGGFVTNSLALLSDAGHMLSDAVSLALSLLAFKLGEKTATTAKTYGYKRVEMLAALCNGVVLIVISIYIFIEAIRRFKEPVEIASNGMLIIAVLGLLINILSAWILMRGGDVKGNLNLRSAFLHVLGDLLGSVGAIIAALLIKFFGWTAADAIASILVSILVIISGWRVTRDTVHILMEGAPQHINVEEVKSTLLNITVVKEVHDLHIWSVTSDFQVLTCHLIIKGNETQSVLKEATEVLKEKFHVEHVTIQVEIDGEFHHSETTCKV

SEQ ID NO: 36210 - DNA, 981 bp, Staphylococcus aureus subsp. aureus MSSA476
  CDS (1)..(981): transl_table=11
atgtctcattcacatcatcatcatgaccatatgcatagtcatgtaactacaaataataagaaagtattgtttatatcgtttttaataatcggtctatatatgtttatcgaaatcatcggcggtctccttgctaacagcttggcattactatctgacggtatccatatgtttagcgacacattctcattaggtgttgcacttgtcgcatttatttatgctgaaaagaatgccacaactacaaaaacatttggttataaacgtttcgaagtactcgcagcgttatttaacggtgtaacgctttttgtaataagtattttgattgtttttgaagcgattaaacgtttctttgttccttctgaagttcaatcaaaagaaatgttaatcattagcattattggtttaattgtcaatatcgttgttgcattctttatgtttaaaggcggcgacacttcacacaatttaaatatgcgtggtgcttttctacatgttatcggagacttattaggttcagttggcgccattactgcagctattttaatttgggcatttggatggacaatcgccgatcctatcgcaagtattttagtttccgttattattttaaaaagtgcttggggtatcacaaaatcttctattaacattttaatggaaggcacaccaagtgatgttgatatagatgaagttataactactattaaaaaggattcacgaatacaaagtgtgcatgattgccatgtttggacaatttcaaatgatatgaatgcattgagttgtcatgttgttgtagaccatacattgacaatgaaagaatgtgaattattattagaaaacattgagcatgatttattacatttaaatattcaccatatgactattcaattagaaacgcctaatcacaaacatgatgaatcgattatatgttcaggaacacatagtcattcacataaccatcatgctcatcatcacgcgcatgcacattaa

SEQ ID NO: 36211 - protein, 326 aa, Staphylococcus aureus subsp. aureus MSSA476
MSHSHHHHDHMHSHVTTNNKKVLFISFLIIGLYMFIEIIGGLLANSLALLSDGIHMFSDTFSLGVALVAFIYAEKNATTTKTFGYKRFEVLAALFNGVTLFVISILIVFEAIKRFFVPSEVQSKEMLIISIIGLIVNIVVAFFMFKGGDTSHNLNMRGAFLHVIGDLLGSVGAITAAILIWAFGWTIADPIASILVSVIILKSAWGITKSSINILMEGTPSDVDIDEVITTIKKDSRIQSVHDCHVWTISNDMNALSCHVVVDHTLTMKECELLLENIEHDLLHLNIHHMTIQLETPNHKHDESIICSGTHSHSHNHHAHHHAHAH

SEQ ID NO: 36212 - DNA, 924 bp, Acinetobacter sp. ADP1
  CDS (1)..(924): transl_table=11
atgagtggacagcacgggcatgatcatagccatgcggttgttacacaaggaaatgccaaaaagcttacgatcgcattgtcactcaccgtgacttttctgattgttgaagtggtcgcagggtttatcacgcaaagtctggcattgttgtcggatgccgcacatatgttcactgatgccgctgctctggcaatcgcattagccgcaattcaagtggccaaacgtccagcagatgacaaacggacttttggctatcagcgctttgaaattctagctgccttatttaatgcatctatgctctttatggttgcaatctatattttgtatgaggcgtatcagcgttttactcatccgcctgaaattcagagtttgggcatgttactggttgcagtcattggactgatcatcaatctaatctcaatgaaaattctggtctccagtgctcaggatagtctgaatgtaaaaggggcttaccttgaagttttaagtgatgcgctgggctcggttggtgtgattctgggtgcattggttatctattttacccagtggtactgggtcgatacactggttgcggtcttgattggattttgggtgcttccacgaacatggattctgctgaaacaaagtattaatattttactggaaggtgttcctgaagaagttgacattgagaagcttagagatgatttgttggctcttgaaggcgttgaaagtattcatcagcttaaagtctgggccattacatccaaaaatgtacatctgacggtgcatctgtttgcaccacaggcagatcgtaatcgtctgtatcgcacggcctatgaaatgctttcacatgagcatggcattgcagaaattactttgcagattgaagaagatgaatgtttggcacattcacatacgcatatagaaaaaaaccatcagcactga

SEQ ID NO: 36213 - protein, 307 aa, Acinetobacter sp. ADP1
MSGQHGHDHSHAVVTQGNAKKLTIALSLTVTFLIVEVVAGFITQSLALLSDAAHMFTDAAALAIALAAIQVAKRPADDKRTFGYQRFEILAALFNASMLFMVAIYILYEAYQRFTHPPEIQSLGMLLVAVIGLIINLISMKILVSSAQDSLNVKGAYLEVLSDALGSVGVILGALVIYFTQWYWVDTLVAVLIGFWVLPRTWILLKQSINILLEGVPEEVDIEKLRDDLLALEGVESIHQLKVWAITSKNVHLTVHLFAPQADRNRLYRTAYEMLSHEHGIAEITLQIEEDECLAHSHTHIEKNHQH

SEQ ID NO: 36214 - DNA, 912 bp, Propionibacterium acnes KPA171202
  CDS (1)..(912): transl_table=11
ttgagcaatcacaggcatgatcattctctaccctcggacgcggactcccgatacctcgttgctgcgcttacactcctggcggcgttcatgatcacggagatcatcacagctgtcatctccgggtcgctggcgctgctctccgacgctggccacatgctgtcggacattggtgccatcgccattgccctgtgggctgcgagactcactcggcgccgtccgcagggatcgtggacgtggggttggaaacgagccgagatcatgtcggctgcggtcaatggcgtcacgctgctcgtggtcgccatcctcgtcggaatcgaggctgttcgacgcctcgtcactccccctgccgttggcggagggctggttatggtcatcgccgctgtaggcgttgtcgtcaacgtcgcggttgcttggctggtggcacgagccaatcgccgtagtctcaacgtcgaaggtgcctaccaacatattctcactgacctattcgggttcatcggcaccttggtggcgggcctggtcattgtgacgaccggatggacccgtgcggatgccattgcctcccttattatctgtggtcttatgctccgcgctgcgtggtccctccttagccagacggggcggatactgatggaggttgcgcccgcctccctcgaccttgatgaggtgcgacaccatcttatggaccttgaccatgtgagatcggttcatgatctccacgcgtggacggtgtcgagcgatctaccagcgctcagcgcccatatcgtcgtcgaggactcctgcttcgccgatggtcatgcccccatcctcttggcacagatccagcagtgcttgtcgggccacttcgacctcgaccattcgacgctacagctagaaccaccccggcacgccggcaccgaaaatcaaacgatgtga

SEQ ID NO: 36215 - protein, 303 aa, Propionibacterium acnes KPA171202
MSNHRHDHSLPSDADSRYLVAALTLLAAFMITEIITAVISGSLALLSDAGHMLSDIGAIAIALWAARLTRRRPQGSWTWGWKRAEIMSAAVNGVTLLVVAILVGIEAVRRLVTPPAVGGGLVMVIAAVGVVVNVAVAWLVARANRRSLNVEGAYQHILTDLFGFIGTLVAGLVIVTTGWTRADAIASLIICGLMLRAAWSLLSQTGRILMEVAPASLDLDEVRHHLMDLDHVRSVHDLHAWTVSSDLPALSAHIVVEDSCFADGHAPILLAQIQQCLSGHFDLDHSTLQLEPPRHAGTENQTM

SEQ ID NO: 36216 - DNA, 939 bp, Leifsonia xyli subsp. xyli str. CTCB07
  CDS (1)..(939): transl_table=11
atggcgcacgatcacgaccacggcggccccgcacccgctttcggcgaggcagcccggcggcatcgcatcctcctcagcatcgctctgagcatctccgcggtcatcctgatcgcggagatcgcggggacgctcctcaccggctcgctcgcgctgctcgtcgactccggccacatgctgaccgacgtcggcggactcacgatggctctcgtcgcatccttcctcagcacgcgcccggcgaccagccagcgcacctggggctaccggcgcgcagaggtgctggcggcgaccgcccaggcggcggtgctgctcgcggtcggggcgttcgtgatcgtcgagggcatccgtcggctgttcgagccgccagaggtcccctcgggagagctgctggtgttcggtgtcatcggactcgtagggaatgccgcctccctgctggtgctcgcctccagccgccgggagaacttcaacctgcgcgccgccttcctcgaagtgctcaacgacgcgatcgggtcggtcgcggtgatcgtggcggccgtgctgatcgcggtcacggggtggggcggcgccgactcgctggcggcgctcctgatcggggcgctcatcctgccgcgcgcgttcaggctgctgcgcgagacgacgaacgtgctcctcgaatcgaccccgccggggctcgacctggattcggtgcgcgaccacatcctgaacgtgccggacgtgcgggaagtacacgatctgcacgccatgcagatcgcgacagggctgccggtgctcacggcgcatgtcatcgtggagccggagtcgttcgagaacggtcggctgccggcgctgctccacaagctgcaggagtgcgtcgccacgcacttcgagatcagcgtcgagcactcgacattccaattcgagccgccgcagcacagccagcacgaacagcgcgggcacgaatag

SEQ ID NO: 36217 - protein, 312 aa, Leifsonia xyli subsp. xyli str. CTCB07
MAHDHDHGGPAPAFGEAARRHRILLSIALSISAVILIAEIAGTLLTGSLALLVDSGHMLTDVGGLTMALVASFLSTRPATSQRTWGYRRAEVLAATAQAAVLLAVGAFVIVEGIRRLFEPPEVPSGELLVFGVIGLVGNAASLLVLASSRRENFNLRAAFLEVLNDAIGSVAVIVAAVLIAVTGWGGADSLAALLIGALILPRAFRLLRETTNVLLESTPPGLDLDSVRDHILNVPDVREVHDLHAMQIATGLPVLTAHVIVEPESFENGRLPALLHKLQECVATHFEISVEHSTFQFEPPQHSQHEQRGHE

SEQ ID NO: 36218 - DNA, 936 bp, Bacillus licheniformis ATCC 14580
  CDS (1)..(936): transl_table=11
atggctcattctcacggacatacaggacacagccaccatggcagccgatcagcaaatcaaaaagcgctgttcatcagcttcggtttaatttttacttttatgatgattgaagtgataggcggaatattgacgaacagcctcgctttgctgtcagatgcgggacatatgctcagcgacgctgcggcgcttggcttcagcctcttggcgtttaaaattggggaaaaggccgcaagcgcgagcaaaacattcggctacaggcgctttgagattttggctgcgtttatcaatggcatcaccctgcttttgatttcactttatattttttgggaagcatacaatcgctttttcagcccgccggaagtcgcgggaaggggtatgcttgcgattgcgacggttggtctgttcgtcaacattgctgcggcctgggtaataatgaaaggcgacacaagcgggaatttaaatatgcggagcgcttttttgcacatcatcggcgatatgctgggctctttcggggcgatcatcgcgggcctccttatgcttttcttcaattggaacatcgccgatccaatcgccagcgccgtcgtcgctgctttggttctcgtcagcggctggcgggtgacgaaagactcggtgcatatattaatggaaggaaaaccgaaagacattgatgcggaggcgcttaaaaacggcctgctttccatcccgtcggtcagggaggttcacgacctccacatttggtcgatctcatccgatatgccgtcattaagctgccatatcgtagcggatgaaaacagtgacagggatagaattttaaaacaagtatcaaaatatctaaggaaagaatgcaacgtggagcatgtgacggttcaaatagaaggggagcgctgttcccctcatgaatcgtgcagcctgggagcaaaccatccccgctcttaa

SEQ ID NO: 36219 - protein, 311 aa, Bacillus licheniformis ATCC 14580
MAHSHGHTGHSHHGSRSANQKALFISFGLIFTFMMIEVIGGILTNSLALLSDAGHMLSDAAALGFSLLAFKIGEKAASASKTFGYRRFEILAAFINGITLLLISLYIFWEAYNRFFSPPEVAGRGMLAIATVGLFVNIAAAWVIMKGDTSGNLNMRSAFLHIIGDMLGSFGAIIAGLLMLFFNWNIADPIASAVVAALVLVSGWRVTKDSVHILMEGKPKDIDAEALKNGLLSIPSVREVHDLHIWSISSDMPSLSCHIVADENSDRDRILKQVSKYLRKECNVEHVTVQIEGERCSPHESCSLGANHPRS

SEQ ID NO: 36220 - DNA, 924 bp, Legionella pneumophila subsp. pneumophila str. Philadelphia 1
  CDS (1)..(924): transl_table=11
atgagtaagcattcgcatgatggagcacaccatcatgagcatggggaagtgacttatgacagggcttttataattgcaattactgcgaatggcctttttgttgtgatgcaaattatttttgcctatttagcgaactctaccagcttgctagcagatgcttttcataatttaggtgatgtattagggctgattttagcatgggtagcaaccggattaatgaagagaaaacctacccataaagcaacttatggatttaaaaaaacctctattttagcggcattggccaatggagcgttactggtatttacttgcgggatcatagcgacagatgcaatgtataagttattttcaccgactgaaattcaagctgtctctgtgatgatagtcgctgcgattggtatagtcgtgaacttctctacagcgctcttgtttttacggggttctgacgatcttaatattcgaggagcttatttgcatttattttatgatgctttgatctcggtaggtgttgttttatcagcgggtgtattatacctgacgggttggttatggatagatccggttgtcggactattaattgcattagtgattttgaagggcacctggtcactatttgcggatagtttcagattaattattgacggtgttccccgtgatatatcctggattaaagtcagtgattttctcttggctatccctggtgtaaaatctattcatgatttacatatttgggcaatcagtacgaaagaaaatgcactttccgttcatttatttatgcccgaggagtcattatctgatgacttgcgtagagagctggttgaaaaattaaagcatgatttcagcattcagcatgtcactattcaggttgaaaaaacagaaacggaatgcaatgacgcatgtcataatcccaggataatcatttaa

SEQ ID NO: 36221 - protein, 307 aa, Legionella pneumophila subsp. pneumophila str. Philadelphia 1
MSKHSHDGAHHHEHGEVTYDRAFIIAITANGLFVVMQIIFAYLANSTSLLADAFHNLGDVLGLILAWVATGLMKRKPTHKATYGFKKTSILAALANGALLVFTCGIIATDAMYKLFSPTEIQAVSVMIVAAIGIVVNFSTALLFLRGSDDLNIRGAYLHLFYDALISVGVVLSAGVLYLTGWLWIDPVVGLLIALVILKGTWSLFADSFRLIIDGVPRDISWIKVSDFLLAIPGVKSIHDLHIWAISTKENALSVHLFMPEESLSDDLRRELVEKLKHDFSIQHVTIQVEKTETECNDACHNPRIII

SEQ ID NO: 36222 - DNA, 945 bp, Methylococcus capsulatus str. Bath
  CDS (1)..(945): transl_table=11
gtgcctcacgacgaccacgaacaccatcatgcggctgattccgccggagcgcaagggcgattggtctgggcgttgatcctcactggcggcttcgtcgtgttcgaagcgctggcgggctggaaggcgaacagcctcgcgctgctgaccgacgccgtgcacaacctgagcgacgtgttggcgctgggcctgagctggtacgccatgcggctgactgcccagccggcgcacgcggccaagactttcggctaccaccgagccggcatccttgccgccctcgccaattcggccgggctggtgggcgttgccttgtacattctctacgacgcctacgtccgcctcctcagtcccgctccggttcaggccgacatcctgatcggggtgggcggggcggcgctgctggtcaatgccttcaccgcctggctcgtccatcacggcagccacgacgacctgaacatgcgcagcgccttcctgcatctgttgggcgatgtggtgtcaaccctcggtgccatcgccgcgggtgtggcgatccgctacaccggtctgtactggctcgatccggcggtcagcgtcctgatagcgctgctcatcctctggaacgccaaggggctgatggccgaagtcatggacatcctgctggaaagcacgccgcgggatgtggacatgggttcgatggtgcgggacatgatgcaggtggaaggtgtgcatggggtgcaccatctccatgtgtggagcatttcgcggcagttgcgcatgctgtccgctcatatcgtgacggacgacatccgcctcagtgaaggcgaggggctgcagaagcgggtcacgcgtctgctcgctcaacgttatggtattgcgcatacgacgctgcaactggagtccgagagctgccagccggattcgctgtattgcgacatctccaggccgaatcaccgctatcatggtgaatga

SEQ ID NO: 36223 - protein, 314 aa, Methylococcus capsulatus str. Bath
MPHDDHEHHHAADSAGAQGRLVWALILTGGFVVFEALAGWKANSLALLTDAVHNLSDVLALGLSWYAMRLTAQPAHAAKTFGYHRAGILAALANSAGLVGVALYILYDAYVRLLSPAPVQADILIGVGGAALLVNAFTAWLVHHGSHDDLNMRSAFLHLLGDVVSTLGAIAAGVAIRYTGLYWLDPAVSVLIALLILWNAKGLMAEVMDILLESTPRDVDMGSMVRDMMQVEGVHGVHHLHVWSISRQLRMLSAHIVTDDIRLSEGEGLQKRVTRLLAQRYGIAHTTLQLESESCQPDSLYCDISRPNHRYHGE

SEQ ID NO: 36224 - DNA, 954 bp, Anaplasma marginale str. St. Maries
  CDS (1)..(954): transl_table=11
ttgacgtgcaagaggtcactggttcgagtccagtattacccactcacgagggtgatgcgtatgtctagctatgacggtgagttctgcccgcatacgcacagaagaatggcgctatccatagttgtggttgcggtggcaatggcagccgaagttataggagggctggcgtcaaactccctcgcgttgctctcagatgctggccatatgcttacagatcttgtggcactcacgcttagctggctcgcatataaatttgccgtgaaggagtctgatgcgtgcaggtcatatggctaccacagatttcaagttatggctgcattcatcaacggcgtttctttatttgtggtggcaattctaatagtctgcgaatcagcaaagaggttcatctacccggttgaggtgcactggcagatcatgttaacagtggcgctgctgggtcttgtggcgaacgtaacggtgtttgtaattctatacagaaaggacgaacataatttaaatatcaaaagtgcggtgctgcatgttttgggagatctgctaagctccgtcgcggctgttttgtcttctattgttatcatgcttagcggatggcagattgttgaccccttgttgtctgtgtttgccagcattctaatgttttacagtgcgtttaaaatagtgaaaagctccggcaatattttactggagggaaagccggaaaatatagacattgaagaggtaaaagattcaattctcagcaacattcccgcggttattgacgtgcaccatgttcatctgtggtctttgaccaataattatcccataatgacaatgcacgtgaaggtgccaacacctctggcgagcaacgaagcacattctgcacttttgatatcaataaagaggttactcaacgaaaaattcggcataccccacgtgaccatagagattgaatgcggagaatgttccgatgctagctga

SEQ ID NO: 36225 - protein, 317 aa, Anaplasma marginale str. St. Maries
MTCKRSLVRVQYYPLTRVMRMSSYDGEFCPHTHRRMALSIVVVAVAMAAEVIGGLASNSLALLSDAGHMLTDLVALTLSWLAYKFAVKESDACRSYGYHRFQVMAAFINGVSLFVVAILIVCESAKRFIYPVEVHWQIMLTVALLGLVANVTVFVILYRKDEHNLNIKSAVLHVLGDLLSSVAAVLSSIVIMLSGWQIVDPLLSVFASILMFYSAFKIVKSSGNILLEGKPENIDIEEVKDSILSNIPAVIDVHHVHLWSLTNNYPIMTMHVKVPTPLASNEAHSALLISIKRLLNEKFGIPHVTIEIECGECSDAS

SEQ ID NO: 36226 - DNA, 996 bp, Azoarcus sp. EbN1
  CDS (1)..(996): transl_table=11
atgcgggggcaccttccgacaaccacgaacaggatgacggcgatccacgatcacgcgcatcacgggcacggcaaacccgtccataccgacgggcgctccaaccacgccttgccgtgggcgctcgcgatgactctgggcttcgcggcagtcgaggccatggcaggctggtggtcaggttcgctggcgctgctcggcgatgccggacacatgctcaccgacagcctcgccctggcactggcgaccgcggcgagcatattggcgcgccgtccctccagcgcccgccatacgtacgggctgcgccgcgtcgagacgctcgcggggatgctcaacggactgttcatgctgttcgtcgtggcgctgatcgcgtggcacgcgatcgagcgcctgatcacgccgcaaccggtgcaggccggcaccgtgatcggcgtcgccgcgctggggctggcgatcaacgtgatcgtcgcgtggatgctgtcgcacggcgaaggcgatctgaacacgcgtgccgcgctgcttcacgtgttcggagatctgctcggttctgtcgccgcactcgcgtccgggatcgtaatcctttacaccggctggtaccccgccgaccccctgctgtcgatgctgatctgcggactgatcctcgcctcgacactgaaactgcttcgcgtggcgacccacacgctgctcgaaggcgtgccggacaatctctcgctggcggcgatcggccacgcgatggcggaagtcgaaggagtgcattcgattcacgacctgcatgtgtggagcctcgactcgaaccatgtcgcactttcggcgcatgtcgtcctgcactcatcgcaagcgtggccgacaaccctcgtggcgctgcaacggctcctcgccgagcagttcggcatcgaccatgcaacgctccagcctgaacccttgccgggccgtgtcgtcacattttcgtcgcgccatcccgggccgaaatcggcagcggatactccttccggaccgctctga

SEQ ID NO: 36227 - protein, 331 aa, Azoarcus sp. EbN1
MRGHLPTTTNRMTAIHDHAHHGHGKPVHTDGRSNHALPWALAMTLGFAAVEAMAGWWSGSLALLGDAGHMLTDSLALALATAASILARRPSSARHTYGLRRVETLAGMLNGLFMLFVVALIAWHAIERLITPQPVQAGTVIGVAALGLAINVIVAWMLSHGEGDLNTRAALLHVFGDLLGSVAALASGIVILYTGWYPADPLLSMLICGLILASTLKLLRVATHTLLEGVPDNLSLAAIGHAMAEVEGVHSIHDLHVWSLDSNHVALSAHVVLHSSQAWPTTLVALQRLLAEQFGIDHATLQPEPLPGRVVTFSSRHPGPKSAADTPSGPL

SEQ ID NO: 36228 - DNA, 924 bp, Bacillus clausii KSM-K16
  CDS (1)..(924): transl_table=11
atgggacattcccatgatcacggccattctcatggagttggccatagccacattcacacgaacaataaaaaagtgctactgattgcttttgtgcttattaccctgtttatgattgttgaagttattggcggcatcctcacaaatagcttggcgcttttggctgatgctggccatatgttaagcgatgcggttgccttagggcttgcactagccgcattcaaatacggggaacgagcagcgagcaactcgaaaacatatggctacaagcgctttgaaattttggcagcatttataaatggcttaacattgattggcatttccggttatatcatctacgaagcaataacacgctttgccgagccaccagaagtggcaagtgttggtatgcttgttgttgctgtttgcggtttgcttatcaacatgattgtcgcttggattcttatgcgcggttctgatgtgaaaggaaatctgaatatgcgtggcgcatttctccacgtacttggtgatttgctcggttctgtgggcgcaattgccgccggcctcctgatgctttttttcggctggtcaatagcagacccaattgccagcctgcttgtagcggcattgattttagtcagtggcttcagagtgaccagggattcggtccatgtgcttatggaaggcaaaccggcatctgtggatgttgacgaggtgaaaaacgaattgcaatcgctgcctggcgttttaagcatccacgatttgcatacatggtcgattacgtctgattttccagcattgacggcacatgtagtcgttggacacggtattgaccgcgacgacttgttgaaaacagcaaagcgtcttctccatgaccgtttcgggatccaccatacaacgcttcaactggaaggcgaagaaaagcaatgcaaccactcgtgtaattaa

SEQ ID NO: 36229 - protein, 307 aa, Bacillus clausii KSM-K16
MGHSHDHGHSHGVGHSHIHTNNKKVLLIAFVLITLFMIVEVIGGILTNSLALLADAGHMLSDAVALGLALAAFKYGERAASNSKTYGYKRFEILAAFINGLTLIGISGYIIYEAITRFAEPPEVASVGMLVVAVCGLLINMIVAWILMRGSDVKGNLNMRGAFLHVLGDLLGSVGAIAAGLLMLFFGWSIADPIASLLVAALILVSGFRVTRDSVHVLMEGKPASVDVDEVKNELQSLPGVLSIHDLHTWSITSDFPALTAHVVVGHGIDRDDLLKTAKRLLHDRFGIHHTTLQLEGEEKQCNHSCN

SEQ ID NO: 36230 - DNA, 894 bp, Thermococcus kodakarensis KOD1
  CDS (1)..(894): transl_table=11
gtggcccaccatcaccacggcgagcttaagggcaggatgctgttttcctttgccctgaacatcgtgataaccctagccgaggtcatcggtggtatcctctccggaagtttggcccttctcagcgactcccttcacaacttcagcgattcaatgagtatcctcgcgagctatctcgccataaagataggcgagcgagagaagaacgagaagtacaccttcggctacaagagggctgagattttggtcgcgttcgttaattccgctgtcctggtcggtgttgcgctcttcctcctcgttgaggcttacaagcgctttaagaacccagagccaatagacggccctctgatgctcggggttgctctaatcggcctcttcgccaacttaatctcggttctcctgctccatgagcacgcccacgagagcatgaacgtccgctccgcctacctgcatctcctgagcgacacgctctcttcggttgcggtcgtgataggtggaatcgcgataatacgatgggatgttctctggatcgatcccctcgtcacggttctaatctcggtttacatcctccgcgagggctatgagatactgaaggagagcgtggaggtgctcatggaagcggctcctgatttagatcttgatgagataaaacgcgaaatcgagagtattccgggtatcaggaacgcccatcacttccacgtatggcggataggggagaaggagatccactttgagtgtcacgtcgaagttaacgacatgccgataagcgaggcgcagaggttaatagacgagattgaggagaggcttaagcgcttcgggataacccacgtgacggttcagctcgaggctgggcggtgtgaggataaaaacacgatctgcggtgagaaaggtgattag

SEQ ID NO: 36231 - protein, 297 aa, Thermococcus kodakarensis KOD1
MAHHHHGELKGRMLFSFALNIVITLAEVIGGILSGSLALLSDSLHNFSDSMSILASYLAIKIGEREKNEKYTFGYKRAEILVAFVNSAVLVGVALFLLVEAYKRFKNPEPIDGPLMLGVALIGLFANLISVLLLHEHAHESMNVRSAYLHLLSDTLSSVAVVIGGIAIIRWDVLWIDPLVTVLISVYILREGYEILKESVEVLMEAAPDLDLDEIKREIESIPGIRNAHHFHVWRIGEKEIHFECHVEVNDMPISEAQRLIDEIEERLKRFGITHVTVQLEAGRCEDKNTICGEKGD

SEQ ID NO: 36232 - DNA, 909 bp, Bacteroides fragilis NCTC 9343
  CDS (1)..(909): transl_table=11
atggcacattctcacgaacatcatcacgagcacgtccacgaactgacgtcgctcaataaatcttttataattggcattacgctgaatattttgtttgtcctcgttgagttcggcatcggtttctattatgattctttggggttgctttccgatgccgggcacaacttgggcgatgtggcaagccttgtgcttgccatgcttgctttccggttggcaaaggtgcatcccaacagtcgttatacatacggttataaaaagagtacggtactggtatctctgctcaatgctgttattcttctggttgccgtcggcattatcatcaccgagagtatagagaagttgttccatcccgttccggttgaaggtgctgccattgcctggacggcaggtgtgggagtggttatcaatgccgttacagcctggctttttatgaaagataaggaaaaagacctcaacgtgaaaggagcttatctgcatatggctgccgatacgttggtatcggtgggagtggtcatttcgggtattatcatcatgtacaccggttggacacttgtcgatccgatcatcggcctggtgattgccgtcatcattgtcatctcaacctggagcttactgcacgacagcctccgcctttcgctcgacggagtcccgatgggaatagatagtgaaaagatcgggcgggttatcctggagcaacccggtgtggagagttatcaccatctgcatatctgggcattgagcactaccgaaacagcattgactgcccatatcgtgataggcgatctccgccgtatggaagaggtaaagcgcgaggttaagcatgaactggaacatgtcgggatcactcatgccactttagaatttgagtataaaggagcatgttgcgaaggggaggattgtatttcttaa

SEQ ID NO: 36233 - protein, 302 aa, Bacteroides fragilis NCTC 9343
MAHSHEHHHEHVHELTSLNKSFIIGITLNILFVLVEFGIGFYYDSLGLLSDAGHNLGDVASLVLAMLAFRLAKVHPNSRYTYGYKKSTVLVSLLNAVILLVAVGIIITESIEKLFHPVPVEGAAIAWTAGVGVVINAVTAWLFMKDKEKDLNVKGAYLHMAADTLVSVGVVISGIIIMYTGWTLVDPIIGLVIAVIIVISTWSLLHDSLRLSLDGVPMGIDSEKIGRVILEQPGVESYHHLHIWALSTTETALTAHIVIGDLRRMEEVKREVKHELEHVGITHATLEFEYKGACCEGEDCIS

SEQ ID NO: 36234 - DNA, 975 bp, Corynebacterium glutamicum ATCC 13032
  CDS (1)..(975): transl_table=11
gtgtgcttagctggggtcatggaaagccacgatcttcagcagcgcagttatgcgcacaatcccgatggccacgaccacagccatgacggactcggacactcacatgctcccagctccctcaaggctctttttgcggtcatcattttcacctcgatcatcttcctagcggaactaatcgccggccttatttccggatctttggcactgctggctgacgccatgcacatgctgtccgactccactggcttgatcattgcggctgtcgccatgctcattggccgtcgggcacgcacttctcgtgcgacctacggatacaagcgtgcggaagtcttggcagcgatggttaacgccaccgttgttacagcactgtctgtgtggatcgtcgttgaggccatcatgcgtctgggcaaggacctggaaatccagaccaacctgatgctcatcgtcgcggtcattggttttgtcaccaacggaatttccgccctggtgttgatgcgccaccaagatggcaatatcaatatgcgtggagcattccttcacgttctcagtgacatgctgggttccgttgccgtcattattgcgggcctggtgattcgctacacgggatggatgccggccgataccattgcttcgattgcgattgctgcgattattattcctcgcgcattcagcctcctgaaggaagctctcaatatcttgttggagcgtgttcctacaggtgcggagcctgcagaggtcgacgcagcccttcgtaaagtcccaggtgtcagcgatgtgcatgatcttcacatttggagcattgacggcaaggaaatcctggccacggtgcatttggtggtggattcgtctacaaatcagctgcatagttgtggcgtgttggatcgggcagaagcggaactatccaaacttgggatcttgcactcaacaattcagctggaaagcgcagatcacagtgatcatgaaagtgtgtgctga

SEQ ID NO: 36235 - protein, 324 aa, Corynebacterium glutamicum ATCC 13032
MCLAGVMESHDLQQRSYAHNPDGHDHSHDGLGHSHAPSSLKALFAVIIFTSIIFLAELIAGLISGSLALLADAMHMLSDSTGLIIAAVAMLIGRRARTSRATYGYKRAEVLAAMVNATVVTALSVWIVVEAIMRLGKDLEIQTNLMLIVAVIGFVTNGISALVLMRHQDGNINMRGAFLHVLSDMLGSVAVIIAGLVIRYTGWMPADTIASIAIAAIIIPRAFSLLKEALNILLERVPTGAEPAEVDAALRKVPGVSDVHDLHIWSIDGKEILATVHLVVDSSTNQLHSCGVLDRAEAELSKLGILHSTIQLESADHSDHESVC

SEQ ID NO: 36236 - DNA, 903 bp, Thermobifida fusca YX
  CDS (1)..(903): transl_table=11
atgggtcaccaccaccatcacaccgccgcgggcgcccaccgcgggcgtctcctgctggtcctcgcgctgaccctcagcgtcatggcgttccaggtcgtcgggggcctcgctgcgggcagcctggcactgctcggtgatgccgggcacatggcggtcgacgccttcgggatcttggtggcgctgttcgcgatctggatcgccaaccagccgtccaccgacgaacgcacgttcggtctgaaacgggcggaaatcctcgcggccgcgctcaacgccctcctcttgttcgcgctctgcggcttcatcggctacgaggctgtccgccgactcctggacccccaaccggtgagcgcctccacgatggtggttttctcgaccgtcggcctcctcgccaatctcatcgccctcgggctgctgcgacgcggccaggccgagagcctgaacttgcgcggtgcctacctggaagtgctgggcgacctcctctcctcagcgggtgtcgtcgtcaccgccctcatcatctggctcaccgggtggcactgggcggactctgtggtgtcgatcgctatcgccctgttcatcgcgccgcgagcctggcatctgctcaacgaggcccttcgcattctgttggaagcaaccccccgcggcctcgacctcagcgaagtccgccgccacttgcagacccaccccaatgtggtcgacgtccacgaccttcacgcgtggaccatcacctcgggcatgccggtgctctccgcccacgtcgtagtcgaggattccgctctggccgacagcggacgcctcctggcccggctccacgactgcctgtcgacgcacttctccatcgaccactccaccatccaagtggagccggtggggcacgcccaccacgagaacgcctgccgcgcctga

SEQ ID NO: 36237 - protein, 300 aa, Thermobifida fusca YX
MGHHHHHTAAGAHRGRLLLVLALTLSVMAFQVVGGLAAGSLALLGDAGHMAVDAFGILVALFAIWIANQPSTDERTFGLKRAEILAAALNALLLFALCGFIGYEAVRRLLDPQPVSASTMVVFSTVGLLANLIALGLLRRGQAESLNLRGAYLEVLGDLLSSAGVVVTALIIWLTGWHWADSVVSIAIALFIAPRAWHLLNEALRILLEATPRGLDLSEVRRHLQTHPNVVDVHDLHAWTITSGMPVLSAHVVVEDSALADSGRLLARLHDCLSTHFSIDHSTIQVEPVGHAHHENACRA

SEQ ID NO: 36238 - DNA, 939 bp, Ehrlichia canis str. Jake
  CDS (1)..(939): transl_table=11
atggaatgtggttataaaatgtcccttattcataaagacaaaacttctagccatgaaaataaactcatatatgccattcttattatcattattacaatggttacggaagtaattggagggataatatcaaactctttagcactactttcagatgctggacatatgtttactgattttatttctttgttactaagctggttagcttataaggttgctatgaaaaaatcagacgcatgtcgttcttatggttatcatagatttcaagttgttgctgcttttattaatggtttaactttgtttggtatagcaattttgatcattttggagtcaataaagcgatttgtttcaccagagaaagtttgttgggaaattatgatgtctgttgcagtattaggattagtagcaaatgttgtgtcattttttctattgtatagaaagaatgagaacaatttaaacctaaaaagtgcagtattacatgttataggtgatttattgggatcagttgcagcgattattgcgtctgtagtaattatgtttacttcatgggaaatagtagatcctcttttgtcagtttttgtaagtattataatactgggtggggcgtataggattattaagaactctggacatattttacttgaaggcactccagataatgtaaacccagataaaattagaacatctgtttgtgaaaatatacctggagttctagatgttcaccatattcatatttggtctttaactacagatcatccaattatgacaatgcatattaaacttgataaggcaattgtggataacagtttaaaatatagtcaagttgtggtatctgtgaaaaaattacttagcgaaaattttaatattattcatgtcactattgaagctgaatatgataattgtgcagatgatagtgttatgatagaaatagctcataattaa

SEQ ID NO: 36239 - protein, 312 aa, Ehrlichia canis str. Jake
MECGYKMSLIHKDKTSSHENKLIYAILIIIITMVTEVIGGIISNSLALLSDAGHMFTDFISLLLSWLAYKVAMKKSDACRSYGYHRFQVVAAFINGLTLFGIAILIILESIKRFVSPEKVCWEIMMSVAVLGLVANVVSFFLLYRKNENNLNLKSAVLHVIGDLLGSVAAIIASVVIMFTSWEIVDPLLSVFVSIIILGGAYRIIKNSGHILLEGTPDNVNPDKIRTSVCENIPGVLDVHHIHIWSLTTDHPIMTMHIKLDKAIVDNSLKYSQVVVSVKKLLSENFNIIHVTIEAEYDNCADDSVMIEIAHN

SEQ ID NO: 36240 - DNA, 942 bp, Thiobacillus denitrificans ATCC 25259
  CDS (1)..(942): transl_table=11
gtggccgcgcataagcacgaccacgccggccacacgcactttcacggcgcgcacgcgggcgggagccgcacgctgctcgtcgcgctactgctgacgctcgcgttcgccggcatcgaggccgcggcgggcctgtggtcgggctcgctcgcgctgctctccgacgccgcgcacatggtcgccgacagttcggcgctcggactcgccgcggcagcggcctggctcgcgcggcgcccgccgagcatgcgccactcctacggcctcgtgcgcgccgaggtgctcgcggcgctgctcaacagcctgctcgtgctcgtgctggtcggcttcatcgtgcacgaagcgctcgaacgcatcggcagcccgcgcgacgtcgccggcggcgccgtcatcggcgtcgccgtaatcggtctcgcggtcaacctgacggtcgcctgggtgctctcgcgcggcgcgcacagcctcaacagccgcgccgccctgctccacgtgctcggcgacgcgctcggctcggtcgcggcgatcgccgccggcatcgtcgtcgtcacgaccggctggacgccgatcgacccgctgctgtcgatcctcgtcgccgtcttgatcctcgtctccgcgctgcggctgctgcgcgaggtcgtccacgtgctgatggaaggcgtgccgctcgacgtcgaactcgaagcggtcggccgcgacctcgccgcgctcgacggcgtgctgcgcgttcacgacctgcacgtgtggaccctctcgaccggcaccgtggcgctctcggcccacctggaactgcgcgacctcgccgactggccgggcattctcgcggccgcgcgcagggacatggacgcgcggcacggcatccgccacgtcacgctgcaacccgagacgctcgccgcgctgcccctgcagcgcgcggaatggccgccgcgggaaagccgcccgcacggctga

SEQ ID NO: 36241 - protein, 313 aa, Thiobacillus denitrificans ATCC 25259
MAAHKHDHAGHTHFHGAHAGGSRTLLVALLLTLAFAGIEAAAGLWSGSLALLSDAAHMVADSSALGLAAAAAWLARRPPSMRHSYGLVRAEVLAALLNSLLVLVLVGFIVHEALERIGSPRDVAGGAVIGVAVIGLAVNLTVAWVLSRGAHSLNSRAALLHVLGDALGSVAAIAAGIVVVTTGWTPIDPLLSILVAVLILVSALRLLREVVHVLMEGVPLDVELEAVGRDLAALDGVLRVHDLHVWTLSTGTVALSAHLELRDLADWPGILAAARRDMDARHGIRHVTLQPETLAALPLQRAEWPPRESRPHG

SEQ ID NO: 36242 - DNA, 1005 bp, Geobacter metallireducens GS-15
  CDS (1)..(1005): transl_table=11
atgcacgccgaaacgcaccttgaccagagcatcaccggacgcttcaagtatgccatcatcctgacgaccttcaccctggtggccgaggtcgcgggtgggatctggaccaactccctggccctcctgtcggacgcggcccacgtctttctcgacctcttcgccctgatcctgtcgctggcggccatcaagctcgccggctaccccgcctccgacacccgcaccttcggctggcaccggaccgaggtcttcgcctctttcatcaacggcgccacggtcttcctcatggccatcggcatcttctacgaggcctgggagcggctgcgccacccggtggaggtcaagagcctcccgatgctggtcatcgccgcggtgggcctcgtcatgaacctcgtcgccgcctcggccctccacagccactcccacgacgatctgaacgtgcgcagcgcctttctccacgtcatcggcgacgcggccgcctcggtgggggtcatcatcggcggcgtcatcatgtactacaccagctggtacctcctggacgccatcatctccgccgggatcggctgcgtcatcttctgggggtcgtggcgggtgatccgggagtcgtcccacatcctcatggagggggtcccccgggggatgagcacccgggaagtggccattgccatgcaggaagtggagggggtgaacacggtccaccacctgaacatctggaccatctgctcccacatcctggccctgtcggcccacgtggatgtggagcccgagcacaaggagcggcaggcggatgtgctcaggcggctcgaagagctgctcttcgagcgctaccacatctcccacaccaccctccaggccgagtgcacccggtgcgcggaaacaccgccgatcataaaggagctacgccaccgcccccgccacggccagcaccacgaccatcacggccacgaccatgggcacggccatgaccaccacgggcacgaccacgaccactgccaccatgaccactag

SEQ ID NO: 36243 - protein, 334 aa, Geobacter metallireducens GS-15
MHAETHLDQSITGRFKYAIILTTFTLVAEVAGGIWTNSLALLSDAAHVFLDLFALILSLAAIKLAGYPASDTRTFGWHRTEVFASFINGATVFLMAIGIFYEAWERLRHPVEVKSLPMLVIAAVGLVMNLVAASALHSHSHDDLNVRSAFLHVIGDAAASVGVIIGGVIMYYTSWYLLDAIISAGIGCVIFWGSWRVIRESSHILMEGVPRGMSTREVAIAMQEVEGVNTVHHLNIWTICSHILALSAHVDVEPEHKERQADVLRRLEELLFERYHISHTTLQAECTRCAETPPIIKELRHRPRHGQHHDHHGHDHGHGHDHHGHDHDHCHHDH

SEQ ID NO: 36244 - DNA, 972 bp, Syntrophus aciditrophicus SB
  CDS (1)..(972): transl_table=11
ttgaaaattgacggctccttccataaaatcccgggtccgaaaaagaggagcgttatgacgggacaccatcctcaacatatttcctggggcaatagacttctgatgaccatgatgctgaatctggtgattcccgtggtccagattatcggcggtatactggccggcagtatggcgctgatcagcgatgcgctccacaatctcagtgattttacctcccttctgatcagttatgtggctctgcgcatgggggaacgccagccgacggtttctcagacgttcggctacaaacggattgaagtcctggccgccctggtgaatgtgagtctgctttacggcgttgcgatttttatcgccattgagggatggcagcgtctgctggcgcctcaggtgatcaaggggcaactggttgtatggatcgccctggccggcttggcgggtaacgctttttcagcggttctgctgcatgccggggcaaaaaccaatatcaatatccgcagttcttttctgcacatgcttaccgatgccctgacctctctgggcgtggtcgttttagggatcatctggctttacaggccgtggtaccgactggataccttggtttcctgggggattgtcgccctaattttttacggcggctggggaatactgaaggaaacataccagattctcatgaacgccacccctccgggcatcagcgtgaaagagatcaagcgggccgtcgaagctattgagggaatacgggaaatccatcacattcatgtctggacgctctcacccgacagggctgccctggccgcccatatcattgtggacgatcagatgttgagccaggttgatttgcttgtttcccgggttcgcgaacttctgtggagccgcttcggcatcgatcatcccacattgcagttcgaaacccgatcagaggacaatactttcctcctgtgctgtccaaaggaacacaaccatcatcactaa

SEQ ID NO: 36245 - protein, 323 aa, Syntrophus aciditrophicus SB
MKIDGSFHKIPGPKKRSVMTGHHPQHISWGNRLLMTMMLNLVIPVVQIIGGILAGSMALISDALHNLSDFTSLLISYVALRMGERQPTVSQTFGYKRIEVLAALVNVSLLYGVAIFIAIEGWQRLLAPQVIKGQLVVWIALAGLAGNAFSAVLLHAGAKTNINIRSSFLHMLTDALTSLGVVVLGIIWLYRPWYRLDTLVSWGIVALIFYGGWGILKETYQILMNATPPGISVKEIKRAVEAIEGIREIHHIHVWTLSPDRAALAAHIIVDDQMLSQVDLLVSRVRELLWSRFGIDHPTLQFETRSEDNTFLLCCPKEHNHHH

SEQ ID NO: 36246 - DNA, 978 bp, Methylobacillus flagellatus KT
  CDS (1)..(978): transl_table=11
atgagtgctcatcatcatcacgatcattctcatgcacatggtggcggccagccctccctgttgcttcccttgctattgattgcgggatttgccgtggtcgaggcggtgggcggctggtggacgggctcgctggctttgctcagcgatgccggccatatggtgtcggacgctttcgcccttgcgcttgcttggctgggcagctggatcgcccgcaagcctgccacgcgcaagcataatttcggtctggtgcgtgccgaagtcattgtagcgctggtgaatgccctgctgatgctggcagtgatcggcggtattgcctatgaagccgtgcagcgcatcgccgatccgcgcccggtgcagggcggggaagtgatgctgatcgcgtttatcggcatgctggtgaatatcgtcgtggctttgatgttacataagggacacagcagcctgaacagccgtgctgccttgctgcatgtgctgggagacttgcttggctcagtggcggcgatcctggccggtgcagtgatttatttcacaggctggatgccgattgaccccatcttgtcgatcttcatctcggtactgatcctggtatccaccctgcgcctgttgggcgaagtgctgcatgtgctgatggagggtgtgccgctgcatctcgatatccaggcagttgagcatgccatgagcgcgagcgacaaggtgcagggcgtgcaccatttgcatatctggtcactttcttccgagaaaactgcactttctgcccatatcgtgttggagaatatactggattggcatgaggtattgaacaacctgcggcatatgctccatgagcggttcaatatcgagcatgtcacactgcagccggagatcggcaacttgcacagcgatgccagcgccaattgctggctgaccagcaccaatcatcggcatgaccatgatgatgcgtctgaccacctccatggccagcctggtcatgcgcactga

SEQ ID NO: 36247 - protein, 325 aa, Methylobacillus flagellatus KT
MSAHHHHDHSHAHGGGQPSLLLPLLLIAGFAVVEAVGGWWTGSLALLSDAGHMVSDAFALALAWLGSWIARKPATRKHNFGLVRAEVIVALVNALLMLAVIGGIAYEAVQRIADPRPVQGGEVMLIAFIGMLVNIVVALMLHKGHSSLNSRAALLHVLGDLLGSVAAILAGAVIYFTGWMPIDPILSIFISVLILVSTLRLLGEVLHVLMEGVPLHLDIQAVEHAMSASDKVQGVHHLHIWSLSSEKTALSAHIVLENILDWHEVLNNLRHMLHERFNIEHVTLQPEIGNLHSDASANCWLTSTNHRHDHDDASDHLHGQPGHAH

SEQ ID NO: 36248 - DNA, 939 bp, Acidobacteria bacterium Ellin345
  CDS (1)..(939): transl_table=11
atgccccatgcccattccggcgacctgaacgacgcgaaaacctcgcgtgttctccggatatcactcggagtcacagtgctttacatcgtgctcctcgtggtgatgggcattcgctcgcacagtcttgcgctgctttctgaggccggccacaatctctccgactttctcgccttgctgctgacgtgggttgcggtgtacgtgcagtcgcgtccaccgagcgctacgaagacgtttggctaccagcgcgctggagtgctggcggcgttcatcaacgcggcatcgctggtgctgatcgcgttcttcatcttctatgaagcgggcaggaggttgtacgcaccgtccgatgtggagccccgcaccatgatgtgggtggccgcttgcggcgtggtcatgaacggcgccattgcgttgatgttgctgcgcacgcgccgcgacctcaatattcgttcggcgtttcttcacgagctaggcgatacgctttcgacggccgccgtcatcgttggtggctgggtcattcttgagaccggccagagttgggtggatcccgcgctgtcgttcggcatcggtgtactcgtgttgtggagctctttcggggtcatccgcgacagcctgaatattctgctcgaaggtacgccgcgtggcatgaacgtgcagcgcctggccgaacggatgtgcagtattgatggcgtgatcgatgtgcacgatctccacgtctggagcctcggcagcgagacccacgcgctgagctgccatatccgcatcgccgacctgcgcgcgtccgaaagcgaagcaatcctgaaagccgtgaacgaagccgtagcacacgacttccatattcaccacacgacgatccagttcgagcacgaagtctgcgaggttgcgcacgggtgtgtgatccccgtgagtcatgcgcacgaccatacccacgaccacgcttag

SEQ ID NO: 36249 - protein, 312 aa, Acidobacteria bacterium Ellin345
MPHAHSGDLNDAKTSRVLRISLGVTVLYIVLLVVMGIRSHSLALLSEAGHNLSDFLALLLTWVAVYVQSRPPSATKTFGYQRAGVLAAFINAASLVLIAFFIFYEAGRRLYAPSDVEPRTMMWVAACGVVMNGAIALMLLRTRRDLNIRSAFLHELGDTLSTAAVIVGGWVILETGQSWVDPALSFGIGVLVLWSSFGVIRDSLNILLEGTPRGMNVQRLAERMCSIDGVIDVHDLHVWSLGSETHALSCHIRIADLRASESEAILKAVNEAVAHDFHIHHTTIQFEHEVCEVAHGCVIPVSHAHDHTHDHA

SEQ ID NO: 36250 - DNA, 1008 bp, Myxococcus xanthus DK 1622
  CDS (1)..(1008): transl_table=11
gtgactacttccccttacacccgcggtgaatccgggcatggccacgagcatgaccacggcgacggacatggccatggccatcatcatcatggccatgggcacggtcatgggcacggtccccggaggggcggactggcggaggagcggaagaaggacaagcgccggctcatcttcgccctggtgctgacggccaccatcgcgctggcggaggcggtgggcggctggctgacgaactcgctggccctgatgtccgacgcgggccacatgctgacggacgtgtccgcgctggcgctgagcctggtggcgctgtggttcgcgggcaagccggcggacgtgaagaagacgtacggctactaccggatggagatcctcagcgcgctgctcaacggcgtgctgctgatgggcatcaccggcttcatcctctatgaggcctgggagcgggtgcgctcgccggcgcaagtgaacatcgggcccatggccatcgtggcgtcggtgggcctcttggccaacctgggcgcgctggggttcctgcaccgctcccactccatgaacgtgcgcggggccttcctgcacgtgctgggggatacgctgtcgtcggtgggcgtgctcgtgggcgcgggcatcatggcgtacacgggctggtacgtcgtggaccccatcatctcggtggtcatctccatcgtcatcgtcatcggcgcggtgcggctggtgcgcgacgcggtggacgtgctgatggaggcggttccggcgcacgtggacctggcgcaaatcaaggagctgatgctgcgcgcgcagggcgtcacggcggtgcatgacctgcacgtgtggaccatctccagcggcgtgtacgcgctgtccgcgcacctggtggtgcaggaccccatggtctgcaacaacgacgagattctctccgcggtgaagcacgacctgttcgaccgcttcggaatcgaccacaccacgattcaaatcgagagcgagacctactcccacctgggcgaggtccactga

SEQ ID NO: 36251 - protein, 335 aa, Myxococcus xanthus DK 1622
MTTSPYTRGESGHGHEHDHGDGHGHGHHHHGHGHGHGHGPRRGGLAEERKKDKRRLIFALVLTATIALAEAVGGWLTNSLALMSDAGHMLTDVSALALSLVALWFAGKPADVKKTYGYYRMEILSALLNGVLLMGITGFILYEAWERVRSPAQVNIGPMAIVASVGLLANLGALGFLHRSHSMNVRGAFLHVLGDTLSSVGVLVGAGIMAYTGWYVVDPIISVVISIVIVIGAVRLVRDAVDVLMEAVPAHVDLAQIKELMLRAQGVTAVHDLHVWTISSGVYALSAHLVVQDPMVCNNDEILSAVKHDLFDRFGIDHTTIQIESETYSHLGEVH

SEQ ID NO: 36252 - DNA, 945 bp, Rubrobacter xylanophilus DSM 9941
  CDS (1)..(945): transl_table=11
atgactcatgcaaatggacacgcggaggggcatgggcgggaggcggaccggcggtcgctggctgcggcgctggcgatcacggcctcgtacacggtcgcggaggcggtgggggggtttctcacgggttcgctggcgctgctggccgacgcggcgcacatgctctcggacaacttctcgctggggcttgcgctgtttgcgctctggctctcctccaggcccccgacgcccgagcggagcttcgggtacaagcgggcggagatcctggcggccctcttcaacggcgtgacgctggtggccgtgtctctctggatcttctacgaggcctaccgccggctgctggagccgcgggaggtcatgggcggctgggtggcggcggtggcggcggcggggctgctggtcaacgcggcggccgcctgggtgctcctgcgcccgcgctcggagagcctcaacctgcagggggccctgcggcacgtgctcgccgacctgctgggctccctcggggtgctggtctccgggatggtcgtgctgctcaccggatggtacccggccgaccccctggtcagcgccgcgatcgggctcctcatcctggcctcctcctggaggctgctgcgcgactcggtgaacatcctcctcgaggccgccccccacggcatggacgccgcggagatcggccgccgcatggcctccaccagcggcgtcgccgaggtgcacgacctccacgtctggaccatcacctcgggcttccccgccctctccgcccacgtcctggtcgccgccggcgaagactgccacgccaaacgccgcgagctggagcagctgctgcgcgaagagtacggtatctcccataccaccctccaggtggaccacgccggcgaccacgccgcccacggcccccgcttcctccccctccggccaaagcgcaagacccgctccccccacacatga

SEQ ID NO: 36253 - protein, 314 aa, Rubrobacter xylanophilus DSM 9941
MTHANGHAEGHGREADRRSLAAALAITASYTVAEAVGGFLTGSLALLADAAHMLSDNFSLGLALFALWLSSRPPTPERSFGYKRAEILAALFNGVTLVAVSLWIFYEAYRRLLEPREVMGGWVAAVAAAGLLVNAAAAWVLLRPRSESLNLQGALRHVLADLLGSLGVLVSGMVVLLTGWYPADPLVSAAIGLLILASSWRLLRDSVNILLEAAPHGMDAAEIGRRMASTSGVAEVHDLHVWTITSGFPALSAHVLVAAGEDCHAKRRELEQLLREEYGISHTTLQVDHAGDHAAHGPRFLPLRPKRKTRSPHT

SEQ ID NO: 36254 - DNA, 924 bp, Hyphomonas neptunium ATCC 15444
  CDS (1)..(924): transl_table=11
atgcatgctcacgggcacagtcatggccatgaccacagccatgccggtcattcgcatgaacaccatgccgacatgaccagcgccgactcgcgccgccgcgtggccatcgccgccgcgctgacagccggtttcatgctggccgagatcgccggcggcctgatctccggctccctcgccctcctggcagacgccgcgcacatgttcaccgatgccggctcgctcatcctcgcctggatcggctacaagctcgccgagcgtccggcagatcctcatcgctcctacggcttcgcgcggatgaagatcctcgccgccttcaccaatggcgtcctcctgatccttctgggcctctggatcatctgggaagcggtccaccgtctcctcgccccggtcgaggtgatggggggactgatgctgctggttgcggccggcggattgctggtcaacatcgccgcctttgccgtcctgcatggcggagaccgggaagacctcaacatgcgcggcgccctctggcatgttgccggagacctcctcggctcggtcgccgccatcctcgcggcgggtgtcatcctctggacgggctggaccccggccgatcccatcctctccgctctggtcgccgggctggtgatctttgccggtgtccgcatcatgcgccagtctggccacatcctgctcgagggggcccccaacgagctgtcggtgtccgaaattgtccaggatttgtccgcgaatgtcgcgggtgtggcgcgcgtgagccatgtgcatgcctggtcgttgaccgaatcgcgccccctggtgaccctcgaagtcacggcaaaacccggcaccaatcccgaaatcctgcgccgcgatgtcaaagcccgcctcgccagcgccttcaaagtgtcccatgccaccgtcgaagtgatgtcgcagcctgaatag

SEQ ID NO: 36255 - protein, 307 aa, Hyphomonas neptunium ATCC 15444
MHAHGHSHGHDHSHAGHSHEHHADMTSADSRRRVAIAAALTAGFMLAEIAGGLISGSLALLADAAHMFTDAGSLILAWIGYKLAERPADPHRSYGFARMKILAAFTNGVLLILLGLWIIWEAVHRLLAPVEVMGGLMLLVAAGGLLVNIAAFAVLHGGDREDLNMRGALWHVAGDLLGSVAAILAAGVILWTGWTPADPILSALVAGLVIFAGVRIMRQSGHILLEGAPNELSVSEIVQDLSANVAGVARVSHVHAWSLTESRPLVTLEVTAKPGTNPEILRRDVKARLASAFKVSHATVEVMSQPE

SEQ ID NO: 36256 - DNA, 930 bp, Magnetospirillum magnetotacticum MS-1
  CDS (1)..(930): transl_table=11
atggatatccagcatggcgtcgaaccgaaggaccatggacactcccacgcgaccgcccctgacaacgaaggtcgggtgctgtgggccttgctgctgaccggtggctttctgttggccgaggtgatcggcggcatcctgtccggctccctcgccctgctggccgatgccggccacatgctgaccgacaccgcggccctgggattgtcctttgccgccttccgtgccagccgccgtcccgcgaccgggcgacactcctatggcatgcaccgcttccaggtcctggcagccttcatcaacggcgcgatgctgatcggaatcgcggcgtggatctttatcgaagccctgcagcggatatttcagcccgtcgaggtgctcgccggtcccatgatggtggtcgccatactggggctggcggtcaacgtggcagcctttttcatcctgcatggcggcgatcaggacaatatcaacatgcgcggcgccgcattgcatgtgctgggcgacctgctcggctcggtggcggccatcgtggcggcgggtgttattctgtggaccggatggatgcccatcgacccgatcctgtcggtgctggttgccctgctgatcgtcagaagcgcctggcggttggtcgcgggctcggcccatgtgctgatggaaggcgcacccgatggcatcgatgtggacgaactgcgccacgacctgatggcacaagtccccggtgtcacggacattcaccacgttcacctttggatgctgaccccgacacagccgttgatcaccttgcatgcgaccgtcagcggaacagccgatgacgggactctgctccgggctctccagacggctctggccgagcgtttcgacctgcaccacacgacgatccagatcgagagcgaaagctgctgcaccgacagaactgcctgcgcgatggagtaa

SEQ ID NO: 36257 - protein, 309 aa, Magnetospirillum magnetotacticum MS-1
MDIQHGVEPKDHGHSHATAPDNEGRVLWALLLTGGFLLAEVIGGILSGSLALLADAGHMLTDTAALGLSFAAFRASRRPATGRHSYGMHRFQVLAAFINGAMLIGIAAWIFIEALQRIFQPVEVLAGPMMVVAILGLAVNVAAFFILHGGDQDNINMRGAALHVLGDLLGSVAAIVAAGVILWTGWMPIDPILSVLVALLIVRSAWRLVAGSAHVLMEGAPDGIDVDELRHDLMAQVPGVTDIHHVHLWMLTPTQPLITLHATVSGTADDGTLLRALQTALAERFDLHHTTIQIESESCCTDRTACAME

SEQ ID NO: 36258 - DNA, 930 bp, Exiguobacterium sibiricum 255-15
  CDS (1)..(930): transl_table=11
atggcacataatcatgatcatcatcatcacaccgacaataaaaaagtattgcttctctcgttcaccatcatcacgctgtttatgatcgtcgaggtaatcggcggattttggacgaacagtctggctttgttatcggacgccgggcatatgctgagcgactcgatttcacttgcaattgcactcgcagcctttcacttctcaaaccagaagccggatgcaaacaagacgttcggctcaaaacgttttgaaattctcgcggcgatttttaacggtgtcgccttgatcggcatttcgctttatatttttgtcgaagccgtgcagcggtttgttgatcctccggctgtcgcaacgaccgggatgttaatcatcagtacactcggacttctagtgaacttactcgttgcctggatcatgacgcgcggcggcgggcacgaagataatctgaacatgcgtggtgcctacctgcatgtcttaagtgacatgctcggatccatcggagccatcattgccgccctgttgatcctgttcttcggctggggaattgcggatccgctcgccagtatcatcgttgcaatcctcgttctgcgcagcggctattacgtaacgaaggccgcggtccacgtcttgatggaaggtacaccaagcgacgttgatgtcgaacaggtcgtctcgaccattcaaacgaacgaagcgattcttggtctgcacgaccttcatatctggtcgattacgagcggttacaacgcgttatcctgccacgtcgtcgtcaaagacgacatgacggtccgtgaatcggagtcgatccgggaacaactggaccacgacttaaaacatgtcggcattactcatgccacgattcaggttgagaccgctcagcatgaccatgagaatcagctgtactgtcatggggaacagaagcatgtccattaa

SEQ ID NO: 36259 - protein, 309 aa, Exiguobacterium sibiricum 255-15
MAHNHDHHHHTDNKKVLLLSFTIITLFMIVEVIGGFWTNSLALLSDAGHMLSDSISLAIALAAFHFSNQKPDANKTFGSKRFEILAAIFNGVALIGISLYIFVEAVQRFVDPPAVATTGMLIISTLGLLVNLLVAWIMTRGGGHEDNLNMRGAYLHVLSDMLGSIGAIIAALLILFFGWGIADPLASIIVAILVLRSGYYVTKAAVHVLMEGTPSDVDVEQVVSTIQTNEAILGLHDLHIWSITSGYNALSCHVVVKDDMTVRESESIREQLDHDLKHVGITHATIQVETAQHDHENQLYCHGEQKHVH

SEQ ID NO: 36260 - DNA, 1023 bp, Kineococcus radiotolerans SRS30216
  CDS (1)..(1023): transl_table=11
gtgaaccccacttctgatgcggccgacatgagcgagaccggcccgcacgcgcagcatgccgccactagtcacagcagcggtcctggtgggggtcccggcgagggtcatgggcacggtcacgggcatgcggagctggccggcttggatcgccgccgcctgctgatcgcattgtgtctgacgtcgacggttctggtcgccgaggtcatcggggcgctcatctcgggcagcctggccctgctcgccgatgcaggtcacatgctcaccgatgcggccggcctgctcatcgcctacttcgcggccacgctggcgatgcgcccaccgaccgcgcagcggacgtggggcttccgccgtgccgaggtgctcgcggcagctttgcaggccagtgtgctgctggccgtgggggtgttcgtcatcgtcgagggcgtccggcgactgctcgagccgccggaagtcggctcaggcacgatgatcatcttcggtgtcatcggtttgctggcgaacatcgcctccctcgcggtgatctacaccgcccgtgggaacaccatgaacatgcgagcagcgttcctggaggtgctcaacgacgcgctcgggtcgctggcggtcatcatcgcggccatcgtcatcgccaccaccggctggacgcgcgctgacgctgtcgtttctctgctcatcggtgtgctcatcatcccgcgcaccctgaagctgttgcgtgagaccgttgaggtcttgctggagtccaccccgcgcgggctggacctcgacgatgtgcgacgccacctggaggagctgccgcacgtacgcgcagtccacgacctgcacgcctcccagatcgccaccgggctgcccgttctcagtgcgcacgtcgtcgtggaggaccactgcttcgtcgacgggcactgcccgcaggtgctcgacgagctgcaggcctgcgtcgccgagcacttcgaggttgcggtcgaacactccaccttccagctcgaacccgcctctcaccgcgggcatgaggtgggcgcccactcatga

SEQ ID NO: 36261 - protein, 340 aa, Kineococcus radiotolerans SRS30216
MNPTSDAADMSETGPHAQHAATSHSSGPGGGPGEGHGHGHGHAELAGLDRRRLLIALCLTSTVLVAEVIGALISGSLALLADAGHMLTDAAGLLIAYFAATLAMRPPTAQRTWGFRRAEVLAAALQASVLLAVGVFVIVEGVRRLLEPPEVGSGTMIIFGVIGLLANIASLAVIYTARGNTMNMRAAFLEVLNDALGSLAVIIAAIVIATTGWTRADAVVSLLIGVLIIPRTLKLLRETVEVLLESTPRGLDLDDVRRHLEELPHVRAVHDLHASQIATGLPVLSAHVVVEDHCFVDGHCPQVLDELQACVAEHFEVAVEHSTFQLEPASHRGHEVGAHS

SEQ ID NO: 36262 - DNA, 990 bp, Erythrobacter sp. NAP1
  CDS (1)..(990): transl_table=11
atggcgcacgcacacgctcaccaccacggccattctcatccgcacagctcgggtgagagcgattgccacggcctgcatgaccgccatggccatcaccacgcgcccaaggattatggcaccgcatttatcctcgccatccttctcaacaccggtttcgtgatcgtcgaggcgacgttcggcttcctctacggctcgatggcgctcgtggcagatgccggacacaacctgtcggacgttctcgccttgctccttgcatggggtgccagcgtggccgccaagcgcgcaccgaccgaacggttcacctatggatacaagagctccacgatccttgccgcgcttgccaacgccctgcttctggcggtcgcgatcggtgcgatcctgttcgagacgatccatcgcatgttcgaacctgccgagcctcagggcatggtgatgatgatagtcgctggaatcgggatcgtcatcaatgcgggcacggctatgctgttccttcgcggacaggaagatctcaatatcaggggcgcttaccttcacatggccgccgatgcgctggtttcggtcggcgttgtcctcgccgggcttgcgatcctgctgaccggtctcgcatggatcgaccccctcgtcagcttcgcaatcgtcgcaatgatcgcttggggcacatggggacttgccaaggactctatccttttgagcttgcttgcagttcctgcaaggcttgacgtggccgaggtgcgcgcgcatttggctcgcatggacggggtggacgacgtgcacgacttacatatctggccgatgtcgacgaccgagacggcattgaccgcgcatcttgtgatgcccggaaagccggcgagcgacacgttcctgaaatcggtttcagactcgctcgaagcgcgcttcgggattggccactcgacgatccaggtcgaaagcgacccgtgcgagcatggctgcgaagacggatcaccagaaagcgagattacacaacactga

SEQ ID NO: 36263 - protein, 329 aa, Erythrobacter sp. NAP1
MAHAHAHHHGHSHPHSSGESDCHGLHDRHGHHHAPKDYGTAFILAILLNTGFVIVEATFGFLYGSMALVADAGHNLSDVLALLLAWGASVAAKRAPTERFTYGYKSSTILAALANALLLAVAIGAILFETIHRMFEPAEPQGMVMMIVAGIGIVINAGTAMLFLRGQEDLNIRGAYLHMAADALVSVGVVLAGLAILLTGLAWIDPLVSFAIVAMIAWGTWGLAKDSILLSLLAVPARLDVAEVRAHLARMDGVDDVHDLHIWPMSTTETALTAHLVMPGKPASDTFLKSVSDSLEARFGIGHSTIQVESDPCEHGCEDGSPESEITQH

SEQ ID NO: 36264 - DNA, 1188 bp, Synechococcus sp. WH 5701
  CDS (1)..(1188): transl_table=11
ttgcgcaggttccagaagctggcgaatcaggcccccgatcgactcgatcccaccattggtgagctgtacgcctcagatggccgatcgtccgtgccaccaaagcagttgctgctgccctcgtttggcctttcggccgaacgtgacgacacattcagcaagcggtttggtccaggcctcccgctgcttgattctggactctgttcgtcgtcaacggtgctgatcggcgccacgctggcgatggccgcagacctcgatcagaccatgccccccgccccttccgattccggagactcccagcacccggcagtcgggattcaacgccagcctcaccggcgccagcacgagcatcggcccggctcggccgccgccttccgctggagcgtgatcctcaacagtgctctctcaggcctgcagctggtgatcggtgtggccttcggctctttggcgctgatcggtgacgccgtacacaacatcggtgatgtggccgggctgctgttcggctggggtgctgagcggttgagctcccggccggccacgctccgcttcacctatggcttcgggcgcagcacccagctggcgtcgctggtgaatgcggtgctgattctgatggcggccgctgtggtgatcgtggagggtttccagcggcttcttcatccggtggcggtggcgagcacgccggtggcctgggcagcggcggcgggaatcgtcgtgaacctgctttcggcgcgcctgttcggcgacgaccacagccatgacctcaaccgccgcgccgcggtggtgcatctgctcacggacgcggccgtgtcggcggcggtgctgatcagcgccgtgctggtggggatcaccggctggccctggctggatccgctcaccgcactcggtgtgggccttgtggtggcctggagtggctgggagttgttgcgcgaggccctggtggtggccctcgatgcggtgccgcgcggcatcgacatcgcccaggtggatggcgccctgcgttccctgccccaggtggtggatgtgcatcatctgcacgtctgggcgatgagtacctcccagaacgccctcaccgcccatgtcatccgagagcctggcgccgcggatgacatggaactgctgcatgaggccaagcgccgcctggcgcagatcgggatctcccacagcaccctgcagctggagccaccgccctga

SEQ ID NO: 36265 - protein, 395 aa, Synechococcus sp. WH 5701
MRRFQKLANQAPDRLDPTIGELYASDGRSSVPPKQLLLPSFGLSAERDDTFSKRFGPGLPLLDSGLCSSSTVLIGATLAMAADLDQTMPPAPSDSGDSQHPAVGIQRQPHRRQHEHRPGSAAAFRWSVILNSALSGLQLVIGVAFGSLALIGDAVHNIGDVAGLLFGWGAERLSSRPATLRFTYGFGRSTQLASLVNAVLILMAAAVVIVEGFQRLLHPVAVASTPVAWAAAAGIVVNLLSARLFGDDHSHDLNRRAAVVHLLTDAAVSAAVLISAVLVGITGWPWLDPLTALGVGLVVAWSGWELLREALVVALDAVPRGIDIAQVDGALRSLPQVVDVHHLHVWAMSTSQNALTAHVIREPGAADDMELLHEAKRRLAQIGISHSTLQLEPPP

SEQ ID NO: 36266 - DNA, 1379 bp, Brassica juncea
  CDS (131)..(1261)
gaggcaaaagtgaatctaaagggttttcgaatcaatggtgaatattttcaaccaagtaccttcatcctcctctctcttcttcttctgattcggaaacctattgtgcttcactcgcattcttattacagagatggagccttcaagcccccaacatagtcacatcatcgaggtcaatgcatcaaaatctgatgaagaacagagaacaacaacgcttggttcagttaaagtctgtggagaaacaccttgtcatctcaacaatgcctctggtgacgccgaggaacgcactgcctccatgagaaagctctgcatcgctgtggtgctatgtcttctcttcatgactgttgaagtctttggtgggatcaaagctaacagcttggctatacttaccgacgcagctcatctcctctctgatgttgccgcctttgccatctccttgttctccctgtgggctgctggctgggaagcgactccaaggcagacttatgggtttttcaggattgagattctcggagctcttgtctctatccagctcatttggcttctcacagggattctcgtctatgaagctatcattagacttcttactgagaccagtgaggttgatgggttccttatgttccttgttgctgcgtttgggctgttggtgaacatcgtaatggctgttctgttaggtcatgatcatggacatggtcatggacatggtcacagtcatgatggggtgactgttaccacccatcaccatcatggtcatactcatggtgaggacaagcatcactctcatggtgatgttaccgaggagttgctagacaaatcagagaagaggaagaggaacatcaatgtgcaaggagcttacctccacgtccttggagacttaatccagagcgttggtgttatggttggaggagccatcatctggtacaagccagagtggaagatagttgatctgatctgcacgcttgtcttctcggttattgtcttggggacaaccatcaacatgatcagaagcattctcgaggtgttgatggagagtacacctagagagattgacgctacgaagctggaacagggtttgctggagatggaggaagtggtggctgttcatgagcttcacatttgggctatcacggtggggaaagtgctgcttgcttgccatgttaatatcacaccggaggcagatgctgatatggtgttgaacaaggttattgattacatccggagagagtataacatcagtcatgtcacaatacaaattgagcgttaaaaaggcatagcaaacatctcaagagtcttttgtatcagtattctctttattaacaataataaaatcaataaagtttcaatccttttgcaaaaaaaaaaaaaaaaaaaaaaaaaaaaaa

SEQ ID NO: 36267 - protein, 376 aa, Brassica juncea
MEPSSPQHSHIIEVNASKSDEEQRTTTLGSVKVCGETPCHLNNASGDAEERTASMRKLCIAVVLCLLFMTVEVFGGIKANSLAILTDAAHLLSDVAAFAISLFSLWAAGWEATPRQTYGFFRIEILGALVSIQLIWLLTGILVYEAIIRLLTETSEVDGFLMFLVAAFGLLVNIVMAVLLGHDHGHGHGHGHSHDGVTVTTHHHHGHTHGEDKHHSHGDVTEELLDKSEKRKRNINVQGAYLHVLGDLIQSVGVMVGGAIIWYKPEWKIVDLICTLVFSVIVLGTTINMIRSILEVLMESTPREIDATKLEQGLLEMEEVVAVHELHIWAITVGKVLLACHVNITPEADADMVLNKVIDYIRREYNISHVTIQIER

SEQ ID NO: 36268 - DNA, 1481 bp, Brassica juncea
  CDS (216)..(1364)
gaaggataagagagagaaaaaaagaaaaaaaggaccccggaaagaaaaggaaaagagaagctgcccccatctcatctctcgtggccgcctcatacttttctattcataaataaaaggcttcttcctttttccttgacattctttaaagggctaggaggagtagtgaatctatcaaaccggcaacttcagcctctcgactctcttctctctctctgatggcgtcttcaagcccccaacattgccacatcatcgaggtcaatcgaggtaaatccgttgaagaaagcacaacaattctggcaagcaaagcctgcggagaagccccctgcggcttctcagatctcaacaacgcttccggtgacgcccaagaacgcaatgcctccatgcgcaagctctgcatcgccgtggtgctatgccttctcttcatgaccgttgaagtctttggtggcatcaaagctaacagcctagctatactcaccgacgcagcgcatctcctctctgacgttgctgccttcgccatctccctgttctccctgtgggccgctggttgggaagcgacgccgaggcagacttatggttttttcaggattgagattttgggagctcttgtctccatccagctcatttggctcctcactggtattcttgtctatgaagctatcatcagacttcttagtgagactagtgaggttaatggtttccttatgttccttgttgctgcttttgggttgcttgtgaatatcataatggctgttctgttgggacatgatcatggtcacggtcatggccatggtcatgatcatcacagtcatggggtgacggttaccacacatcatcaccatcatggtcatggagaggacaagcatcatcatcacgctcatggggatgaagatgtgactgagcagttgctggagaaatcagagaagagaaagaggaacatcaatgtccaaggagcttacctccatgtccttggagactcaatccagagcgttggtgttatgattggaggaggtatcatctggtacaacccggagtggaagatagtcgatctgatctgcacgcttgtcttttccgtgattgtcttggggacgaccatcaacatgatcagaagcattcttgaggtgttgatggagagcacgccgagagagattgacgctacgaagctggagaagggtttgctggagatggaagaagtggtggctgttcatgagcttcacatttgggctatcacggtggggaaagtgttgcttgcttgccatgttaatatcacaccggaggcagatgcggacatggtgcttaacaaggtcattgattacatccgcagggagtataatatcagtcatgtcactatacaaatcgagcgctgaaaggcaaatcaaatatctcaagagtattttgtataagcatttgcattgacatgatgataaaatcaataaagttttctatctttttgtccaaaaaaaaaaaaaaaaaaaaaaaaaaaa

SEQ ID NO: 36269 - protein, 382 aa, Brassica juncea
MASSSPQHCHIIEVNRGKSVEESTTILASKACGEAPCGFSDLNNASGDAQERNASMRKLCIAVVLCLLFMTVEVFGGIKANSLAILTDAAHLLSDVAAFAISLFSLWAAGWEATPRQTYGFFRIEILGALVSIQLIWLLTGILVYEAIIRLLSETSEVNGFLMFLVAAFGLLVNIIMAVLLGHDHGHGHGHGHDHHSHGVTVTTHHHHHGHGEDKHHHHAHGDEDVTEQLLEKSEKRKRNINVQGAYLHVLGDSIQSVGVMIGGGIIWYNPEWKIVDLICTLVFSVIVLGTTINMIRSILEVLMESTPREIDATKLEKGLLEMEEVVAVHELHIWAITVGKVLLACHVNITPEADADMVLNKVIDYIRREYNISHVTIQIER

SEQ ID NO: 36270 - DNA, 1095 bp, Arabidopsis lyrata
  CDS (1)..(1095)
atggagtcttcaagtccccaccatagtcacattgttgaggttaatgtaggaaaatccgaagaagaaagaattattgtggcaagtaaagtctgtggagaagcgccttgtgggttttcggattctaagaatgcttccggagatgctcaggaacgctctgcttatatgcggaagctttgtattgcggtcgtgctgtgtctagtgttcatgagcgttgaagttgttggtggcattaaagccaatagtttggccatattaaccgatgctgctcatttgctctctgacgttgctgcctttgctatctccctcttctcattgtgggctgctggctgggaagcgactcccaggcagacttacgggttcttcaggactgagattttgggagctcttgtgtctatccagctcatttggttgctcacgggtattctggtttatgaagccattatcaaaattgttacagagaccagtgaggttaatggattcctcatgtttcttgttgctgcttttggtctagtggtgaacatcataatggctgttctgctagggcatgatcatggtcacagtcatggtcatggagaggacaagcatcatgctcatggggatgtgactgagcaattgttggacaaatcgaagactcaagtcgcagcaaaagagaaaagaaagagaaacatcaatgtccaaggagcttatctgcatgtccttggggattccatccagagtgttggtgttatgattggaggagctatcatttggtacaacccggaatggaagatagtggatctgatctgcacacttgtcttttcggttattgtcctaggaacaaccatcaacatgattcgaaacattctagaagtattgatggagagtacacccagagagattgacgccacaaagctcaaaaagggtctgcttgaaatggaagaagtggtggctgttcatgagcttcacatttgggctatcacagtgggaaaagtgctattggcttgccatgtcaatatcagaccagaagcagatgcagacatggtgctcaacaaggtaattgattacatccgcagggagtacaacattagtcatgttacgatacaaatcgagcgctaa

SEQ ID NO: 36271 - protein, 364 aa, Arabidopsis lyrata
MESSSPHHSHIVEVNVGKSEEERIIVASKVCGEAPCGFSDSKNASGDAQERSAYMRKLCIAVVLCLVFMSVEVVGGIKANSLAILTDAAHLLSDVAAFAISLFSLWAAGWEATPRQTYGFFRTEILGALVSIQLIWLLTGILVYEAIIKIVTETSEVNGFLMFLVAAFGLVVNIIMAVLLGHDHGHSHGHGEDKHHAHGDVTEQLLDKSKTQVAAKEKRKRNINVQGAYLHVLGDSIQSVGVMIGGAIIWYNPEWKIVDLICTLVFSVIVLGTTINMIRNILEVLMESTPREIDATKLKKGLLEMEEVVAVHELHIWAITVGKVLLACHVNIRPEADADMVLNKVIDYIRREYNISHVTIQIER

SEQ ID NO: 36272 - DNA, 927 bp, Streptomyces cinnamonensis
  CDS (1)..(927): transl_table=11
atggggcacgaccacggtccgtccgccggggcggcgggcggcactctcagcggcacgtaccgcaagcgcctgctgtggaccatcggcatcagcggctcgatcaccgtcatccaggtggtcggcgcgctcctgtccggcagcctcgcgctgctcgccgacgccgcgcacagcctgaccgacgcggtcggcgtctcgctggccctcggtgccatcaccctcgcccagcgggcgccgacgccgcggcgcacctttgggttctaccgcgtggagatcttctccgcggtcctgaacgcgctgctcctggtcgtcatcttcgcctgggtcctgtggtcggcgatcggccggttcagcgagccggtggaggtgaagggcggcctgatgttcgtggtcgcgctgggcgggctcgccgccaacctggtgggcctgtggctgctgcgggacgccaaggagaagagcctcaatctgcggggcgcgtacctggaggtgctgggcgacgcgctcggctcggtcgcggtgatcgtgggcggcctggtcatcctgctcacggggtggcaggccgccgacccgatcgcgtcgatcgtcatcggcctgctgatcgtgccgcgcgcgtacggcctgctgcgggactccttgcacgtcctgctggaggcgaccccgcaggacgtcgacctcggcgaggtgcgccggcacctgctggaggagcggggcgtggtcgccgtgcacgatctgcacggctggacggtcacctcggggatgccggtgctcaccgcgcacgtggtggtcacggaggaggctctcgcgagcgggtacggggagctcctggggcgccttcagcggtgtgtcgggggccacttcgacgtggcccactcgacgatccagctggagccggaggggcatgtggaggaggacggggcgctgcacacgtag

SEQ ID NO: 36273 - protein, 308 aa, Streptomyces cinnamonensis
MGHDHGPSAGAAGGTLSGTYRKRLLWTIGISGSITVIQVVGALLSGSLALLADAAHSLTDAVGVSLALGAITLAQRAPTPRRTFGFYRVEIFSAVLNALLLVVIFAWVLWSAIGRFSEPVEVKGGLMFVVALGGLAANLVGLWLLRDAKEKSLNLRGAYLEVLGDALGSVAVIVGGLVILLTGWQAADPIASIVIGLLIVPRAYGLLRDSLHVLLEATPQDVDLGEVRRHLLEERGVVAVHDLHGWTVTSGMPVLTAHVVVTEEALASGYGELLGRLQRCVGGHFDVAHSTIQLEPEGHVEEDGALHT

SEQ ID NO: 36274 - DNA, 1083 bp, Thlaspi goesingense
  CDS (1)..(1083)
atggagtcttcaagccacatcattgaggttaatggaggaagatctgatgaagaaagaagggctgtggcaagcaaagtctgtggagaggcaccgtgtgggttctcagatgccaagaatgcttcaggggatgcccaagaacgcaatgcctctatgcggaagctctgtatcgcggtggtgttgtgtcttgtgttcatgagcgttgaagtcgttggtggagtcaaagccaatagtttggctataatgacagatgcagcacatttgctctctgacgttgctgcctttgccatctctctcttctccttgtgggctgctggttgggaagcgacgccgaggcatacttacgggttcttcaggattgagatcttgggagctcttgtgtctatccagctcatttggctgctcactgggatcttggtttatgaagccattataaggcttcttaccgagaccagtgaggttaatggattccttatgtttgctgttgctacgtttggtctactggtgaacatcataatggctgtgatgcttgggcacgatcatgataatggtcatggtcatagtcatggagaggacaagcacgatgaagctcatggagacgtgactgagcagctgttggagaaaccaaagcagcagaaagagaaaaagaagaggaacatcaatgcgcaaggagcttatcttcatgttcttggtgattcaatccagagcgttggtgttatgattggaggagctgccatttggtacaacccgaaatggaagataattgatctgatctgcactcttgtcttttcggttatcgtcttggggacaaccatcaacatgattcgaagcattcttgaagtgttgatggagagtacgcctagagagattgacgctacgaagctcgaaaagggtttgctcgaaatggaagaagtggtggctgttcatgagcttcacatttgggctagcacagtgggaaaggttttgcttgcttgccatgtcaatgctagaccagatgcagatgcagatatggtgctcaacaaggtggttgattacatccgcagagagtacaatatcagtcatgtaaccatacaaatcgagcgctaa

SEQ ID NO: 36275 - protein, 360 aa, Thlaspi goesingense
MESSSHIIEVNGGRSDEERRAVASKVCGEAPCGFSDAKNASGDAQERNASMRKLCIAVVLCLVFMSVEVVGGVKANSLAIMTDAAHLLSDVAAFAISLFSLWAAGWEATPRHTYGFFRIEILGALVSIQLIWLLTGILVYEAIIRLLTETSEVNGFLMFAVATFGLLVNIIMAVMLGHDHDNGHGHSHGEDKHDEAHGDVTEQLLEKPKQQKEKKKRNINAQGAYLHVLGDSIQSVGVMIGGAAIWYNPKWKIIDLICTLVFSVIVLGTTINMIRSILEVLMESTPREIDATKLEKGLLEMEEVVAVHELHIWASTVGKVLLACHVNARPDADADMVLNKVVDYIRREYNISHVTIQIER

SEQ ID NO: 36276 - DNA, 978 bp, Staphylococcus aureus
  CDS (1)..(978): transl_table=11
atgtctcattcacatcatcatgaccatatgcatagtcatgtaactacagataataagaaagtattgtttatatcgtttttaataatcggtctatatatgtttatcgaaatcatcggcggtctccttgctaacagcttggcattactatctgacggtatccatatgtttagcgacacattctcattaggtgttgcacttgtcgcatttatttatgctgaaaagaatgccacaactacaaaaacatttggttataaacgtttcgaagtactcgcagcgttatttaacggtgtaacgctttttgtaataagtattttgattgtttttgaagcgattaaacgtttctttgttccttctgaagttcaatcaaaagaaatgttaatcattagtattatcggtttaattgtcaatatcgttgttgcattctttatgtttaaaggcggcgacacttcacacaatttaaatatgcgtggtgcttttctacatgttatcggagacttattaggttcagttggcgccattactgcagctattttaatttgggcatttggatggacaatcgccgatcctatcgcaagtattttagtttccgttattattttaaaaagtgcttggggtatcacaaaatcttcaattaacattttaatggaaggcacaccaagtgatgttgatatagatgaagttataactactattaaaaaggattcacgaatacaaagtgtgcatgattgccatgtttggacaatttcaaatgatatgaatgcattgagttgtcatgttgttgtagaccatacattgacaatgaaagaatgtgaattattattagaaaacattgagcatgatttattacatttaaatattcaccatatgactattcaattagaaacgcctaatcacaaacatgatgaatcgattatatgttcaggaacacatagtcattcacataaccatcatgctcatcatcacgcgcatgtacattaa

SEQ ID NO: 36277 - protein, 325 aa, Staphylococcus aureus
MSHSHHHDHMHSHVTTDNKKVLFISFLIIGLYMFIEIIGGLLANSLALLSDGIHMFSDTFSLGVALVAFIYAEKNATTTKTFGYKRFEVLAALFNGVTLFVISILIVFEAIKRFFVPSEVQSKEMLIISIIGLIVNIVVAFFMFKGGDTSHNLNMRGAFLHVIGDLLGSVGAITAAILIWAFGWTIADPIASILVSVIILKSAWGITKSSINILMEGTPSDVDIDEVITTIKKDSRIQSVHDCHVWTISNDMNALSCHVVVDHTLTMKECELLLENIEHDLLHLNIHHMTIQLETPNHKHDESIICSGTHSHSHNHHAHHHAHVH

SEQ ID NO: 36278 - DNA, 951 bp, Ralstonia metallidurans
  CDS (1)..(951): transl_table=11
atgggcgcaggtcactcacacgaccatcccggtggcaacgagcgatcgctcaagatcgcccttgcgctgaccggtacgttcctgattgccgaagtggtcggtggtgtcatgacgaagagcctggcgttgatctccgacgccgcgcacatgctcacggacaccgtcgcactggccatcgcactggctgctattgcgatcgccaagcgacccgcggacaagaagcggacatttggctactaccgttttgagattcttgccgcggcctttaacgcattgctgctgttcggtgtggctatctacatcctgtacgaagcctacctgcggctgaaatcgccacctcagattgagtcaaccggcatgttcgtcgtggctgtgctgggcctgatcatcaatctcatcagcatgcgcatgctgtcctccgggcaaagcagcagcctgaacgtgaagggtgcttatctggaagtctggagcgatctgctcgggtcggttggcgtcatcgccggtgcgatcatcatccgcttcacgggctgggcgtgggtcgactccgccattgcggtgctgatcggcctctgggtactgcctcgcacgtggatcctgctgaagtcgagcctgaatgtgctgctcgaaggcgtacccgatgacgtggatctggcagaggttgagaagcaaattctggcgacgcccggggtaaaaagcttccatgacctccacatctgggcacttaccagcggcaaggcgagcttgacggttcatgtcgtgaatgacacggccgtcaacccggaaatggaagtgctaccggaattgaagcagatgctggctgacaaattcgatatcacgcacgtgaccattcagttcgaactggcaccatgcgaacaagcggatgcagctcagcatttcaatgcatcgccagcactggtcggatcgaagtcgcttgctgcaggaggaaactaa

SEQ ID NO: 36279 - protein, 316 aa, Ralstonia metallidurans
MGAGHSHDHPGGNERSLKIALALTGTFLIAEVVGGVMTKSLALISDAAHMLTDTVALAIALAAIAIAKRPADKKRTFGYYRFEILAAAFNALLLFGVAIYILYEAYLRLKSPPQIESTGMFVVAVLGLIINLISMRMLSSGQSSSLNVKGAYLEVWSDLLGSVGVIAGAIIIRFTGWAWVDSAIAVLIGLWVLPRTWILLKSSLNVLLEGVPDDVDLAEVEKQILATPGVKSFHDLHIWALTSGKASLTVHVVNDTAVNPEMEVLPELKQMLADKFDITHVTIQFELAPCEQADAAQHFNASPALVGSKSLAAGGN

SEQ ID NO: 36280 - DNA, 1334 bp, Arabidopsis thaliana
  CDS (41)..(1177)
gacacccaaattacatctcgatctctctcttacaaaaaagatgaaagaccatattcatgagcatgaccacatggttcagatttgtggggaagtttcatcaggagaaacaagcttggtgggcatcaagaagacatgtggagaagcgccttgcggattctcagatgccaagaccagttcaatagaagctcaagagcgtgcagcatcaatgagaaagctattaatagctgttcttctctgtgccattttcatagttgtagaagtcgttggaggaatcaaggccaacagtcttgcgattctcacagatgcagctcatctgttatctgatgttgcagcctttgcaatatctttgttctcgctctgggcttcgggatggaaggcaaaccctcagcaatcttatgggtttttcagaatagagattcttggtgctcttgtctccattcaaatgatttggcttcttgctggtatcttggtttatgaagccattgttagacttaacaacggtagtggtgaagtggagggatctcttatgtttgctgtctctgcagttggcttacttgtgaacattgcaatggctattctgttaggtcatgaccatggtcatggtcatggtcatagtcatgacaatggtcacggtcatagtcatgatcatggccatggaatagccgcaaccgagcatcatcatgactctggtcatgatgaatcacaactatctgatgtcttaatcgagcaaaagaagcagcgtaatgtaaatattcaaggggcttatcttcacgtgctgggagattcgatacagagcgtaggagtgatgataggaggagcaatcatatggtataagccggagtggaagatccttgatttgatatgcacattggttttctctgtgattgtgttagggacaacaattgggatgcttaggaacattctagaggttttaatggagtcaacaccacgagagattgacccgacaatgcttgaaaagggagtgtgtgaaattgaagaagtggtggctgttcatgagcttcacatttgggcgattactgtcggcaaacttttgttggcatgtcatgttaaaatcagacctgaggcagaggcagatatggttttggacaagattatcgattacattaagagggaacacaacattagtcacgtgactattcagatcgaacgtcaatgaagcaacgtgacaaggcgtttttgcattatcatatctactttgtctgaccattttgtaatgtttgtcttgtgtacaaaagtgtttttttttcccaacgtatgtatcatattgtctataattgttttttggtttgaggataagccctgcgttaacgatc

SEQ ID NO: 36281 - protein, 378 aa, Arabidopsis thaliana
MKDHIHEHDHMVQICGEVSSGETSLVGIKKTCGEAPCGFSDAKTSSIEAQERAASMRKLLIAVLLCAIFIVVEVVGGIKANSLAILTDAAHLLSDVAAFAISLFSLWASGWKANPQQSYGFFRIEILGALVSIQMIWLLAGILVYEAIVRLNNGSGEVEGSLMFAVSAVGLLVNIAMAILLGHDHGHGHGHSHDNGHGHSHDHGHGIAATEHHHDSGHDESQLSDVLIEQKKQRNVNIQGAYLHVLGDSIQSVGVMIGGAIIWYKPEWKILDLICTLVFSVIVLGTTIGMLRNILEVLMESTPREIDPTMLEKGVCEIEEVVAVHELHIWAITVGKLLLACHVKIRPEAEADMVLDKIIDYIKREHNISHVTIQIERQ

SEQ ID NO: 36282 - DNA, 939 bp, Salmonella typhimurium
  CDS (1)..(939): transl_table=11
atggcgcactcacactctcatgccgattcacacctgccgaaagataataatgctcgtcgcctgcttttcgcctttatcgtcactgccggatttatgctccttgaggtggtgggcgggatactctccggctctctggcgttgttggcggatgcgggacatatgctcaccgacgcggcggcccttctctttgcgctgctggcggttcaattttcccgtcgtcccccgactgttcgccacacttttggctggctaagactcaccacactggcggcctttgtgaatgccattgcgttggtggtcattacccttctcattgtctgggaagcgatagagcgcttttacacgccacgtccggtggcgggcaatctgatgatggtgattgcggttgcgggtctgctggcgaacctgtttgcgttctggattctccatcggggaagcgatgaaaaaaacctgaacgtgcgcgctgccgcgctacatgtgatgggcgatttgctgggttccgtcggcgcaatagtcgccgcgttgatcattatctggacaggctggacgccagcggacccgattctctctattctggtttcggtactggtgctacgcagcgcctggcgtttgttaaaagatagcgtcaacgaattgctggaaggcgcgccggtttcactggatattaatgccttacagcgccatttaagtcgggaaatccccgaagtccgcaacgtacaccatgtgcatgtctggatggtcggcgaaaaaccggtcatgacgttgcacgctcaggtcattccgccacacgaccatgatgcgctgctggaacgtatccaggatttcctgatgcacgaataccatattgcgcacgctacgattcagatggagtatcaagtgtgtcacggcccggactgtcatctgaatcagacatcgtccgggcatgttcatcaccattaa

SEQ ID NO: 36283 - protein, 312 aa, Salmonella typhimurium
MAHSHSHADSHLPKDNNARRLLFAFIVTAGFMLLEVVGGILSGSLALLADAGHMLTDAAALLFALLAVQFSRRPPTVRHTFGWLRLTTLAAFVNAIALVVITLLIVWEAIERFYTPRPVAGNLMMVIAVAGLLANLFAFWILHRGSDEKNLNVRAAALHVMGDLLGSVGAIVAALIIIWTGWTPADPILSILVSVLVLRSAWRLLKDSVNELLEGAPVSLDINALQRHLSREIPEVRNVHHVHVWMVGEKPVMTLHAQVIPPHDHDALLERIQDFLMHEYHIAHATIQMEYQVCHGPDCHLNQTSSGHVHHH

SEQ ID NO: 36284 - DNA, 942 bp, Shigella flexneri
  CDS (1)..(942): transl_table=11
atggcgcactcacactcacacacgtcctcacacctgccagaagataataatgctcgtcgcttgttgtatgctttcggcgtgactgccgggtttatgctggtagaagtcgttggtggttttctttctggttctctggcattgctggccgatgcgggtcatatgttgaccgatactgccgccctgcttttcgccctactcgccgtgcaattttcacgtcgtcctcccaccattcgccacactttcggttggctaagactgaccacgctcgcggcgtttgtgaatgccatcgccctcgtggtaattaccattttgattgtctgggaggcgatagaacgcttccgcacgccgcgtccggtcgagggaggcatgatgatggcaattgccgtggctgggttgctggcaaatatactttctttctggttacttcatcacggcagcgaagagaaaaacctcaacgtacgagcagcggcactgcatgtgctcggggacctgctgggttcggttggggctattattgccgcgttgattattatctggactggctggacacctgctgaccccattctctcgatactggtgtcgcttctggttctgcgtagcgcgtggcgactgttgaaagatagcgtgaatgaattacttgaaggtgcaccggtatcgctggatatcgctgaactgaagcgtcgtatgtgccgggaaatcccggaagtccgcaatgtgcaccatgtacatgtatggatggtaggcgagaagccggtgatgacgttgcatgtgcaggtgatcccgccacacgatcacgatgccttgttggatcagatccaacactacctgatggatcactatcagattgagcacaccaccattcagatggaatatcaaccttgtcataggccagactgccacctgaatgaaggggtgtctggccattcacatcatcaccattaa

SEQ ID NO: 36285 - protein, 313 aa, Shigella flexneri
MAHSHSHTSSHLPEDNNARRLLYAFGVTAGFMLVEVVGGFLSGSLALLADAGHMLTDTAALLFALLAVQFSRRPPTIRHTFGWLRLTTLAAFVNAIALVVITILIVWEAIERFRTPRPVEGGMMMAIAVAGLLANILSFWLLHHGSEEKNLNVRAAALHVLGDLLGSVGAIIAALIIIWTGWTPADPILSILVSLLVLRSAWRLLKDSVNELLEGAPVSLDIAELKRRMCREIPEVRNVHHVHVWMVGEKPVMTLHVQVIPPHDHDALLDQIQHYLMDHYQIEHTTIQMEYQPCHRPDCHLNEGVSGHSHHHH

SEQ ID NO: 36286 - DNA, 939 bp, Yersinia pestis
  CDS (1)..(939): transl_table=11
atggctgtatccacaattttctcgcaagatagcaacagcaaacgcctattgatagccttcgccatcaccacattatttatggtgacggaagcgattggcggctggttatctggttctctggcattattggctgatgccggacacatgttgaccgactctgcagcattatttatcgcgttgatggcagtacacttctcccagagaaaaccagacccccgccatacttttggctacctacggctgacgacactcgcggcctttgttaacgcagcggcattattgctgattgttatattgatcgtctgggaggccgttcatcgcttcttttcacctcatgaggtgatgggtaccccgatgttaatcatcgctatcgccggactgttggcgaatattttttgtttttggatcctgcataagggagaagaagagaaaaacatcaatgtacgggcagcagccttgcatgtgctaagtgatttattaggttcagtgggcgcgatgattgcggctatcgtgattttaaccacgggctggacaccaatagaccccattctctcggtattggtgtcggtactgattttgcgtagcgcctggcgattactgaaagaaagttttcacgaattattggagggtgcgccgcaagagattgatatcaacaagctgcgtaaagacctatgtaccaatatttatgaagtccggaacattcatcatgttcacttatggcaagtgggtgaacaacggctaatgacccttcatgcccaagtgataccgccactggaccatgatgcgttattacaacgcatccaagactatttactgcatcactaccgcatcagtcatgccacagttcaaatggagtatcaacattgtggaacaccggattgtggtatcaatcaagcggcccctgccgacggacatcaccgtcatcatcaccacgaataa

SEQ ID NO: 36287 - protein, 312 aa, Yersinia pestis
MAVSTIFSQDSNSKRLLIAFAITTLFMVTEAIGGWLSGSLALLADAGHMLTDSAALFIALMAVHFSQRKPDPRHTFGYLRLTTLAAFVNAAALLLIVILIVWEAVHRFFSPHEVMGTPMLIIAIAGLLANIFCFWILHKGEEEKNINVRAAALHVLSDLLGSVGAMIAAIVILTTGWTPIDPILSVLVSVLILRSAWRLLKESFHELLEGAPQEIDINKLRKDLCTNIYEVRNIHHVHLWQVGEQRLMTLHAQVIPPLDHDALLQRIQDYLLHHYRISHATVQMEYQHCGTPDCGINQAAPADGHHRHHHHE

SEQ ID NO: 36288 - DNA, 939 bp, Yersinia pseudotuberculosis
  CDS (1)..(939): transl_table=11
atggctgtatccgcaattttctcgcaagatagcaacagcaaacgcctattgatagccttcgccatcaccacattatttatggtgacggaagcgattggcggctggttatctggttctctggcattattggctgataccggacacatgttgaccgactctgcagcattatttatcgcgttgatggcagtacacttctcccagagaaaaccagacccccgccatacttttggctacctacggctgacgacactcgcggcctttgttaacgcagcggcattattgctgattgttatattgatcgtctgggaggccgttcatcgcttcttttcacctcatgaggtgatgggtaccccgatgttaatcatcgctatcgccggactgttggcgaatattttttgtttttggatcctgcataagggagaagaagagaaaaacatcaatgtacgggcagcagccttgcatgtgctaagtgatttattaggttcagtgggcgcgatgattgcggctatcgtgattttaaccacgggctggacaccaatagaccccattctctcggtattggtgtcggtactgattttgcgtaacgcctggcgattactgaaagaaagttttcacgaattattggagggtgcgccgcaagagattgatatcaacaagctgcgtaaagacctatgtaccaatatttatgaagtccggaacattcatcatgttcacttatggcaagtgggtgaacaacggctaatgacccttcatgcccaagtgataccgccactggatcatgatgcgttattacaacgcatccaagactatttactgcatcactaccgcattagtcatgccacagttcaaatggagtatcagcattgtggaacaccggattgtggtatcaatcaagcggcccctgccgacggacatcaccgtcatcatcaccacgaataa

SEQ ID NO: 36289 - protein, 312 aa, Yersinia pseudotuberculosis
MAVSAIFSQDSNSKRLLIAFAITTLFMVTEAIGGWLSGSLALLADTGHMLTDSAALFIALMAVHFSQRKPDPRHTFGYLRLTTLAAFVNAAALLLIVILIVWEAVHRFFSPHEVMGTPMLIIAIAGLLANIFCFWILHKGEEEKNINVRAAALHVLSDLLGSVGAMIAAIVILTTGWTPIDPILSVLVSVLILRNAWRLLKESFHELLEGAPQEIDINKLRKDLCTNIYEVRNIHHVHLWQVGEQRLMTLHAQVIPPLDHDALLQRIQDYLLHHYRISHATVQMEYQHCGTPDCGINQAAPADGHHRHHHHE

SEQ ID NO: 36290 - DNA, 1257 bp, Oryza sativa
  CDS (1)..(1257)
atggacagccataactcagcacctccccagattgctgaagtgagaatggacatctcatcatctacttctgtagcagctgggaacaaagtttgcagaggtgctgcttgtgacttttctgattccagtaatagctcaaaagatgcaagggagagaatggcgtcaatgaggaagctcattattgctgtgatcctttgcatcatattcatggcggtcgaagtggttggaggtatcaaagcaaacagtttggcaatcttgactgatgcagcccatctcctttcggatgttgcggcctttgccatatctttgttctctctttgggcagctggatgggaagctacaccacagcagtcatatgggtttttccgtatagaaattcttggtgccctggtttctattcagctcatatggctccttgctggtattcttgtctatgaagctattgtaaggctcattaatgaaagtggtgaggtccagggctccctcatgtttgctgtctcagcatttggcttatttgttaacatcataatggctgtcttgcttggtcatgaccatggacatggacacggacatggtcatgggcatggacattcccatgaccatgatcatggtggttctgaccatgaccatcaccaccatgaagatcaagagcatggccatgtacatcaccacgaagatggccatggtaattcaattaccgtcaatctccatcaccatccaggcactggacaccaccaccatgatgctgaggaaccattgctcaagagtgatgctggttgtgacagcacccaatctggtgccaaggatgccaagaaggctcgtcgtaatatcaatgtacacagtgcttatctgcatgtgcttggggattcaatccagagcatcggtgtgatgattggaggggctatcatctggtacaagcccgagtggaagattattgatctcatctgcaccctcatcttctccgtgatcgtactcttcaccacaatcaagatgctgcgcaacatccttgaggtcctgatggagagcacgccccgcgagatcgatgccaccagccttgagaatggcctccgcgacatggacggtgtggttgcagtacatgagctgcacatctgggccataacggtggggaaggttctcctggcgtgccatgtgacaatcactcaggacgcagacgctgatcaaatgctggacaaggtgattgggtacatcaagtctgagtacaacatcagccatgtgaccattcagattgagcgcgagtag

SEQ ID NO: 36291 - protein, 418 aa, Oryza sativa
MDSHNSAPPQIAEVRMDISSSTSVAAGNKVCRGAACDFSDSSNSSKDARERMASMRKLIIAVILCIIFMAVEVVGGIKANSLAILTDAAHLLSDVAAFAISLFSLWAAGWEATPQQSYGFFRIEILGALVSIQLIWLLAGILVYEAIVRLINESGEVQGSLMFAVSAFGLFVNIIMAVLLGHDHGHGHGHGHGHGHSHDHDHGGSDHDHHHHEDQEHGHVHHHEDGHGNSITVNLHHHPGTGHHHHDAEEPLLKSDAGCDSTQSGAKDAKKARRNINVHSAYLHVLGDSIQSIGVMIGGAIIWYKPEWKIIDLICTLIFSVIVLFTTIKMLRNILEVLMESTPREIDATSLENGLRDMDGVVAVHELHIWAITVGKVLLACHVTITQDADADQMLDKVIGYIKSEYNISHVTIQIERE

SEQ ID NO: 36292 - DNA, 1131 bp, Brassica napus
  CDS (1)..(1131)
atggagccttcaagcccccaacatagtcacatcatcgaggtcaatgcatcaaaatctgatgaagaaagaacaacaacacttggttcagttaaagtctgtggagaaacaccttgtcatctcaacaatgcctctggtgacgccgaggaacgcactgcctccatgagaaagctctgcatcgctgtggtgctatgtcttctcttcatgaccgttgaagtctttggtgggatcaaagctaacagcttggctatactaaccgacgcagctcatctcctctctgatgttgccgcctttgccatctccttgttctccctgtgggctgctggctgggaagcgacgccaaggcagacttatgggtttttcaggattgagattctcggagctcttgtctctatccagctcatttggcttctcacagggattcttgtctatgaagctatcattagacttcttactgagactagtgaggttgatgggttccttatgttccttgttgctgcgtttgggctgctggtgaatatcgtaatggctgttctgttaggacatgatcatggccatggacatggtcatggtcatcacaatcacggtggggtgactgttaccacccatcaccatcatggtcatagtcatggtgaggacaagcatcactctcatggtgatgttactgagcagttgctagacaaatcagagaagaggaagaggaacatcaacgtgcaaggagcttacctccatgtccttggggactccatccagagcgttggcgttatgattggaggaggcatcatctggtacaaaccggagtggaagatagttgatctgatctgcacgcttgtcttttcggttattgtcttggggacgaccatcaacatgatcagaagcattcttgaggtgttgatggagagcacgccgagagagatcgacgctacgaagctggagaagggtttgctggagatggaggaagtggtggctgttcatgagcttcacatttgggctatcacggtggggaaagtgctgcttgcttgccatgtcaatatcaggccggaggcagatgctgatatggtgttgaacaaggtgattgattacatccggagagagtataatattagtcatgttacaatacaaattgagcgctaa

SEQ ID NO: 36293 - protein, 376 aa, Brassica napus
MEPSSPQHSHIIEVNASKSDEERTTTLGSVKVCGETPCHLNNASGDAEERTASMRKLCIAVVLCLLFMTVEVFGGIKANSLAILTDAAHLLSDVAAFAISLFSLWAAGWEATPRQTYGFFRIEILGALVSIQLIWLLTGILVYEAIIRLLTETSEVDGFLMFLVAAFGLLVNIVMAVLLGHDHGHGHGHGHHNHGGVTVTTHHHHGHSHGEDKHHSHGDVTEQLLDKSEKRKRNINVQGAYLHVLGDSIQSVGVMIGGGIIWYKPEWKIVDLICTLVFSVIVLGTTINMIRSILEVLMESTPREIDATKLEKGLLEMEEVVAVHELHIWAITVGKVLLACHVNIRPEADADMVLNKVIDYIRREYNISHVTIQIER

SEQ ID NO: 36294 - DNA, 21 bp, Artificial sequence
  primer
atggcgcactcacactcacac

SEQ ID NO: 36295 - DNA, 24 bp, Artificial sequence
  primer
ttaatggtgatgatgtgaatggcc

SEQ ID NO: 36296 - protein, 426 aa, Artificial sequence
  consensus sequence
  Variant (2)..(14): Xaa in position 2 to 14 is any amino acid
  Variant (16)..(18): Xaa in position 16 to 18 is any amino acid
  Variant (20)..(23): Xaa in position 20 to 23 is any amino acid
  Variant (28)..(29): Xaa in position 28 to 29 is any amino acid
  Variant (32)..(32): Xaa in position 32 is any amino acid
  Variant (34)..(36): Xaa in position 34 to 36 is any amino acid
  Variant (38)..(46): Xaa in position 38 to 46 is any amino acid
  Variant (48)..(60): Xaa in position 48 to 60 is any amino acid
  Variant (61)..(62): Xaa in position 61 to 62 is any or no amino acid
  Variant (64)..(65): Xaa in position 64 to 65 is any amino acid
  Variant (67)..(71): Xaa in position 67 to 71 is any amino acid
  Variant (73)..(89): Xaa in position 73 to 89 is any amino acid
  Variant (91)..(92): Xaa in position 91 to 92 is any amino acid
  Variant (94)..(110): Xaa in position 94 to 110 is any amino acid
  Variant (111)..(112): Xaa in position 111 to 112 is any or no amino acid
  Variant (114)..(116): Xaa in position 114 to 116 is any amino acid
  Variant (118)..(130): Xaa in position 118 to 130 is any amino acid
  Variant (131)..(226): Xaa in position 131 to 226 is any or no amino acid
  Variant (228)..(230): Xaa in position 228 to 230 is any amino acid
  Variant (232)..(232): Xaa in position 232 is any amino acid
  Variant (235)..(237): Xaa in position 235 to 237 is any amino acid
  Variant (239)..(241): Xaa in position 239 to 241 is any amino acid
  Variant (243)..(260): Xaa in position 243 to 260 is any amino acid
  Variant (261)..(263): Xaa in position 261 to 263 is any or no amino acid
  Variant (265)..(289): Xaa in position 265 to 289 is any amino acid
  Variant (291)..(294): Xaa in position 291 to 294 is any amino acid
  Variant (296)..(309): Xaa in position 296 to 309 is any amino acid
  Variant (310)..(314): Xaa in position 310 to 314 is any or no amino acid
  Variant (316)..(318): Xaa in position 316 to 318 is any amino acid
  Variant (320)..(321): Xaa in position 320 to 321 is any amino acid
  Variant (323)..(323): Xaa in position 323 is any amino acid
  Variant (325)..(334): Xaa in position 325 to 334 is any amino acid
  Variant (335)..(335): Xaa in position 335 is any or no amino acid
  Variant (337)..(342): Xaa in position 337 to 342 is any amino acid
  Variant (343)..(419): Xaa in position 343 to 419 is any or no amino acid
  Variant (421)..(421): Xaa in position 421 is any amino acid
  Variant (423)..(423): Xaa in position 423 is any amino acid
  Variant (425)..(425): Xaa in position 425 is any amino acid
LXXXXXXXXXXXXXEXXXGXXXXSLALXXDAXHXXXDXXXXXXXXXAXXXXXXXXXXXXXXXGXXRXXXXXAXXXXXXXXXXXXXXXXXAXXRXXXXXXXXXXXXXXXXXXXGXXXNXXXXXXXXXXXXXXXXXXXXXXXXXXXXXXXXXXXXXXXXXXXXXXXXXXXXXXXXXXXXXXXXXXXXXXXXXXXXXXXXXXXXXXXXXXXXXXXXXXXXXXXXXXXXXNXXXAXLHXXXDXXXSXXXXXXXXXXXXXXXXXXXXXDXXXXXXXXXXXXXXXXXXXXXXXXXLXXXXPXXXXXXXXXXXXXXXXXXXVXXXHXXHXWXXXXXXXXXXXHXXXXXXXXXXXXXXXXXXXXXXXXXXXXXXXXXXXXXXXXXXXXXXXXXXXXXXXXXXXXXXXXXXXXXXXXXXXXXXXXXXXHXTXQXE

SEQ ID NO: 36297 - protein, 20 aa, Artificial sequence
  protein pattern
  Variant (2)..(5): Xaa in position 2 to 5 is any amino acid
  Variant (6)..(6): Xaa in position 6 is any or no amino acid
  Variant (10)..(10): Xaa in position 10 is Ile or Leu
  Variant (11)..(11): Xaa in position 11 is any amino acid
  Variant (12)..(12): Xaa in position 12 is Ala, Gly, Ser or Thr
  Variant (14)..(14): Xaa in position 14 is Ala, Gly, Ser or Thr
  Variant (15)..(15): Xaa in position 15 is any amino acid
  Variant (17)..(19): Xaa in position 17 to 19 is any amino acid
GXXXXXSLAXXXDXXHXXXD

SEQ ID NO: 36298 - protein, 24 aa, Artificial sequence
  protein pattern
  Variant (2)..(4): Xaa in position 2 to 4 is any amino acid
  Variant (5)..(6): Xaa in position 5 to 6 is any or no amino acid
  Variant (8)..(8): Xaa in position 8 is any amino acid
  Variant (9)..(9): Xaa in position 9 is Ala, Ile, Leu or Val
  Variant (10)..(10): Xaa in position 10 is Glu or His
  Variant (11)..(11): Xaa in position 11 is Ile, Leu, Met or Val
  Variant (12)..(13): Xaa in position 12 to 13 is any amino acid
  Variant (15)..(17): Xaa in position 15 to 17 is any amino acid
  Variant (19)..(19): Xaa in position 19 is any amino acid
  Variant (20)..(20): Xaa in position 20 is Ala, Gly, Ile or Leu
  Variant (21)..(21): Xaa in position 21 is Ala, Thr or Val
  Variant (22)..(22): Xaa in position 22 is Phe, Ile, Leu, Met or Val
  Variant (23)..(23): Xaa in position 23 is any amino acid
  Variant (24)..(24): Xaa in position 24 is Ala, Gly, Ser or Thr
NXXXXXAXXXXXXDXXXSXXXXXX

SEQ ID NO: 36299 - DNA, 966 bp, Escherichia coli
  CDS (1)..(966): transl_table=11
atgggcaaagcagtcattgcaattcatggtggcgcaggtgcaattagccgcgcgcagatgagtctgcaacaggaattacgctacatcgaggcgttgtctgccattgttgaaaccgggcagaaaatgctggaagcgggcgaaagtgcgctggatgtggtgacggaagcggtgcgtctgctggaagagtgtccactgtttaacgccggaattggcgctgtctttacgcgtgatgaaacccatgaactggacgcctgtgtgatggatggtaacaccctgaaagccggtgcggtggcgggcgttagtcatctgcgtaatccggttcttgccgcccggctggtgatggagcaaagcccgcatgtgatgatgattggcgaaggggcagaaaattttgcgtttgctcgtggcatggagcgcgtctcgccggagattttctccacgtctttgcgttatgaacaactactggcagcgcgcaaggaaggggcaaccgtcctcgaccatagcggtgcgccactggatgaaaaacagaaaatgggcaccgtgggggccgtggcgttggatttagacggcaatttggcggcagccacgtccacaggcggaatgaccaataaattacccggacgagttggcgatagtcccttagtgggtgccggatgctacgccaataacgccagtgtggcggtttcttgtaccggcacgggcgaagtcttcatccgcgcgctggcggcatatgacatcgccgcgttaatggattacggcggattaagtctcgcggaagcctgcgagcgggtagtaatggaaaaactccctgcgcttggcggtagcggtggcttaatcgctatcgaccatgaagggaatgtcgcgctaccgtttaacaccgaaggaatgtatcgcgcctggggctacgcaggcgatacgccaaccaccggtatctaccgtgaaaaaggggacaccgttgccacacagtaa

SEQ ID NO: 36300 - protein, 321 aa, Escherichia coli
MGKAVIAIHGGAGAISRAQMSLQQELRYIEALSAIVETGQKMLEAGESALDVVTEAVRLLEECPLFNAGIGAVFTRDETHELDACVMDGNTLKAGAVAGVSHLRNPVLAARLVMEQSPHVMMIGEGAENFAFARGMERVSPEIFSTSLRYEQLLAARKEGATVLDHSGAPLDEKQKMGTVGAVALDLDGNLAAATSTGGMTNKLPGRVGDSPLVGAGCYANNASVAVSCTGTGEVFIRALAAYDIAALMDYGGLSLAEACERVVMEKLPALGGSGGLIAIDHEGNVALPFNTEGMYRAWGYAGDTPTTGIYREKGDTVATQ

SEQ ID NO: 36301 - DNA, 954 bp, Oryza sativa (japonica cultivar-group)
  CDS (1)..(954)
atggggtgggcggtcgcgctgcacggcggcgccggggacatcccgcgctcgctgccgcccgaccgcagggagccccgcctcgccacgctccgccgctgcctcgacctcgccaccgccgcgctccgttccggccgcgctgccctcgacgtcgtcgagctcgtcgtgagggagctggagaactgcccgcactacaacgccggcgtgggctccgtgctcaccgccgacggcaccgtcgagatggaggccgccgtcatggacggcaacaccttgcgctgcggcgccgtctccggactctccaccgtcgtcaacgccgtctccctcgccaggctcgtcatggagaagacgccgcacatctacctcgccttcgatggcgccgaggccttcgccagggagcagggagtggagactaaagatccaagccactttattacggaggcaaacaaagagaggctcagacaagcaaaagaagccaacagggtgcaggtggattacacccaaccaattcccaaggacgacaacagccgggtcggcacggtgggctgcgtggccatcgactccgccggcaacctcgcgacggcgacgtccaccggcgggctggtgaacaagatggccggcaggatcggcgacacgccggtgatcggcgccgggacgtacgccaacgcgctgtgcgccgtgtcggccacgggcgtgggcgaggccatcatccggcacacggtggcgcgcgacgtcgcggccctgctggagcacgccccgccggccggcctctccctgggggacgccgccgcgcgcgtcgtggccggcgtgccgccgggcaaggtcgggctggtggccgtgtcggccgccggcgaggtggccatggcgtacaacaccaccggcatgttcagggcgtgcgccacggagggcggccgccacgaggtggccatctggcctgacgacgctgatggtgctaattga

SEQ ID NO: 36302 - protein, 317 aa, Oryza sativa (japonica cultivar-group)
MGWAVALHGGAGDIPRSLPPDRREPRLATLRRCLDLATAALRSGRAALDVVELVVRELENCPHYNAGVGSVLTADGTVEMEAAVMDGNTLRCGAVSGLSTVVNAVSLARLVMEKTPHIYLAFDGAEAFAREQGVETKDPSHFITEANKERLRQAKEANRVQVDYTQPIPKDDNSRVGTVGCVAIDSAGNLATATSTGGLVNKMAGRIGDTPVIGAGTYANALCAVSATGVGEAIIRHTVARDVAALLEHAPPAGLSLGDAAARVVAGVPPGKVGLVAVSAAGEVAMAYNTTGMFRACATEGGRHEVAIWPDDADGAN

SEQ ID NO: 36303 - DNA, 981 bp, Vibrio cholerae O1 biovar eltor str. N16961
  CDS (1)..(981): transl_table=11
atgacacagccttttgcgattgccatccatggcggtgccggcacgattttgcgtgagcagatgagtgatgcattgcgcatggacatcctcgcgacattagagcaagccgtgcgagccgggcatcagctactggttgaaggagccgatgccttagatgcggtggtggcagcggtgacagtattggaagactcgccactgtttaatgccggcaaaggctcagtactgacgcacaatgaaatggtggagatggatgcctcggtgatgcatggcgcagcccgagaggctggcgcgattgctggtgtgcgccatattcgcaacccgattcaactcgcgcgcgatgtgctgcgtcatagtgatcatgtgtttttgattggtgatggggcggagcaatttgctttccagcaagggcatgtttataccgagcaagattattttttcactgagcgccgttatgaacagctgcaaaacatgaagcagcaagatcgcttcgcactttcagaagcttcctatcaatccgagtctgctgaacaagagtcgccaagtgaatatcccgatgataagaaatttggcacggtaggcgcggtggcgttggatcaacagggcaatttggcggcggcgaccagtacgggtgggatcaccaataaacgctttggtcgcgtgggcgactcgccaatcatcggcgctggaacgttagctgaaaatggcaatgtcgccatttcatgcaccggaatgggcgagtacttcatccgttatgcggttgcaggcgatattgcggcacgcatgcgttatctcaaagaagatgtccataccgcctgtgaaaccgtggtgcaaggtgaactgaaaagcgtaggtggtgaagggggattaattgcgattgatgcgcagggtgaacttcactttgccatgaacagttctggcatgtatcgcgcggggattgatcgcgatggtcaattcagtgtgaaaatttacgctgacgaataa

SEQ ID NO: 36304 - protein, 326 aa, Vibrio cholerae O1 biovar eltor str. N16961
MTQPFAIAIHGGAGTILREQMSDALRMDILATLEQAVRAGHQLLVEGADALDAVVAAVTVLEDSPLFNAGKGSVLTHNEMVEMDASVMHGAAREAGAIAGVRHIRNPIQLARDVLRHSDHVFLIGDGAEQFAFQQGHVYTEQDYFFTERRYEQLQNMKQQDRFALSEASYQSESAEQESPSEYPDDKKFGTVGAVALDQQGNLAAATSTGGITNKRFGRVGDSPIIGAGTLAENGNVAISCTGMGEYFIRYAVAGDIAARMRYLKEDVHTACETVVQGELKSVGGEGGLIAIDAQGELHFAMNSSGMYRAGIDRDGQFSVKIYADE

SEQ ID NO: 36305 - DNA, 885 bp, Halobacterium sp. NRC-1
  CDS (1)..(885): transl_table=11
atgcgcgtgctcgttcacggtggtgccggggctccccccgacgcgcccgcaccccgccaagacaccctggagacggcagccgacaccggcgcatcgcacgcaacgcccgtcgacgcagtcacggcggccgttcgcgtcctggagcgcgaccccgcgttcaacgcgggcaccggcgcgacaccccaatcggatggcgtgatccgcaccgacgcgggcatgatgaccagcgaccgcgcggccggcgcagccgcctcgatgcccggcgtcgaggccgcggtcgccgtcgcccgcgcggtcatggcggacaccccgcacgtgctgttgagcggcgtgcacgccgtcgacttcgccgccgacaccggcatccctgtcgagtcggatctctggaccgccgacacccgtgcccgctgggacgacctcgactcccatcccgacgggtcacccaccgaccaccgcgactgggtgcgggagcggttcggacgcactgaccccggcggccgcgagtcgccgcccggcgaccacgacaccgtgggcgcggtggcgtccgacggcgaccggttcgcaaccgcgacctcgacgggcggccggtggctcgcgctcgccgggcgcgtcggcgacgtgccccagatcggggccgggttctacgccgccccggcgggcgcggcgtcggccaccggcgctggcgaggccatcgcgaaaaccacgctctcgcggcgcgcggtccggcacctcgaagccgggctgggggcgcaggcggccgccgaccgcgccatcgaggagttcagcgaactcacgggggcgtcagccggcgtcattgtcgtggaccgcgacggcgggtgcggcacagcacacaacgccgccgcgatgcagaccgcacggcactga

SEQ ID NO: 36306 - protein, 294 aa, Halobacterium sp. NRC-1
MRVLVHGGAGAPPDAPAPRQDTLETAADTGASHATPVDAVTAAVRVLERDPAFNAGTGATPQSDGVIRTDAGMMTSDRAAGAAASMPGVEAAVAVARAVMADTPHVLLSGVHAVDFAADTGIPVESDLWTADTRARWDDLDSHPDGSPTDHRDWVRERFGRTDPGGRESPPGDHDTVGAVASDGDRFATATSTGGRWLALAGRVGDVPQIGAGFYAAPAGAASATGAGEAIAKTTLSRRAVRHLEAGLGAQAAADRAIEEFSELTGASAGVIVVDRDGGCGTAHNAAAMQTARH

SEQ ID NO: 36307 - DNA, 831 bp, Sulfolobus solfataricus P2
  CDS (1)..(831): transl_table=11
gtgagatataatttaccagtactcgtagtacacggcggggcaggaagttggcaaatagctgatcaagataaggcaaaattgacaataagcgaagcgttagaaagagggtactatgaatttaggaaaggttctgcaatagaagctgtagtagaggcaatatattatatggaggagtctggggttttcgatgctggaaagggtagtgtgagaaactcagccggctatatcgaaatggatgctggaataatggtaggtaatacacttcaagtgggaggtataatggggttaagagagggcagtgcgataaaaaaggcattggaaatcctattccaaaataggcatgtattgatgataggttctaattataatagttcgaattctaataatagtgcaatttacgaaagtaaggtttctggagatactgtaggtgcagtagcattagatcagcatggtaatctagttgcaggaactagcactggaggtataaaaggaaaattaccaggtagagttggtgattcccctattccgggtgctggctattacgctacgtctaatgtggcagtttctagtactggaattggtgagataattttaaggatattacccgctaaagaagttgatattttggtctcattgggtttcactattgatgatgcactaagggcggtagtaaataaggtgactaagactttcggaaaagataatataggaatgattggattagataagtatggaaacgcctcagcttactataatacaaaaggcatggctagaggtgttatctcctctgatggagtcaagaaagtatatgtcttcgagggtgacatctaa

SEQ ID NO: 36308 - protein, 276 aa, Sulfolobus solfataricus P2
MRYNLPVLVVHGGAGSWQIADQDKAKLTISEALERGYYEFRKGSAIEAVVEAIYYMEESGVFDAGKGSVRNSAGYIEMDAGIMVGNTLQVGGIMGLREGSAIKKALEILFQNRHVLMIGSNYNSSNSNNSAIYESKVSGDTVGAVALDQHGNLVAGTSTGGIKGKLPGRVGDSPIPGAGYYATSNVAVSSTGIGEIILRILPAKEVDILVSLGFTIDDALRAVVNKVTKTFGKDNIGMIGLDKYGNASAYYNTKGMARGVISSDGVKKVYVFEGDI

SEQ ID NO: 36309 - DNA, 993 bp, Agrobacterium tumefaciens str. C58
  CDS (1)..(993): transl_table=11
ttgattgtaagaggccctgccaaagttgggcgacgaaggagttatcaaatgacgaagatcgcactggccattcacggtggttgcggcgtgatgccggaagacagcatgacggcggcggaatgggccgcggcccgtgaagatctggcagcagcgctgcgggccggttatggcgtgctgaaggcgggcggaacagcgctcgaggccgttgaggcagcggtcgtcgtcatggaggacagcccgcacttcaatgcgggacacggggcggcgctgaacgaaaacggcattcacgaactcgatgcctcgatcatggacggggccacgctttcggcaggcgcgatcagcgcatcccgcgccattcgcaatcctgtgaaggcggcccgcgcactgatggtggatgaacgggcggtctatctcacaggagaggctgcggatcgctttgccacggagaagggtctcgccaccgaacctcagtcctatttcaccacgcaaaaacgcctcgaggcactggcagcgatgaagcgccatgcagccacaggcacggaagcgacggaaaacgaaaagcacggaaccgtcggcgcggtggcgctcgatgcggcggggcaccttgctgcggccacctcaaccggcggctataccaacaagccggatggccgggtgggcgacagccccgtgatcggcgccggcacctatgcgcgcgacggcgcctgcgcggtctccggcaccggcaagggtgagtttttcatccgttatgtcgtcggccacgagatcgcgtcacgcgtcgcctatctcggacaggatctggaaaccgccgccggcaatctcgtgcacagggacctggctccctatgatatcggtgccggtctggtcgccattgatgcgaagggcggcattaccgctccgtacaatacaccaggcatgttccgcggctgggttacggcgtctggagaggcgtttgtggccactcacgctgaagcttacgccgtcaaattataa

SEQ ID NO: 36310 - protein, 330 aa, Agrobacterium tumefaciens str. C58
MIVRGPAKVGRRRSYQMTKIALAIHGGCGVMPEDSMTAAEWAAAREDLAAALRAGYGVLKAGGTALEAVEAAVVVMEDSPHFNAGHGAALNENGIHELDASIMDGATLSAGAISASRAIRNPVKAARALMVDERAVYLTGEAADRFATEKGLATEPQSYFTTQKRLEALAAMKRHAATGTEATENEKHGTVGAVALDAAGHLAAATSTGGYTNKPDGRVGDSPVIGAGTYARDGACAVSGTGKGEFFIRYVVGHEIASRVAYLGQDLETAAGNLVHRDLAPYDIGAGLVAIDAKGGITAPYNTPGMFRGWVTASGEAFVATHAEAYAVKL

SEQ ID NO: 36311 - DNA, 816 bp, Sulfolobus tokodaii str. 7
  CDS (1)..(816): transl_table=11
atgaaatacacaaaacccgttttagttgtccatggaggagctggagattggagtaaaagagactatgaaaagggacttacagagatcaaaaaaacgttagaaaggggttatgaagaatttaaaaaaggtagtgctattgaagctgttgttgaggctatcgcatatatggaggactctggagtatttgatgctggtatagggagcgttaagaactctgaaggagaagtggaaatggatgctggaattatgcatggtaatagttggaaagtaggtgctgtggcttcggttaaggctaaaaatcccataaaagaagcactaaaagttatgcttgacggtagacatgtccttttagttggcgaaaggggtgaaaggtcgataaccaattttattggaaataacggtggagatactgtcggtgctgttgccttagacgaacaaggtaatttagtagctgggacaagtactggaggaatttctggcaaattaccaggtagagttggtgactccccaatacctggtgctggatactatgcaactcctagagttgcagtttcttctactggtattggtgaaattattcttaggattttaccggctaaagaagtagatatgttagtttccatgggtttctcaatagaggattctgttagggctgttatcaataagattactgaactatttggcaagagtaatgtaggcttaattgggatagattataaaggatatgctactgcttattataacactgttggaatggcaaggggagtaaaggataagaatatagttagagtctttgtttttgagggagaaatctaa

SEQ ID NO: 36312 - protein, 271 aa, Sulfolobus tokodaii str. 7
MKYTKPVLVVHGGAGDWSKRDYEKGLTEIKKTLERGYEEFKKGSAIEAVVEAIAYMEDSGVFDAGIGSVKNSEGEVEMDAGIMHGNSWKVGAVASVKAKNPIKEALKVMLDGRHVLLVGERGERSITNFIGNNGGDTVGAVALDEQGNLVAGTSTGGISGKLPGRVGDSPIPGAGYYATPRVAVSSTGIGEIILRILPAKEVDMLVSMGFSIEDSVRAVINKITELFGKSNVGLIGIDYKGYATAYYNTVGMARGVKDKNIVRVFVFEGEI

SEQ ID NO: 36313 - DNA, 879 bp, Caulobacter crescentus CB15
  CDS (1)..(879): transl_table=11
atgtcaaacaaacgttttagtctcgccctgcacggcggcgccggagccaagcgcggccacgactacggcgtcgagatcgcccatatgcgcggcctcgtcgaagccgcccgcgatcgcctggccgccggcgccggcgcgctcgacgtggcggtcgagaccgtggtcggccttgaggccagcgggctctacatcgccggcaagggcgcctcgcccaacgccgacggcgaatatgagctggacgccagcctgatggacggcgccaccctgcgcgccgggtcggtcgccgccctgcagggcttcaagagcccgatcctggccgcccgggcggtgatggagcacaccccgcacgtgatgctggccggccagggcgctatcgccttcgcccgcgagcagggcctggagaccgtcgaggatcccgacgcctggttcacccgcgccggcgccttcgaggacaaccatccgccggacgcgctgcccaccggcaccgtcggctgcgtggtccgcgacggcgaagggcgcctcgccgccgccacctccaccgccggagtgttcggcaagcggcccggccgggtgggcgacagccccatcatcggcgccggggcctgggccgacggccacgccgccgtctcttgcaccggccagggcgagtacttcatccgcgccgccgtcgccgcccagatcgcccaccgcgtccgcttcggcggcgaggccctggacgcggcggcccaggctgcgatcgacagcgtcgcggcgctgggcggtcacggcggactgatcgcggtcgatcgtgacggcaacatcgccatgcccttcgtctccagcggtctgaaacgcgccgccctgatgccggacggaaccatcgtcagcgcggcgttctag

SEQ ID NO: 36314 - protein, 292 aa, Caulobacter crescentus CB15
MSNKRFSLALHGGAGAKRGHDYGVEIAHMRGLVEAARDRLAAGAGALDVAVETVVGLEASGLYIAGKGASPNADGEYELDASLMDGATLRAGSVAALQGFKSPILAARAVMEHTPHVMLAGQGAIAFAREQGLETVEDPDAWFTRAGAFEDNHPPDALPTGTVGCVVRDGEGRLAAATSTAGVFGKRPGRVGDSPIIGAGAWADGHAAVSCTGQGEYFIRAAVAAQIAHRVRFGGEALDAAAQAAIDSVAALGGHGGLIAVDRDGNIAMPFVSSGLKRAALMPDGTIVSAAF

SEQ ID NO: 36315 - DNA, 957 bp, Nostoc sp. PCC 7120
  CDS (1)..(957): transl_table=11
atgaagtcacaggtgcaaccaaaattaattattcatgggggagcaggtagttctctccacggcaaaggtggattagaagcagtgcgccaaacgcttcatgcagtagtagaggaagtctacgctctattattgtcaggagtgaatgcttctgtggcagtggtacgcggttgtcaactgttggaagatgaaccccgcttcaatgctggtactggttcggtgctgcaatctgatgggcaaatccgcatgagtgcttccatcatggatggtgcattaggacgctttagtggtgtaataaatgtttcacgggtaaaaaatccgattgagttagcacaatttttacaaaattctccagacagagtgctgtcagattatggttcggctgaattagccagggaaatgcaaatccctagttacaatgctttaactgagctgcgattacaagaatggatacaagaacggcaagataattttaaaagaacaatggctggggtaatagccgaaccagaactattggaaactagtaatgctgggcgcggtacaatcggtgtagtagctttagatacctatggtaaattagcagtaggtacttctacaggtggcaaaggctttgagcgcattgggcgcgtcagtgattctgctatgccagcaggtaattatgctactagttatgccgcagtcagttgtactggcatcggtgaagacattattgatgagtgcctagcccccaagattgtcattcgtgtcacagatggattgtccctccaagactctatgcagcgatcctttgccgaagcacacgacaacaaaagagatttcggagcgatcgccttagatgccaatggtgcgatcgcctggggtaaaacttgtgacatcatcctcgccgccttccatgatggcgaaaagattggcgatacattagaacttgcggttggtacgcaggtgggtagtatcagttag

SEQ ID NO: 36316 - protein, 318 aa, Nostoc sp. PCC 7120
MKSQVQPKLIIHGGAGSSLHGKGGLEAVRQTLHAVVEEVYALLLSGVNASVAVVRGCQLLEDEPRFNAGTGSVLQSDGQIRMSASIMDGALGRFSGVINVSRVKNPIELAQFLQNSPDRVLSDYGSAELAREMQIPSYNALTELRLQEWIQERQDNFKRTMAGVIAEPELLETSNAGRGTIGVVALDTYGKLAVGTSTGGKGFERIGRVSDSAMPAGNYATSYAAVSCTGIGEDIIDECLAPKIVIRVTDGLSLQDSMQRSFAEAHDNKRDFGAIALDANGAIAWGKTCDIILAAFHDGEKIGDTLELAVGTQVGSIS

SEQ ID NO: 36317 - DNA, 963 bp, Ralstonia solanacearum GMI1000
  CDS (1)..(963): transl_table=11
atgcccaccccgatcctcgccatccatggcggcgccggcaccattacccgggcggcgatggacgccgacaaggaagccgcctaccggcaggcgctcgacggcatcctgctggccggccagcgcattctggccggcggcggcagcgcgctcgacgccgtgaccgaagccgtgcgcctgctggaagcgtgcccgctgttcaatgccggcaaggggtccgtgctcacgcgcgcgggcacctacgagctggatgcctcgatcatggacggcaccacgctggccgccggcgcggtgacctgcgtcaagcgcctgcgccatcccgtgctggccgcgcgcgccgtgatggagcacagcgagcacgtgctgttcacctccgagggcgccgaggcgttcgccgcgtcgcagggactggagttcgtcgagccggactactactacaccgaggcgcgctacgcccagtggcagcgcgcccgccagcacgccggcatggcgctgctcgaccacgatgcggcatccctgctggcgcaggcgcccgagccgatcgatcccgacagcaagttcggcaccgtgggcgcggtcgcgtgcgatgcgcagggccggctggcggcggccacgtccaccggcggcgtcaccaacaagcaggtcggccgggtgggcgacacgccgctgatcggcgccggctgctacgccaaccgcgccgccgccgtgtcgtgcaccggcaccggggagatgttcatccgcgccgtggccgcctacgacgtggccgcgcagatggaatacgccggcaagccgctggccgaggcctgcgacgacgtggtgatgcgcaagctggtcgccatcggggggcgcggcgggctgatcgcggtggacgcgcacagcaacgtggcgctgccgttcaacaccgagggcatgtaccggggcttcgcgcgcggggatgccgcgcccgaggtctcgatttaccgatag

SEQ ID NO: 36318 - protein, 320 aa, Ralstonia solanacearum GMI1000
MPTPILAIHGGAGTITRAAMDADKEAAYRQALDGILLAGQRILAGGGSALDAVTEAVRLLEACPLFNAGKGSVLTRAGTYELDASIMDGTTLAAGAVTCVKRLRHPVLAARAVMEHSEHVLFTSEGAEAFAASQGLEFVEPDYYYTEARYAQWQRARQHAGMALLDHDAASLLAQAPEPIDPDSKFGTVGAVACDAQGRLAAATSTGGVTNKQVGRVGDTPLIGAGCYANRAAAVSCTGTGEMFIRAVAAYDVAAQMEYAGKPLAEACDDVVMRKLVAIGGRGGLIAVDAHSNVALPFNTEGMYRGFARGDAAPEVSIYR

SEQ ID NO: 36319 - DNA, 945 bp, Agrobacterium tumefaciens str. C58
  CDS (1)..(945): transl_table=11
atgacgaagatcgcactggccattcacggtggttgcggcgtgatgccggaagacagcatgacggcggcggaatgggccgcggcccgtgaagatctggcagcagcgctgcgggccggttatggcgtgctgaaggcgggcggaacagcgctcgaggccgttgaggcagcggtcgtcgtcatggaggacagcccgcacttcaatgcgggacacggggcggcgctgaacgaaaacggcattcacgaactcgatgcctcgatcatggacggggccacgctttcggcaggcgcgatcagcgcatcccgcgccattcgcaatcctgtgaaggcggcccgcgcactgatggtggatgaacgggcggtctatctcacaggagaggctgcggatcgctttgccacggagaagggtctcgccaccgaacctcagtcctatttcaccacgcaaaaacgcctcgaggcactggcagcgatgaagcgccatgcagccacaggcacggaagcgacggaaaacgaaaagcacggaaccgtcggcgcggtggcgctcgatgcggcggggcaccttgctgcggccacctcaaccggcggctataccaacaagccggatggccgggtgggcgacagccccgtgatcggcgccggcacctatgcgcgcgacggcgcctgcgcggtctccggcaccggcaagggtgagtttttcatccgttatgtcgtcggccacgagatcgcgtcacgcgtcgcctatctcggacaggatctggaaaccgccgccggcaatctcgtgcacagggacctggctccctatgatatcggtgccggtctggtcgccattgatgcgaagggcggcattaccgctccgtacaatacaccaggcatgttccgcggctgggttacggcgtctggagaggcgtttgtggccactcacgctgaagcttacgccgtcaaattataa

SEQ ID NO: 36320 - protein, 314 aa, Agrobacterium tumefaciens str. C58
MTKIALAIHGGCGVMPEDSMTAAEWAAAREDLAAALRAGYGVLKAGGTALEAVEAAVVVMEDSPHFNAGHGAALNENGIHELDASIMDGATLSAGAISASRAIRNPVKAARALMVDERAVYLTGEAADRFATEKGLATEPQSYFTTQKRLEALAAMKRHAATGTEATENEKHGTVGAVALDAAGHLAAATSTGGYTNKPDGRVGDSPVIGAGTYARDGACAVSGTGKGEFFIRYVVGHEIASRVAYLGQDLETAAGNLVHRDLAPYDIGAGLVAIDAKGGITAPYNTPGMFRGWVTASGEAFVATHAEAYAVKL

SEQ ID NO: 36321 - DNA, 900 bp, Pyrobaculum aerophilum str. IM2
  CDS (1)..(900): transl_table=11
gtgattgtcgcggtccacggcggagctggcctgtggagagtagaagagcgcatcaagcaggaggtcaaaaaggcgctggccgccgccattagcgagggccttctcgcggccgagagggggagcgccctagatgcagttgtggcggcggtggagtacatggagaaaagcggcctcttcaacgcgggctacggctctgtctacgccatagacggcagagtatatatggacgctggcgttatggacgggcgctctaaaagagcgggagccgtggcggccgtcgagggtgttaaaagcgccgtgaggctggctaggtacgtgttggaaaacacagaccacgtcattatatcgggagagggcgcccggctcctcgcggctaaaacaggccttttagaagcctcttataaattttacacagaggagaaaaacaagaggtttcaagaggtggtgcaagaggcgaggcggggcaattggcattataagagagtcgcggaatttttcggcgatactgtcggcgccgtggcgttggacagagacggcaatttagcagcggctacctccactgggggcgtttggctcaaatggccggggaggataggcgatagtccaataccgggggctgggttttgggctgaaaacggagtgggggccttcagcgctacaggcgtgggggaggtgattattatgtccgctctgtcgttaagagcccgcgacgagcttataaaaacaggcgatataggcgttgcagtagagaaggcgatagggttcgtgactgagtcgtacggcccaaatacggctgggataatagggattgactccaaggggaggcccgcctacgcctataacacaaaggcaatggcgagggggtggggaaaacgcggggagatttacgtagatctttag

SEQ ID NO: 36322 - protein, 299 aa, Pyrobaculum aerophilum str. IM2
MIVAVHGGAGLWRVEERIKQEVKKALAAAISEGLLAAERGSALDAVVAAVEYMEKSGLFNAGYGSVYAIDGRVYMDAGVMDGRSKRAGAVAAVEGVKSAVRLARYVLENTDHVIISGEGARLLAAKTGLLEASYKFYTEEKNKRFQEVVQEARRGNWHYKRVAEFFGDTVGAVALDRDGNLAAATSTGGVWLKWPGRIGDSPIPGAGFWAENGVGAFSATGVGEVIIMSALSLRARDELIKTGDIGVAVEKAIGFVTESYGPNTAGIIGIDSKGRPAYAYNTKAMARGWGKRGEIYVDL

SEQ ID NO: 36323 - DNA, 999 bp, Drosophila melanogaster
  CDS (1)..(999)
atgccacgcccagttctgctcattcacggtggagccggtgatatatcggactccaggatagcgggcaagttcgcgggcattaagcaggcactgcgctccgcctgggggctactgagtccggacaatggcagcggcggaggcagtgccctggatgccgtagaggcggcggtgcgcagcatggagctggacgagaacttcaacgccggctacggctcctgcctgaacaccagtggccaggtggagctagaggccagtttaatggagggccgcgacttgcgagccggctgcataaccctgctgcgggatgtgatgcacccgattacagtggcgcgtcgcctgatggagaagcagcgacacacctttcttggcggcgcagcggcccaggagctggcactagccacgggcagcgaacgactgcagccgggagcactggtcaccgagggggctcgcttaacgctgaaggaattcgaggatcaggtggcccagggcaaggatcccttcttcgcgcgcaccgaactgaccgatgacaagccggtgccgaaaacggatcccagtggcgaaacagtcggagcggttgccatggacgcatcgggccaaatagtggtgggcacctccaccggcggcatcaccggcaagtggccgggtcgcattggggacacacccattctcggcagcggcacctatgcggataactgccgtggaggcgtctccaccaccggacatggcgagaccctcatgcgttacaatctggcccagcgcattctgtccgccatggagtaccagggactgtccgcccaggcagccgccgacaaggagtgccgcgagatgaccaaacggctgggtggcactggtggcgccatcgtggttggccactccggtgacctgggcatcagtttcacgtcgcgtcgcatggcgtggggatatgtccaggatggcaccatcttttacggcatcgagggtcaggtggtgcaccaggaaccgttcacactttccacgtaa

SEQ ID NO: 36324 - protein, 332 aa, Drosophila melanogaster
MPRPVLLIHGGAGDISDSRIAGKFAGIKQALRSAWGLLSPDNGSGGGSALDAVEAAVRSMELDENFNAGYGSCLNTSGQVELEASLMEGRDLRAGCITLLRDVMHPITVARRLMEKQRHTFLGGAAAQELALATGSERLQPGALVTEGARLTLKEFEDQVAQGKDPFFARTELTDDKPVPKTDPSGETVGAVAMDASGQIVVGTSTGGITGKWPGRIGDTPILGSGTYADNCRGGVSTTGHGETLMRYNLAQRILSAMEYQGLSAQAAADKECREMTKRLGGTGGAIVVGHSGDLGISFTSRRMAWGYVQDGTIFYGIEGQVVHQEPFTLST

SEQ ID NO: 36325 - DNA, 936 bp, Xanthomonas campestris pv. campestris str. ATCC 33913
  CDS (1)..(936): transl_table=11
atgctggtgatccacggcggcgccggtgtggagaaatccagcctgtcgccggaggaacaagcgcaggcacgcgaggcgatgcagcgcgcgctgcgtgctggccatgcggtgttgacgcgcggcggtagcgcggtggatgcggtggccgccaccatcaccgtgctggaggatgcgccgcaattcaacgccgggcgcggtgcggtgttcacccacgatggcaagaacgaactcgatgccgccatcatggatggtgccagcggcaaggccggcgcgatcgctggcgtgcacacggtcaagaacccgatcctgttggcgcgcagtgtcatggaccgctccaagcatgtgatgctggtcggcgacggcgccgagcagttcgcgcgcgagcagggcatcgcgttggtcgatcccagctatttccgtaccgacaagcgttggcagcaactgcaaaaagcgctcaaggccgaggccggtgaccgccaggcccaagccgaactggatctggaaaccgccaagcacttcggtaccgtgggcgcgttggcgctggaccgcgacggccatctggccgccggtacctccaccggcggcatgaccaacaagcgctacggccgcgtgggcgacgcgccgatcatcggcgccggtacctatgccaacacccagtgcgcggtgtccggcaccggctggggcgagttctatatacgtgcggtggccgcctacgacatctgcgcgcgtatgaaatatgccgggcaatcgctgcaacaggcggccgaggcagtcatcgatcagcagattcccaaggccggcggcgacggtggcgcaattgcgctggatgcgcagggcaatgccgcatttccgttcaataccgagggcatgtaccgcggctggatcggtgccgatggcactgcgcatgtggcgatcttcaaggacgaggcgctgtaa

SEQ ID NO: 36326 - protein, 311 aa, Xanthomonas campestris pv. campestris str. ATCC 33913
MLVIHGGAGVEKSSLSPEEQAQAREAMQRALRAGHAVLTRGGSAVDAVAATITVLEDAPQFNAGRGAVFTHDGKNELDAAIMDGASGKAGAIAGVHTVKNPILLARSVMDRSKHVMLVGDGAEQFAREQGIALVDPSYFRTDKRWQQLQKALKAEAGDRQAQAELDLETAKHFGTVGALALDRDGHLAAGTSTGGMTNKRYGRVGDAPIIGAGTYANTQCAVSGTGWGEFYIRAVAAYDICARMKYAGQSLQQAAEAVIDQQIPKAGGDGGAIALDAQGNAAFPFNTEGMYRGWIGADGTAHVAIFKDEAL

SEQ ID NO: 36327 - DNA, 936 bp, Xanthomonas axonopodis pv. citri str. 306
  CDS (1)..(936): transl_table=11
atgctggtcatccatggtggcgcgggcgtggagaaatccagcctttctaaggacgagcaggcgcaggcgcgcgaggcgatgcaacgcgcactgcgtgccgggcacgcggtgctgcaacgtggcggcagtgcagtggatgcagtggccgccaccatcaccgtgctggaggatgcgccgcagttcaacgctggccgcggtgcggtgtttacccatgacggcaggaacgaactggacgcggccatcatggatggcgccagcggcaaggccggtgcgattaccggcgtgcacacggtcaagaacccgatcctgctggcacgcagcgtgatggaccgctccaagcacgtgatgctggtcggcgacggcgctgaagcgttcgcgcgcgagcagggcatcaccctggtagacccggcctatttccgcaccgacaagcgctggcagcaactgcagaaagcgctcaaggccgaggccggcgaccgccaggcgcaggccgagctggatctggagaccgccaagcatttcggcaccgtcggcgcgctggcgctggaccgcgacggccatctggctgccggtacctccaccggcggcatgaccaacaagcgctatggccgggtcggcgatgcacccatcatcggggccggcacctatgccaacagccaatgcgcggtgtccggcaccggctggggcgagttctacatccgcgccgtggctgcctacgacatctgtgcgcgcatgaaatacgccgggcaatcgctgcagcaggccgccgagaccgtgatcgaccagcagatcccgaaggccggcggggacggcggcgccatcgcgctggatgcacagggcaacctggcgtttccattcaataccgagggcatgtaccgcggctggatcggcgccgacggcaccgcgcatgtggcgattttcaaggacgagacgttgtaa

SEQ ID NO: 36328 - protein, 311 aa, Xanthomonas axonopodis pv. citri str. 306
MLVIHGGAGVEKSSLSKDEQAQAREAMQRALRAGHAVLQRGGSAVDAVAATITVLEDAPQFNAGRGAVFTHDGRNELDAAIMDGASGKAGAITGVHTVKNPILLARSVMDRSKHVMLVGDGAEAFAREQGITLVDPAYFRTDKRWQQLQKALKAEAGDRQAQAELDLETAKHFGTVGALALDRDGHLAAGTSTGGMTNKRYGRVGDAPIIGAGTYANSQCAVSGTGWGEFYIRAVAAYDICARMKYAGQSLQQAAETVIDQQIPKAGGDGGAIALDAQGNLAFPFNTEGMYRGWIGADGTAHVAIFKDETL

SEQ ID NO: 36329 - DNA, 927 bp, Thermosynechococcus elongatus BP-1
  CDS (1)..(927): transl_table=11
atgccccaacccactgttattctccatggcggcgctggcagttcactccaagacaaaggtggtctcattcctgtccgccaatccctccatggcattgttacccaagtggttcaggccctcaaagaaggggcaacggcgattgaggcagtggttttggggtgtcggctcctagaggatgaaccgcgctttaatgccggcacaggctcggtgctgcagtccgatgggcagattcgcatgagcgcctctctaatggatgggcagcggcagtgctttagtggtgtcatcaacgtctcgcgggtaaaaaatcccattgatctggcccactggctacaacagtgccccgatcgcgttctgtcggatgtgggggcagcagagttggcccgtgaattgcagctgcctgtgtatcaacccctaacggatcagcgactctacgagtggctcgaggaacgcaagggcaatttctcaaaatcaatggcgagggtggtggccgaaggggcaagacggggcacggttggtgtggtggttttagatcagcagggacacttggctgtggggacttccactggcggcaaaggttttgagcgtattgggcgggtgagtgactctgcaaccccagcgggaaactatgccaacagcttagcagcggtcagttgtacaggcattggtgaagacattctcgatgaggcgctggccgcgcggattgtggtgcgagtaaccgatggcctgtccctagaggcggcctttgaaaaatccttccgggaagctgcccgtcggcaacgggattttggcgccattggcttggatcgtcagggggcgatcgcctggggtaagacctgtgatgttctccttgcggcctactggaatggcacggccattggcgataccttggagttaccaccggggctacaggtgggcagtcaaaaataa

SEQ ID NO: 36330 - protein, 308 aa, Thermosynechococcus elongatus BP-1
MPQPTVILHGGAGSSLQDKGGLIPVRQSLHGIVTQVVQALKEGATAIEAVVLGCRLLEDEPRFNAGTGSVLQSDGQIRMSASLMDGQRQCFSGVINVSRVKNPIDLAHWLQQCPDRVLSDVGAAELARELQLPVYQPLTDQRLYEWLEERKGNFSKSMARVVAEGARRGTVGVVVLDQQGHLAVGTSTGGKGFERIGRVSDSATPAGNYANSLAAVSCTGIGEDILDEALAARIVVRVTDGLSLEAAFEKSFREAARRQRDFGAIGLDRQGAIAWGKTCDVLLAAYWNGTAIGDTLELPPGLQVGSQK

SEQ ID NO: 36331 - DNA, 933 bp, Bifidobacterium longum NCC2705
  CDS (1)..(933): transl_table=11
atgaccacatcctccgtttcgccggtgaccactgaactggcgggcagcgaaaccggcatcacgcttatcattcacgccggagcgggcagtcgtggcaagcacagcacgcctgaacgcatcgcccaggtcgaacttgatctgcagcgcgccctcgatgccggataccagttgttggaatccggagcaccggcgcatgaggctgtggtcgccgccatccacgtcatggaagacgctcccgaattcaacgccggccgtggtgccgccctgaccagcgatggcatcgcccagatggacgcctgcctgatgaccggcgatggcgaggtcggtgcggtcaccggcgtaagcaccgtgaagaacccgatcgatgcggcgcgtgccgtcaaagagcagaccaagcatgtgctgttcgcggacccgaccgatgcagaaatcgccgattggggcgtcgcgaccgaaagcaacgagtacttcatcaccgaacagcgtcgtcagtccttggccgaggctcagtccggtggcgatgagtgggagaagcatggcaccatcggcgccgtggcgcgcgatgccgaaggcaatatcgccgccggcacgtccactggcggcatcaccaaccagatgcacggtcgtgtaggcgattcgccgctgcccggttgcggcacgttcgccaaccagtccacggtggcggtgtcctgcaccggcatcggcgaggcattcatcaaggtggtcgccgcccatcaggtgtcggatcgtgtgcgtttcgccggcgagaacgtcgaagatgccgcgacggccactttggacgaagtcgccgcgcatcatggcgatggtggcatgatcgttctgccggcggtcggccgtggcgtggtcgcctacaacagcgagatgatgaacttcggataccgtagcgcgcaaggcggtaaggtgcagggctga

SEQ ID NO: 36332 - protein, 310 aa, Bifidobacterium longum NCC2705
MTTSSVSPVTTELAGSETGITLIIHAGAGSRGKHSTPERIAQVELDLQRALDAGYQLLESGAPAHEAVVAAIHVMEDAPEFNAGRGAALTSDGIAQMDACLMTGDGEVGAVTGVSTVKNPIDAARAVKEQTKHVLFADPTDAEIADWGVATESNEYFITEQRRQSLAEAQSGGDEWEKHGTIGAVARDAEGNIAAGTSTGGITNQMHGRVGDSPLPGCGTFANQSTVAVSCTGIGEAFIKVVAAHQVSDRVRFAGENVEDAATATLDEVAAHHGDGGMIVLPAVGRGVVAYNSEMMNFGYRSAQGGKVQG

SEQ ID NO: 36333 - DNA, 966 bp, Shigella flexneri 2a str. 301
  CDS (1)..(966): transl_table=11
atgggcaaagcagtcattgcaattcatggtggcgcaggtgcaattagccgcgcgcagatgagtctgcaacaggaattacgctacatcgaggcgttgtctgccattgttgaaaccgggcagaaaatgctggaagccggcgaaagtgcgctggatgtggtgacggaagcggtgcgtctgctggaagagtgtccactgtttaacgccggaattggcgctgtctttacgcgtgatgaaacccatgaactggacgcctgtgtgatggatggtaacaccctgaaagccggtgcggtggcgggcgttagtcatctgcgtaatccggttcttgccgcccggctggtgatggagcaaagcccgcatgtgatgatgattggcgaaggggcagaaaattttgcgtttgctcatggcatggagcgcgtctcaccggagattttctccacgcctttgcgttatgaacaactactggcagcgcgcgaggaaggggcaacagtcctcgaccatagcggtgcgccactggatgaaaaacagaaaatgggcaccgtgggggccgtggcgttggatttagacggcaatctggcggcagccacgtccacaggcggaatgaccaataaattacccggacgagttggcgatagtcccttagtgggtgccggatgctacgccaataacgccagtgtggcggtttcttgtaccggcacaggcgaagtcttcatccgcgcgctggcggcatatgacatcgccgcgttaatggattacggcggattaagtctcgcggaagcctgcgagcgggtagtaatggaaaaactccctgcgcttggcggtagcggtggcttaatcgctatcgaccatgaagggaatgtcgcgctaccgtttaacaccgaaggaatgtatcgcgcctggggctacgcaggcgatacgccaaccaccggtatctaccgtgaaaaaggggacaccgttgccacacagtga

SEQ ID NO: 36334 - protein, 321 aa, Shigella flexneri 2a str. 301
MGKAVIAIHGGAGAISRAQMSLQQELRYIEALSAIVETGQKMLEAGESALDVVTEAVRLLEECPLFNAGIGAVFTRDETHELDACVMDGNTLKAGAVAGVSHLRNPVLAARLVMEQSPHVMMIGEGAENFAFAHGMERVSPEIFSTPLRYEQLLAAREEGATVLDHSGAPLDEKQKMGTVGAVALDLDGNLAAATSTGGMTNKLPGRVGDSPLVGAGCYANNASVAVSCTGTGEVFIRALAAYDIAALMDYGGLSLAEACERVVMEKLPALGGSGGLIAIDHEGNVALPFNTEGMYRAWGYAGDTPTTGIYREKGDTVATQ

SEQ ID NO: 36335 - DNA, 981 bp, Shewanella oneidensis MR-1
  CDS (1)..(981): transl_table=11
atgtcacaaaatacccacgctaatgaaaaaccttttgcgattgcgatccacggtggggcgggcacgatttctaaagcgaatctcacgcctgagctgcgccaagcctataaagacaaactaaaagaagccgttgataaaggctcaaaggtactcgaacagggaggcgatagtttagttgctgtgcaaactgccattaatgtattggaaaatagcccattgtttaatgcaggcgtggggtcggtttatacctatgatggcggccatgaactggatgcttcaatcatggatggtaaaaccatgaacgcgggtgctgttgcgggtgtgcgccatatcgctaaccctatcgatttagccttagccgtgatgaataagtccgagcatgtgatgttatcgggcgcgggcgcagaagagtttgcgctgacccaagggtttaccttagtggcaaacagtcattttgatagcgatgcccgttatcagcagttactcgacgcgagacaaaaactgcaggctgctcaaaagtctgagcaaattgcgggcattgagatgaacgatcttgattataaatttggtaccgttggcgcagttgctttagataaaaacggtaacttagcggcgggaacctccacaggtgggatgacggctaagcgctttggccgaatcggggattcacccgtgattggggcgggaacctacgctgagaacggtgtttgcgccgtctctgctacgggccacggcgagttctttattcgttaccaagtggctggcgatatttgcgctagggtgaaataccaacaaaaatctattcttcaggcagcggatgaggtgattaatcagcgtcttatcactgctggtggttcaggcggagtgattgcggttgaccatcgaggaaatattgcaacgccgtttaataccgaagggatgtaccgcgcaagccgcagcaatggtgaacctgctcaggtgatgatttggcaggatcaataa

SEQ ID NO: 36336 - protein, 326 aa, Shewanella oneidensis MR-1
MSQNTHANEKPFAIAIHGGAGTISKANLTPELRQAYKDKLKEAVDKGSKVLEQGGDSLVAVQTAINVLENSPLFNAGVGSVYTYDGGHELDASIMDGKTMNAGAVAGVRHIANPIDLALAVMNKSEHVMLSGAGAEEFALTQGFTLVANSHFDSDARYQQLLDARQKLQAAQKSEQIAGIEMNDLDYKFGTVGAVALDKNGNLAAGTSTGGMTAKRFGRIGDSPVIGAGTYAENGVCAVSATGHGEFFIRYQVAGDICARVKYQQKSILQAADEVINQRLITAGGSGGVIAVDHRGNIATPFNTEGMYRASRSNGEPAQVMIWQDQ

SEQ ID NO: 36337 - DNA, 966 bp, Escherichia coli CFT073
  CDS (1)..(966): transl_table=11
atgggcaaagcagtcattgcaattcatggtggcgcaggtgcaattagccgcgcgcagatgagtctgcaacaggaattacgctacatcgaggcgttgtctgccattgttgaaaccgggcagaaaatgctggtagcgggcgaaagtgcgctggatgtggtgacggaagcggtgcgtctgctggaagagtgtccactgtttaacgccggaattggcgctgtctttacgcgtgatgaaacccatgaactggacgcctgtgtgatggatggtaacaccctgaaagccggtgcggtggcgggcgttagtcatctgcgtaatccggttcttgccgcccgactggtgatggagcaaagcccgcatgtgatgatgattggcgaaggggcagaaaattttgcgtttgctcatggcatggagtgcgtctcgccggagattttctccacacctttgcgttatgaacaactaatggcagcgcgcgaggaaggggcaacagtcctcgaccatagcggtgcgccactggatgaaaaacaaaaaatgggcaccgtaggggccgtggcgttggatttagacggcaatctggcggcagccacgtccacgggcggaatgaccaataaattacccggacgagttggcgatagtcccttagtgggggccggatgctatgccaataacgccagtgtggcggtttcctgtaccggtacgggcgaagtcttcatccgcgcgctggcggcatatgatatcgccgcgttaatggattacggcggattaagtctcgcggaagcctgcgagcgggtagtaatggaaaaactccctgcgcttggcggtagcggtggcttaatcgctatcgaccatgaagggaatgtcgcgctaccgtttaacaccgaaggaatgtatcgcgcctggggctacgcaggcgatacgccaaccaccggtatctaccgtgaaaaaggggacaccgttgccacacagtga

SEQ ID NO: 36338 - protein, 321 aa, Escherichia coli CFT073
MGKAVIAIHGGAGAISRAQMSLQQELRYIEALSAIVETGQKMLVAGESALDVVTEAVRLLEECPLFNAGIGAVFTRDETHELDACVMDGNTLKAGAVAGVSHLRNPVLAARLVMEQSPHVMMIGEGAENFAFAHGMECVSPEIFSTPLRYEQLMAAREEGATVLDHSGAPLDEKQKMGTVGAVALDLDGNLAAATSTGGMTNKLPGRVGDSPLVGAGCYANNASVAVSCTGTGEVFIRALAAYDIAALMDYGGLSLAEACERVVMEKLPALGGSGGLIAIDHEGNVALPFNTEGMYRAWGYAGDTPTTGIYREKGDTVATQ

SEQ ID NO: 36339 - DNA, 957 bp, Vibrio vulnificus CMCP6
  CDS (1)..(957): transl_table=11
atgagtagagccacgatgaacaagcctttttccattgccattcacggtggtgccggcaccattttacgcagccagatgagcgatgagctcaaagaggccattttgtccgatttacaacacgcggtcagagcggggtatcaattacttgagcaaggagccgatgcattggatgcggtggtggctgcggccaaagtgttggaagactcgccgaatttcaatgcaggaaaaggttcggtgctgactcacaatgaaatggtggagatggatgcctctgtgatgcatggacgagagctcaaagcgggggccgttgctggggttcgccatatcaaaaaccccatagagctggcgcgtgatgtgatgcaaaacagtgctcatgtcctactcattggggaaggggcggagaaatttgcttttgagcaaggccagcagtacaccgaacaggattatttctttactgaccgacgctatgagcaactgctctcgatgcgtgaaaaaggcttgtttgcgttgtcggaagccaaatatcccgatgataaaaaacatggcacggtgggtgcggtggcgctggatcagcaaggcaatcttgcggccgctaccagtacgggcggtgtcaccaataaaaaatatggccgcgttggcgattctgcgctgattggctgtggcaccgtggcaaaaaatggcgtggtggcggtgtcgacgactggcgtgggcgagttctttattcgtaagcgtgtggccgaagatgttgcggcgcggatgcgctatctcaacgaagatgtgcatacggcgtgtgagcagattattcacggagagctgaagagcatgggtggcgaaggcggtttaattgcggttgatgcgcagggggacattcactttgccatgaacagttccggtatgtatcgagcggccatcaatacccaaggcgagctttgcgtgaaaatctacgctgacgaataa

SEQ ID NO: 36340 - protein, 318 aa, Vibrio vulnificus CMCP6
MSRATMNKPFSIAIHGGAGTILRSQMSDELKEAILSDLQHAVRAGYQLLEQGADALDAVVAAAKVLEDSPNFNAGKGSVLTHNEMVEMDASVMHGRELKAGAVAGVRHIKNPIELARDVMQNSAHVLLIGEGAEKFAFEQGQQYTEQDYFFTDRRYEQLLSMREKGLFALSEAKYPDDKKHGTVGAVALDQQGNLAAATSTGGVTNKKYGRVGDSALIGCGTVAKNGVVAVSTTGVGEFFIRKRVAEDVAARMRYLNEDVHTACEQIIHGELKSMGGEGGLIAVDAQGDIHFAMNSSGMYRAAINTQGELCVKIYADE

SEQ ID NO: 36341 - DNA, 942 bp, Vibrio parahaemolyticus RIMD 2210633
  CDS (1)..(942): transl_table=11
atgacgaaaccgttctcaattgccattcacggcggagcaggcaccattttgcgtgaacaaatgagtgatgaacttcagcaatccatcttggcagacttagaagctgcggtaaaagcaggacaccaaatactcgaacaaggcggagaagcgcttgatgcggtggtcgctgcggtaaaagtactggaagactctcccaactttaatgcgggtaaaggctcggttcttactcacaacgaaatggtagaaatggatgcctctgtgatggatggtcgcaaccttgccgcaggtgctgtcgcgggcgttagacacattaaaaacccgatcgagctggctcgggatgtgatgcttcgcagcaaccatgtgttgttggttggtgaaggtgctgagaagtttgcttttgaacaaggccatcaatacaccgaacaagattacttcttcacagatcgccgttatgaacagctgctctcaatgcgtgagaaaggtttgtttgcgttatctgagtctcgttacccggatgatcgtaaacacggcaccgtaggcgcagtggcgttagaccagcaaggcaacttagctgcggcgaccagtacgggtggggtaaccaataagcaatatggtcgtgttggagattctgcactgataggttgtggcacggtggctgagaatggcgtggtggcagtttcaactacgggtgttggtgagttctttattcgtaaacgtgttgcggaagatgtagcagcacgcatgcgctatttgcaagaggacgtacataccgcgtgtgaagccattattcagggagatctcaaaaccatgggcggagaaggtggcctgattgccattgatgcgaatggggagttgcatttcgctatgaacagtacggggatgtatcgtgcgggtatcaatactcgcggtgagttgagtgtgaaaatctacgctaacgactaa

SEQ ID NO: 36342 - protein, 313 aa, Vibrio parahaemolyticus RIMD 2210633
MTKPFSIAIHGGAGTILREQMSDELQQSILADLEAAVKAGHQILEQGGEALDAVVAAVKVLEDSPNFNAGKGSVLTHNEMVEMDASVMDGRNLAAGAVAGVRHIKNPIELARDVMLRSNHVLLVGEGAEKFAFEQGHQYTEQDYFFTDRRYEQLLSMREKGLFALSESRYPDDRKHGTVGAVALDQQGNLAAATSTGGVTNKQYGRVGDSALIGCGTVAENGVVAVSTTGVGEFFIRKRVAEDVAARMRYLQEDVHTACEAIIQGDLKTMGGEGGLIAIDANGELHFAMNSTGMYRAGINTRGELSVKIYAND

SEQ ID NO: 36343 - DNA, 942 bp, Salmonella enterica subsp. enterica serovar Typhi Ty2
  CDS (1)..(942): transl_table=11
atgaataaagcagtgattgcgattcacggcggcgcaggcgcgattgctcgcgcgcaaatgagccatgagcaggagctacgctatatccaggcgctgtcagagattgtcgaaagcgggcaaaagatgctggaagcgggtgacagcgcgcttgatgtagtgacggaagcggtgcgcctgctggaagcgtgtccgctcttcaatgcgggtatcggcgcggtctatacccgagacggaactcatgaactggatgcctgcgtgatggacggcaataccctgaaagccggagccgtcgcgggcgtgagtcatgttcgccatcctgtgctcgccgccagactggtgatggagcgcagcccgcatgtactcatggtgggggaaggggcggaaaactttgccttttcacaggggatggcgcgcgtttcgccggatatcttttccaccccggcgcgttacgagcaattgctggcggcgcgtgcggcgggcgaaatggcgctcgatcacagcggcgcgccgctggacgaaacgaaaaaaatgggtacagtcggcgcggtggcgcgggataaattcggcaatctggcggcggcaacgtctaccggcgggatgaccaataaattgcccgggcgcgtcggcgacagcccgctggtcggcgccgggtgttatgccaacaacgccagcgtcgccgtttcctgtaccggaacgggagaggtctttattcgcacgctcgcggcttacgatatcgccgcattgatggaatatggcggactcagccttgccgacgcctgtgagcgcgtggtgatggaaaaattaccggcgctgggcggcagcggtggattaatcgccgttgatcacgaaggtaatgtcgcgttgccgtttaacagcgaagggatgtatcgcgcctggggatatgccggggatacgcctaccacaggaatttaccgggaataa

SEQ ID NO: 36344 - protein, 313 aa, Salmonella enterica subsp. enterica serovar Typhi Ty2
MNKAVIAIHGGAGAIARAQMSHEQELRYIQALSEIVESGQKMLEAGDSALDVVTEAVRLLEACPLFNAGIGAVYTRDGTHELDACVMDGNTLKAGAVAGVSHVRHPVLAARLVMERSPHVLMVGEGAENFAFSQGMARVSPDIFSTPARYEQLLAARAAGEMALDHSGAPLDETKKMGTVGAVARDKFGNLAAATSTGGMTNKLPGRVGDSPLVGAGCYANNASVAVSCTGTGEVFIRTLAAYDIAALMEYGGLSLADACERVVMEKLPALGGSGGLIAVDHEGNVALPFNSEGMYRAWGYAGDTPTTGIYRE

SEQ ID NO: 36345 - DNA, 1416 bp, Rhodopirellula baltica SH 1
  CDS (1)..(1416): transl_table=11
atgaattttaagacaacgatccttgctgcggccgttgcgtttgcgtttgtcgccccccgaacaatccaaagtaaagagcctgccatgaagaccaaatgggccattgtgattcatggtggagccggcagctcaccggctcaacttggcgacgcatcgagtaagcaacgcaccaaaggtctgcaacacgcgttgcaaaccggtcgcgatatgctggcggacggcgcgacggccatggacacggttgaagccgtgattcgaaccttggaagacgatccaatcttcaacgctggacgaggttcagttgtgacgaacgagggacgcgtcgagatggattcatcggtgatggatggcaagacactcgcgtgtggcgcagttgctggggtgacacgggtcaagaacccgatctcactcgcacgccgggtgatgacagagacgaaacacgtgctgctggttggtcccggtgccgacgagttcgcggaaactcagcaagtgcctctcgtcgatccgaaatactttctgtcccaacgcgatggcgatgacgcatccagcattgcttcggcaactcaggatgaagacgaatcgcatcttggaaccgtcggctgcgtcgtgctggattcccacggcaacctcgcggctggaaccagcaccggaggcacagcaaacaaactgccaggtcgagtcggtgattcacccatcgttggggcgggcacctacgcggccaatggattgtgcgccgtttcaggaaccggcgttggcgaagagtacatccgcaacagtgtcgcgtatgacatcgccgcgcaaatgcggtacgcgaatcagtcgctcgagtcagcagtcaccgacatcatgctgaatcgactcgatccgggtgttggcggattgattgctgtctctcagcaaggcgagatcgtgatgcagcacaacacccctggcatgagctgcgcagcagccgacagcaccggacgtttcgaaacgcacttgattctcgacaacggtggagcaccggcggaagcgacaaccaaatcaaacccatccgcatccgacgaatcaaagatcagggaactgattcagcaacaggccagcgattggaatgcgggcaacattgacgctttcatgaaggtctattggaagagcgatcaactcacgttctcctccggtggtgacgtgacacgcggattcgacgcgacattgcagcgatacaaagaacgctaccccacttcggaaaagatgggaaagctcactttcacagacctggaattccttccgctgggtaactccgccatgcaagtcctcggcgtttggaaacttgatcgaatggagccgatggagggcaagttcacgctcgttttccgacgcttccccgaaggttggaagatcgtccacgaccacacctcaaagtcccccgactcgcaatag

SEQ ID NO: 36346 - protein, 471 aa, Rhodopirellula baltica SH 1
MNFKTTILAAAVAFAFVAPRTIQSKEPAMKTKWAIVIHGGAGSSPAQLGDASSKQRTKGLQHALQTGRDMLADGATAMDTVEAVIRTLEDDPIFNAGRGSVVTNEGRVEMDSSVMDGKTLACGAVAGVTRVKNPISLARRVMTETKHVLLVGPGADEFAETQQVPLVDPKYFLSQRDGDDASSIASATQDEDESHLGTVGCVVLDSHGNLAAGTSTGGTANKLPGRVGDSPIVGAGTYAANGLCAVSGTGVGEEYIRNSVAYDIAAQMRYANQSLESAVTDIMLNRLDPGVGGLIAVSQQGEIVMQHNTPGMSCAAADSTGRFETHLILDNGGAPAEATTKSNPSASDESKIRELIQQQASDWNAGNIDAFMKVYWKSDQLTFSSGGDVTRGFDATLQRYKERYPTSEKMGKLTFTDLEFLPLGNSAMQVLGVWKLDRMEPMEGKFTLVFRRFPEGWKIVHDHTSKSPDSQ

SEQ ID NO: 36347 - DNA, 981 bp, Bordetella pertussis Tohama I
  CDS (1)..(981): transl_table=11
atgacgcagcccatcatcgccattcatggcggggccggcgcgatatcgcgcgcggccatgccggccgacaaggaaaaggaatacctggacgccctggcgcgcatcgtcgccgccggccaggcggtgctggccggcggcggcagcgccatcgacgcggtcaccgaggccgtgcgcctgctggaggattgcccgctgttcaacgccggccacggcgcggtgttcacgagcgccggtacccatgagctggacgcggccatcatggacggggccacgctgcgttcgggagccattgctaatgtggattgcgtgcgcaaccccgtgcgggccgcgcgcgcggtcatggagcacagcaagcatgtgttcttcgtcggcgagggggcggtcgccctcgcgcgcgagcacgggctggagctggtcgatcccggctatttctccaccgaggcgcggcgcgagcaactgttgcgggtgcagcgcgaaacgcccggggcggccgtgctggaccacgacggccaggccctggtgacgcaaggccagccggcccccgccgacccgctggatgccgacaggaaattcggcacggtgggcgcggtggcgctggacgcgcagggcaacctggccgcggcgacctccaccggcggcatcaccaacaagcaggtcgggcgcgtgggcgacgcgccgctgatcggcgcgggcacgtatgccagcaaccggacctgtgccgtttccaccacgggaaccggagaaatgttcatccgcatggtcgccgcgtacgacgtggcggcccagatggagtattgcggcgccacgctggcgcaggcggccgaccgggtggtgcacgacaagctgcccaccatcgaaggcaagggcggcctggtcgccgtcgacgcccatggcaacgtggccctgccgttcaataccgagggcatgtaccgcggccatggccgcgtgggcgagccgccggtggtcgccatttaccgatag

SEQ ID NO: 36348 - protein, 326 aa, Bordetella pertussis Tohama I
MTQPIIAIHGGAGAISRAAMPADKEKEYLDALARIVAAGQAVLAGGGSAIDAVTEAVRLLEDCPLFNAGHGAVFTSAGTHELDAAIMDGATLRSGAIANVDCVRNPVRAARAVMEHSKHVFFVGEGAVALAREHGLELVDPGYFSTEARREQLLRVQRETPGAAVLDHDGQALVTQGQPAPADPLDADRKFGTVGAVALDAQGNLAAATSTGGITNKQVGRVGDAPLIGAGTYASNRTCAVSTTGTGEMFIRMVAAYDVAAQMEYCGATLAQAADRVVHDKLPTIEGKGGLVAVDAHGNVALPFNTEGMYRGHGRVGEPPVVAIYR

SEQ ID NO: 36349 - DNA, 981 bp, Bordetella parapertussis 12822
  CDS (1)..(981): transl_table=11
atgacgcagcccatcatcgccattcatggcggggccggcgcgatatcgcgcgcggccatgccggccgacaaggaaaaggaatacctggacgccctggcgcgcatcgtcgccgccggccaggcggtgctggccggcggcggcagcgccatcgacgcggtcaccgaggccgtgcgcctgctggaagactgcccgctgttcaacgccggccacggcgcggtgttcacgagcgccggtacccatgagctggacgcggccatcatggacggggccacgctgcgttcgggagccattgccaatgtggattgcgtgcgcaaccccgtgcgggccgcgcgcgcggtcatggagcacagcaagcatgtgctcttcgtcggcgagggggcggtcgccttcgcgcgcgagcacgggctggagctggtcgatcccggctatttctccaccgaggcgcggcgcgagcaactgttgcgggtgcagcgcgaaacgcccggggcggctgtgctggaccacgacggccaggccctggtgacgcaaggccagccggcccccgccgacccgctggatgccgacaggaaattcggcacggtgggcgcggtggcgctggacgcgcagggcaacctggccgcggcgacctccaccggcggcatcaccaacaagcaggtcgggcgcgtgggcgacgcgccgctgatcggcgcgggcacgtatgccagcaaccggacctgtgccgtttccaccacgggaaccggagaaatgttcattcgcatggtcgctgcgtacgacgtggcggcccagatggagtattgcggcgccacgctggcgcaggcggccgaccgggtggtgcacgacaagctgcccaccatcgaaggcaagggcggcctggtcgccgtcgacgcccatggcaacgtggccctgccgttcaataccgagggcatgtaccgcggccatggccgcgtgggcgagccgccggtggtcgccatttaccgatag

SEQ ID NO: 36350 - protein, 326 aa, Bordetella parapertussis 12822
MTQPIIAIHGGAGAISRAAMPADKEKEYLDALARIVAAGQAVLAGGGSAIDAVTEAVRLLEDCPLFNAGHGAVFTSAGTHELDAAIMDGATLRSGAIANVDCVRNPVRAARAVMEHSKHVLFVGEGAVAFAREHGLELVDPGYFSTEARREQLLRVQRETPGAAVLDHDGQALVTQGQPAPADPLDADRKFGTVGAVALDAQGNLAAATSTGGITNKQVGRVGDAPLIGAGTYASNRTCAVSTTGTGEMFIRMVAAYDVAAQMEYCGATLAQAADRVVHDKLPTIEGKGGLVAVDAHGNVALPFNTEGMYRGHGRVGEPPVVAIYR

SEQ ID NO: 36351 - DNA, 981 bp, Bordetella bronchiseptica RB50
  CDS (1)..(981): transl_table=11
atgacgcagcccatcatcgccattcatggcggggccggcgcgatatcgcgcgcggccatgccggccgacaaggaaaaggaatacctggacgccctggcgcgcatcgtcgccgccggccaggcggtgctggccggcggcggcagcgccatcgacgcggtcaccgaggccgtgcgcctgctggaggactgcccgctgttcaacgccggccacggcgcggtgttcacgagcgccggtacccatgagctggacgcggccatcatggacggggccacgctgcgttcgggagccattgccaatgtggattgcgtgcgcaaccccgtgcgggccgcgcgcgcggtcatggagcacagcaagcatgtgttcttcgtcggcgagggggcggtcgccttcgcgcgcgagcacgggctggagctggtcgatcccggctatttctccaccgaggcgcggcgcgagcaactgttgcgggtgcagcgcgaaacgcccggggcggccgtgctggaccacgacggccaggccctggtgacgcaaggccagccggcccccgccgacccgctggatgccgacaggaaattcggcacggtgggcgcggtggcgctggacgcgcagggcaacctggccgcggcgacctccaccggcggcatcaccaacaagcaggtcgggcgcgtgggcgacgcgccgctgatcggcgcgggcacgtatgccagcaaccggacctgtgccgtttccaccacgggaaccggagaaatgttcatccgcatggtcgccgcgtacgacgtggcggcccagatggagtattgcggcgccacgctggcgcaggcggccgaccgggtggtgcacgccaagctgcccaccatcgaaggcaagggcggcctggtcgccgtcgacgcccatggcaacgtggccctgccgttcaataccgagggcatgtaccgcggccatggccgcgtgggcgagccgccggtggtcgccatttaccgataa

SEQ ID NO: 36352 - protein, 326 aa, Bordetella bronchiseptica RB50
MTQPIIAIHGGAGAISRAAMPADKEKEYLDALARIVAAGQAVLAGGGSAIDAVTEAVRLLEDCPLFNAGHGAVFTSAGTHELDAAIMDGATLRSGAIANVDCVRNPVRAARAVMEHSKHVFFVGEGAVAFAREHGLELVDPGYFSTEARREQLLRVQRETPGAAVLDHDGQALVTQGQPAPADPLDADRKFGTVGAVALDAQGNLAAATSTGGITNKQVGRVGDAPLIGAGTYASNRTCAVSTTGTGEMFIRMVAAYDVAAQMEYCGATLAQAADRVVHAKLPTIEGKGGLVAVDAHGNVALPFNTEGMYRGHGRVGEPPVVAIYR

SEQ ID NO: 36353 - DNA, 936 bp, Chromobacterium violaceum ATCC 12472
  CDS (1)..(936): transl_table=11
atgaccatcgccctcgccttgcacggcggcgccggcaccctgcgccgcagcgacatggacgccgaattggagcgcgcctaccgcgccggcctggaacaggcgctggaggccggccacgcggtgctgcgcggcggcggcgcggcgctggatgcggtgtgcgcggcggtctgcgcgctggaggacgatccactgttcaacgccggccgcggctcggtgttcaatctggacggcaaacaggaaatggaagcggcggtgatggacggcatccgccaggacgccggcagcgtagccggcctttccggcgtgcgcaacccggtgctgctggcgcgcgcggtgatggagcgcacaccccacgtgacgctggggtatgcggcggcggaagatttcgcccgccgggcaggattggaaatgcggccgccggaatacttccacaccgacaagcgctggcaggcgctgctggcggaaaaggagaggctggccaacggcggctcggacgaggacatctccgaagaccgcaagcacggcaccgtcggcgcggtggcgctggacgcgcaaggccggctggcggccgccacctccaccggcggccgcaccgccaagtggccaggccgcatcggcgacacgccggtgatcggcgccggcacctgggccgacgcctattgcgcggtgtcggccaccggccacggcgaatacttcgtccgcgccgccgccgggcacgagatctcggcccggatccgccacctggacgaaaccgtggcccaggcttgcgacgccgtggtctacggccagctgctgaccatgggcggcaccggcggcgtcgtcgccgtcgaccgctacggccgggtggcgttgccgttcaactgcgagggcatgtaccgcgcggcgatagacggcgcgggcttacgcaccgtcgccatctaccgcggcgaagactag

SEQ ID NO: 36354 - protein, 311 aa, Chromobacterium violaceum ATCC 12472
MTIALALHGGAGTLRRSDMDAELERAYRAGLEQALEAGHAVLRGGGAALDAVCAAVCALEDDPLFNAGRGSVFNLDGKQEMEAAVMDGIRQDAGSVAGLSGVRNPVLLARAVMERTPHVTLGYAAAEDFARRAGLEMRPPEYFHTDKRWQALLAEKERLANGGSDEDISEDRKHGTVGAVALDAQGRLAAATSTGGRTAKWPGRIGDTPVIGAGTWADAYCAVSATGHGEYFVRAAAGHEISARIRHLDETVAQACDAVVYGQLLTMGGTGGVVAVDRYGRVALPFNCEGMYRAAIDGAGLRTVAIYRGED

SEQ ID NO: 36355 - DNA, 864 bp, Gloeobacter violaceus PCC 7421
  CDS (1)..(864): transl_table=11
atgccacggccaggactgattattcatggtggacttggggcgaccgaggcggagcaatcgagccgacaggtgcgccgcgaggcgctgcaggagattctcaaagacgcccatgaggtgctcaaaaacggcggtgcccgccaggcggtggtgcgcgcctgtgaactcctcgaagattgcccgctctttaacgcgggtaccggcgccaccatccagcgcgacggccagattcgcctcagttgcgcgctgatggacggtcgggagcaccgcttcagcggcctggtcaacgcccgttacctcaaaaacccgattcgcctggccgagcagctgcaaaaccgcgtcgaccggcttctcgatccgcagggtgccgagctattggcccgcgccctcggagaagcggtgcacgaaccggccttaccggaggtgatccggcgctgggcggacgagcgcttcgaggggcagtacgcgggcacccacggcacggtgggggcggcggcggtggacggcgaaggcgggcttgccgccgctacttccacgggcggtcgcttcatggccggggtggggcgggtgagcgattcgtgcacaccggcgggcaactacgccaccgaccgctgcgcggtgagctgcaccggccacggcgaggacatcctcgacgaagcgctcgccgcgcgcatcgccatccgggtggacgacgggatgagccttcagcgagctttcgagcgctccttcgccgaggccgaatcgcgcgggcgcgactttgccgccatcgccgtcgacagcgacggccatacatgctggtcggtcaccatgggcatcctggtggcggcgtacttcgatggcaagggagagtttcgggcgacattctga

SEQ ID NO: 36356 - protein, 287 aa, Gloeobacter violaceus PCC 7421
MPRPGLIIHGGLGATEAEQSSRQVRREALQEILKDAHEVLKNGGARQAVVRACELLEDCPLFNAGTGATIQRDGQIRLSCALMDGREHRFSGLVNARYLKNPIRLAEQLQNRVDRLLDPQGAELLARALGEAVHEPALPEVIRRWADERFEGQYAGTHGTVGAAAVDGEGGLAAATSTGGRFMAGVGRVSDSCTPAGNYATDRCAVSCTGHGEDILDEALAARIAIRVDDGMSLQRAFERSFAEAESRGRDFAAIAVDSDGHTCWSVTMGILVAAYFDGKGEFRATF

SEQ ID NO: 36357 - DNA, 957 bp, Vibrio vulnificus YJ016
  CDS (1)..(957): transl_table=11
atgagtagagccacgatgaacaagcctttttccattgccattcacggtggtgccggcaccattttacgcagccagatgagcgatgagctcaaagaggccattttgtccgatttacaacacgcggtcagagcggggtatcaattacttgagcaaggagccgatgcattggatgcggtggtggctgcggtcaaagtgttagaagactcgccgaatttcaatgcaggaaaaggttcggtgctgactcacaatgaaatggtggagatggatgcctctgtgatgcacggacgagagctcaaagcgggggccgttgctggggttcgccatatcaaaaaccccatagaactggcgcgtgatgtgatgcaaaacagtgctcatgtcctgctcatcggggaaggggcggagaaatttgcttttgagcaaggtcaccagtacaccgaacaggattatttctttactgaccgacgctatgagcaactgctctcgatgcgtgaaaaaggcctgtttgcgttgtcggaagccaaatatcccgacgacaaaaaacatggcacggtgggtgcggtggcgctggatcagcaaggcaatcttgcggccgctaccagtacgggcggtgtcaccaataaaaaatatggccgcgttggcgattctgcgctgattggctgtggcaccgtggcggaaaatggcgtggtggcggtgtcgaccactggcgtgggcgagttctttattcgtaagcgtgtggccgaagatgttgcggcgcgaatgcgctatctcaacgaagatgtgcatacggcgtgtgagcagattattcacggagagctaaagagcatgggtggagaaggcggtttaattgcggttgatgcacagggagacattcactttgccatgaacagctccggtatgtatcgagcggccatcaatacccaaggcgagctttgcgtgaaaatctacgctgacgaataa

SEQ ID NO: 36358 - protein, 318 aa, Vibrio vulnificus YJ016
MSRATMNKPFSIAIHGGAGTILRSQMSDELKEAILSDLQHAVRAGYQLLEQGADALDAVVAAVKVLEDSPNFNAGKGSVLTHNEMVEMDASVMHGRELKAGAVAGVRHIKNPIELARDVMQNSAHVLLIGEGAEKFAFEQGHQYTEQDYFFTDRRYEQLLSMREKGLFALSEAKYPDDKKHGTVGAVALDQQGNLAAATSTGGVTNKKYGRVGDSALIGCGTVAENGVVAVSTTGVGEFFIRKRVAEDVAARMRYLNEDVHTACEQIIHGELKSMGGEGGLIAVDAQGDIHFAMNSSGMYRAAINTQGELCVKIYADE

SEQ ID NO: 36359 - DNA, 924 bp, Tribolium castaneum
  CDS (1)..(924)
atggagccgattgtcctcgtccacggtggtgcaggtgatattcccgattccagggtttccctcaaaatcacaggagtgaaaaaagccgcatctttgggttacaaagttttgaaaaatggcgggagcgttgtcgaggctgtggaagaagctgtcaagtcgatggaagatgacgaagcttttaatgccggatatgggtccgttttgaatctggacggcgacgtggaaatggacgcctccatcatgcttggttcaaacctcctctccgggggcgtaaccgtcgtcaaagacatcgcccaccccatttccctggcccgccttgtcatggaaaaaacgccccactttctcctcgccggagctggggccaaccgctttgccaaagaacaaggcgttccctccgtcccccccggcagtctagtttcaaaatacgcaaaagaagcgttggaacacttcatgaaatacggcgataacggcaccgaaatgagtggtgtgggagaggtggggacagttggggcggtggcaatcgattcgaaaggacgattggctgcggccacctccacgggcgggatcaccggcaaaatggcggggcgaagtagcgatacctgtatcattgggagtggcacttatgctgacgataacgtgggggctgtctcaacaactggacatggggaaagtatcgccagattttgtctcgcccatgccattatctacgaaatgaggaatgggtcaagtgccagtgaggccacggctaaggcattgaaggaaatgaaggggcggttgcccaacactgctggggctatcaccatttcgaagagtggggagttggggattgattttacgagtaggagaatggcgtgggcataccaggtcaaggacgagatgcattttggcatcgaacacgggcaacacaccaaagaaaaggtttaa

SEQ ID NO: 36360 - protein, 307 aa, Tribolium castaneum
MEPIVLVHGGAGDIPDSRVSLKITGVKKAASLGYKVLKNGGSVVEAVEEAVKSMEDDEAFNAGYGSVLNLDGDVEMDASIMLGSNLLSGGVTVVKDIAHPISLARLVMEKTPHFLLAGAGANRFAKEQGVPSVPPGSLVSKYAKEALEHFMKYGDNGTEMSGVGEVGTVGAVAIDSKGRLAAATSTGGITGKMAGRSSDTCIIGSGTYADDNVGAVSTTGHGESIARFCLAHAIIYEMRNGSSASEATAKALKEMKGRLPNTAGAITISKSGELGIDFTSRRMAWAYQVKDEMHFGIEHGQHTKEKV

SEQ ID NO: 36361 - DNA, 921 bp, Tribolium castaneum
  CDS (1)..(921)
atgtcgtccattgagcccgttgtccttgtccacgggggcgccgggaccatcagcagcgatgccaaggcggcccagctggtccaaggggtgaaaaaagcggctcaagccggctaccaaatcctcaaatcggggggtagtgtcctagatgccgtccaaaaaagcgtcgaattgatggaaaacgacgcgattttcaacgccggacttggctcggtcctcaacgtcgaaggcgaagtggaaatggacgctagtataatgctgggggctgatttaagcgcaggggccgtgactgtggtcaaagacatcaaaaaccccatagctttggctcgactcgtaatggagaagagcgaccacgtgctactggccagcgagggagcgaaaaaattcgctctaaagcacggtattacacctcttgcccccggttccctggttacggaagccaccagagaagcactagccaaatggaaggcgaaacaagtcgcagctttggccgagttgggcactgtgggggctgtggcgattgatagccaggggaggctcgcagctgccacctccacagggggacgcgaggggaagttggccgggaggtcgagcgatacttgtatgattgggagcgggacttatgcggatgatggggttggggcggtttccacaacggggcatgggaagaccatagctaagttttgcctagcacactctattatcaaggctatggaaggggggcaaggggctgaggccgctaccaaggggtgtattgagaaaatgaccaagaaattaaataatactgcgggggctatcaccctatcttgtcgtggggaagttggggttgggttcagtactaataggatgtcatgggcgtatcagaaaggggatgaggtgcattttggagtggatcagaaccaacacgatttcgaaaaaatataa

SEQ ID NO: 36362 - protein, 306 aa, Tribolium castaneum
MSSIEPVVLVHGGAGTISSDAKAAQLVQGVKKAAQAGYQILKSGGSVLDAVQKSVELMENDAIFNAGLGSVLNVEGEVEMDASIMLGADLSAGAVTVVKDIKNPIALARLVMEKSDHVLLASEGAKKFALKHGITPLAPGSLVTEATREALAKWKAKQVAALAELGTVGAVAIDSQGRLAAATSTGGREGKLAGRSSDTCMIGSGTYADDGVGAVSTTGHGKTIAKFCLAHSIIKAMEGGQGAEAATKGCIEKMTKKLNNTAGAITLSCRGEVGVGFSTNRMSWAYQKGDEVHFGVDQNQHDFEKI

SEQ ID NO: 36363 - DNA, 1005 bp, Burkholderia vietnamiensis G4
  CDS (1)..(1005): transl_table=11
atgacttcacgcgcgatcgtcgcgattcacggcggcgcaggcacgatcctgcgcgacgcgatggacagcgataccgaacgccgttaccgcgccgagctcgacgcgatcctgcaagccgcgcaacgcgtgctcgccagcggcggcagcgcgctcgacgcggtgaccgtcgcggtgcggatgctcgaagactgcccgttgttcaacgcggggcgcggcgccgtctatacggccgaaggcaagcacgaactcgacgccgccgtgatggacggcgcgacgctcgcggccggcgcgatctgctgcgcgacccgcgtgcgcaatccggtgctggccgcgcggcgcgtgatggaagcgagcgagcacgtgctgttcgccggcgcgggcgccgatgcattcgcggccgcgcaggggctcgaactcgtcgaacccggctacttcgacaccgaagcgcgtcatgcgcaatggctgcgggcgcgcgcggcggccggcgcgatgctcgaccacgacgcggcgaccttcgcgttcggcgccggccggccgccggagccgccgcagccacatgaaccgctcgaccccgaccgcaagcacggcacggtcggcgcggtcgcgtgcgacctgcacggccatgtcgcggcggcgacgtcgacgggcggcatcacgaacaagcagcccggccgcgtcggcgattcgccgatcatcggcgccggctgctacgcggacgatgcgacctgcgcggtgtccgcgaccggcaccggcgagatgttcatccggctcgcgaccgcgcacgacgtggccgcgcagatcgcgtatcgcagcgcgtcgctcgccgatgccgcgcacgacgtcgtgatgaacaagctgccgcgcctggccggccgcggcgggatcatcgccgtcgatgcgcacggcaacgtcgcgatgccgttcaacacggaaggcatgtatcgcggctacgcgcgtgtcggcgcggcgcccgtggtcggcatctaccgcgacgacgcggcgtga

SEQ ID NO: 36364 - protein, 334 aa, Burkholderia vietnamiensis G4
MTSRAIVAIHGGAGTILRDAMDSDTERRYRAELDAILQAAQRVLASGGSALDAVTVAVRMLEDCPLFNAGRGAVYTAEGKHELDAAVMDGATLAAGAICCATRVRNPVLAARRVMEASEHVLFAGAGADAFAAAQGLELVEPGYFDTEARHAQWLRARAAAGAMLDHDAATFAFGAGRPPEPPQPHEPLDPDRKHGTVGAVACDLHGHVAAATSTGGITNKQPGRVGDSPIIGAGCYADDATCAVSATGTGEMFIRLATAHDVAAQIAYRSASLADAAHDVVMNKLPRLAGRGGIIAVDAHGNVAMPFNTEGMYRGYARVGAAPVVGIYRDDAA

SEQ ID NO: 36365 - DNA, 948 bp, Desulfovibrio vulgaris subsp. vulgaris str. Hildenborough
  CDS (1)..(948): transl_table=11
atgacccgacccagaatcatcgtgcacggcggtgcatggaccatccccgccgaccgtcaggaagcccatatcgcaggatgccgtcgcgccgtcgaggctgcgtggcctttgctgcgcgacggcgcgacggcagtcgaggcggttcgtgccgccgtcaacgtgctggaggacgacccgaccttcgacgcagggcgaggggccgtactcaaccgcgatggtgtcatcgaactcgacgccgccatcatggacggtgccacgctggactttggcggtgtggcggcggtgcgtcgcttcgccaaccccgtggacatcgcccggcgcctgctggacaccgaattctgtcttctggtgggggaaggggccgagcgtttcgccctcgaacaggggttaaagcctgtcgacccggcaaccctgcttgtggaacgtgagcgccttctttacgagaccctgcgttcgcgcgcggggtacagcacccatgatgccttccggcccgtcacggacaccgcacccgccggtgatgttcccaaggggacggtgggtgccgtggcgctggacatccacggcaacgtcgccgccgccacctccaccggggggacgcccttcaagctggcggggcgtgtgggcgattcgccgctgtgcggtgcggggacctacgccgacaacgagacgggcggggcctctgccacgggcttcggagaaggcgtcatgcgtacgctcatgacgcactgcgcctgtgaacacctgcgcgaatgtctgcccgacgaggctgcgcggcgggccatcgacatgctgcacaggcgcgtgggcggacatgccggactcatcatgcttgaccgccacgggcgctacggggtgcattgcaacaccgaccatatcgcccatgcctacgcgcgggccgacggcaccgttcatgcgtcggtgacgcccgaccccgtcactggggagtag

SEQ ID NO: 36366 - protein, 315 aa, Desulfovibrio vulgaris subsp. vulgaris str. Hildenborough
MTRPRIIVHGGAWTIPADRQEAHIAGCRRAVEAAWPLLRDGATAVEAVRAAVNVLEDDPTFDAGRGAVLNRDGVIELDAAIMDGATLDFGGVAAVRRFANPVDIARRLLDTEFCLLVGEGAERFALEQGLKPVDPATLLVERERLLYETLRSRAGYSTHDAFRPVTDTAPAGDVPKGTVGAVALDIHGNVAAATSTGGTPFKLAGRVGDSPLCGAGTYADNETGGASATGFGEGVMRTLMTHCACEHLRECLPDEAARRAIDMLHRRVGGHAGLIMLDRHGRYGVHCNTDHIAHAYARADGTVHASVTPDPVTGE

SEQ ID NO: 36367 - DNA, 894 bp, Picrophilus torridus DSM 9790
  CDS (1)..(894): transl_table=11
atgctcggattttatcgatgccattgtaaagagaatgaaaagataattataaagactaaacatatctttaccatgaatgtgataatgctccatggtggtgcaggctcaacaggcgttgaacagaaattaatggaatacgcggttaaatcaaaatcaggcagtgctcttgattctgtatgcaatgccgttgtgcttatggaaaacgatccgtgctttaatgcaggaacgggctcatgcatgaggcttgacggctcaatacagatggacgctgctgtcatgacatcaaagggctttggttcagtcatggccatagaaaatgtgaagaatcctgtgcttgttgccagggcagttatggagagatcaccgcatcttataatggccggtgatggtgccgaaaagtttgcgcacctgcttggcttcgagaaatacgatccatcaacggaaagggcagcaaaaagaagggaaaatgacatatcaatgatcctaagcaggaaaattgattcatataataaaatgatggaaacagttgacatatcaaaatttgttgataccgtcggcgcggttgccagggtaaatggtgaatttgctgcagcagtttccactggcggtgcaccgccaatgctgaggggccgtgttggtgactcaccggttcctggtgccggcatattctgcggtgaaaacggtgccgtggttgcaaccggcgttggcgaggaaatcataaaaaacatgctgtgtatatcgatatacaacgaaattggaagggaaagcttaagcaaaatagtaatgaaaaatatatcaaggttcaggtaccatgctggtgtgatagccatatcaaatgaggagtactttgcatattccaatacagatatgagctatgctgcccttgaattctag

SEQ ID NO: 36368 - protein, 297 aa, Picrophilus torridus DSM 9790
MLGFYRCHCKENEKIIIKTKHIFTMNVIMLHGGAGSTGVEQKLMEYAVKSKSGSALDSVCNAVVLMENDPCFNAGTGSCMRLDGSIQMDAAVMTSKGFGSVMAIENVKNPVLVARAVMERSPHLIMAGDGAEKFAHLLGFEKYDPSTERAAKRRENDISMILSRKIDSYNKMMETVDISKFVDTVGAVARVNGEFAAAVSTGGAPPMLRGRVGDSPVPGAGIFCGENGAVVATGVGEEIIKNMLCISIYNEIGRESLSKIVMKNISRFRYHAGVIAISNEEYFAYSNTDMSYAALEF

SEQ ID NO: 36369 - DNA, 948 bp, Erwinia carotovora subsp. atroseptica SCRI1043
  CDS (1)..(948): transl_table=11
atgacgaaacccgtgattgtgatccacggtggcgcaggtgcgctgacccgctcggctatgagtgctgaaaaagagcaacgttatctggcagcgctgtccgagattgttgccagtggacaacgcattctggctgaaaatggcagcgcgctggatgccgtgacggaagccgtccgcctgctggaagagtgcccgttgttcaatgccggacacggttcggtgttcacccacgcggaaacccacgaactggatgccagcatcatggatggacggacgttagatgccggcgcggtcagttgcgtcagccacatccgtaacccgattctggcagcgcgtaccgtactcgaagccagcccgcatgtgatgtttaccgccgatggcgcagaagcgtttgcccagcagcacggactggaaagggttgagcctgcatttttctccaccgacgaacgccgccagcagttgcacaacgcacaggcgggctcaggccgtgtcatcctcgatcatgacggacagaccgaccctatcgatcccgaccgtaaattcggcaccgtcggcgcagtcgcactcgacagtgcgggtaacctcgcagcggcaacgtcgacgggcggcatgaccaacaagcaggccggacgcgtgggcgatagcccaatcatcggcgcaggctgttacgccaataaccagacggtcgcagtttcctgcaccggcacaggtgaagtctttatgcgcgccgtcgctgcctatgatgtctcggcactgatggaatacgccgggatgacgctacaacaggccagcgaccgcgtagtgatggaaaaattactacagatggatggcagcggcgggatgattgccgtcgacaaagaaggcaacatcgctcttccgttcaacagtgaagggatgtaccgcggctatggctacgtgggggaagaacccgtcgccgatatctatcgttaa

SEQ ID NO: 36370 - protein, 315 aa, Erwinia carotovora subsp. atroseptica SCRI1043
MTKPVIVIHGGAGALTRSAMSAEKEQRYLAALSEIVASGQRILAENGSALDAVTEAVRLLEECPLFNAGHGSVFTHAETHELDASIMDGRTLDAGAVSCVSHIRNPILAARTVLEASPHVMFTADGAEAFAQQHGLERVEPAFFSTDERRQQLHNAQAGSGRVILDHDGQTDPIDPDRKFGTVGAVALDSAGNLAAATSTGGMTNKQAGRVGDSPIIGAGCYANNQTVAVSCTGTGEVFMRAVAAYDVSALMEYAGMTLQQASDRVVMEKLLQMDGSGGMIAVDKEGNIALPFNSEGMYRGYGYVGEEPVADIYR

SEQ ID NO: 36371 - DNA, 966 bp, Propionibacterium acnes KPA171202
  CDS (1)..(966): transl_table=11
gtggataaacccttagtgacatcaccccgtgaccagccttacgatcctgttatgaccagtcacgtcgtcgatcagcccggccctaccctcgtcattcatggtggggccggaaacgtcccgtcacgtactggagaggaagccgagaagtttcgtcgctccttgcgtcaggcctttgcagccgggcagcgagccctcgacgtaagtgcttgtgacgccgtcatcgcagccgttacggcgatggaggacgatccactgttcaacgccgggcgaggtggggttctcaccgcaaacggaaccgtcgaaaccgacgccgccgtcatgactggagacggacacgccggggcggtgtgctgctcacgtcacgcccgcaacccgattcaactggcgcataaagttctgacggattcaccccatgtgctgctgtgtgacccgcccgaacgggtctgtcaagactggggtcttgagatcgcgccgccggagtacttcgtcacccaagcgcgccgcgaacagttagagcaggtgctagccagacgacagcacgccccgaaacacggcaccgtcggggcggttgcccgagatcgttatggacacctagctgcggccacctcaaccggtgggatcgtcgcttcgtcgcagggacgcatcggggactctccggtcatcggggccggcactttcgcgcgcgacggagtcgtggcagtctcctgcaccggcgatggtgaggccttcctccaaggggtagtagctcatgaggttgacgcgcagatgagactggcaggacaacccgtcgaccgggcagctctgggagccctcaccgacgaggtctcatcgcgcctcactggccacgccccagcaaccgatggcctcatcgccgtcgactcttgtgaacaattggtagtctgtcacgtgtcagcgtcgatgctggctgcatggccagaccacggcgaggttctcacctcggtgtag

SEQ ID NO: 36372 - protein, 321 aa, Propionibacterium acnes KPA171202
MDKPLVTSPRDQPYDPVMTSHVVDQPGPTLVIHGGAGNVPSRTGEEAEKFRRSLRQAFAAGQRALDVSACDAVIAAVTAMEDDPLFNAGRGGVLTANGTVETDAAVMTGDGHAGAVCCSRHARNPIQLAHKVLTDSPHVLLCDPPERVCQDWGLEIAPPEYFVTQARREQLEQVLARRQHAPKHGTVGAVARDRYGHLAAATSTGGIVASSQGRIGDSPVIGAGTFARDGVVAVSCTGDGEAFLQGVVAHEVDAQMRLAGQPVDRAALGALTDEVSSRLTGHAPATDGLIAVDSCEQLVVCHVSASMLAAWPDHGEVLTSV

SEQ ID NO: 36373 - DNA, 1071 bp, Burkholderia mallei ATCC 23344
  CDS (1)..(1071): transl_table=11
atgacttcacccgcaatcgttgcgattcacggcggcgcaggcacgatcctgcgcgaggcgatgacggccgacgccgaagcgcagtaccgtgcggagctcgccgcgatcctcgccgccgcgcagaaggtgctcgccgaaggcggcagcgcgcttgacgcggtcagcgtcgccgtgcgcatgctcgaggattgcccgcttttcaacgcggggcgcggcgccgtctacacggcggacggcacgcacgagctcgacgccgcgatcatggacggcgcgacgctcgcggcgggcgcgatctgctgcgcgacgcgcgtgcgcaacccggtgctcgccgcgcgccgcgtgctcgaagcgagcgagcatgtgatgttcgcgggcgcgggcgccgacgcgttcgcggctgcgcaggggctcgagctcgcgccgccgggctacttcgacaccgagccgcgccgcgcgcaatggctgaaggcgcgacgcgcggcgggcacgatgctcgatcacgacgcggcggcgttcgtgttcggccgggggggcggcgatggcggcggtaatggcggcggtaatggcggcggtaatggcggcggtaatggcggcggccccggcgcgcgcgccgcgtgcgcgcccgagccgctcgatccggaccgcaagcacggcacggtcggcgcggtcgcgcgcgatctgcacggccacctcgcggcggccacgtcgacgggcgggatcacgaacaagcagccggggcgcgtcggcgatacgccgatcatcggcgcgggctgctatgcgaacgacgcgacgtgcgcggtatcggcgacaggcacgggcgagatgttcatccgcctcgcgaccgcgtacgacgtgtccgcgcagatcgaataccgcggcgcgtcgcttgccggcgccgcgtacgacgtcgtgatgaacaagctgccgagcatcgccggccgcggcggcatcatcgcggtcgacgcgcgcggcaacctcgcgatgccgttcaacaccgaagggatgtaccgcggctacgcgcgcgtcggcgaggcgcccgtgaccgcgatctatcgcgaggacgcggcgtga

SEQ ID NO: 36374 - protein, 356 aa, Burkholderia mallei ATCC 23344
MTSPAIVAIHGGAGTILREAMTADAEAQYRAELAAILAAAQKVLAEGGSALDAVSVAVRMLEDCPLFNAGRGAVYTADGTHELDAAIMDGATLAAGAICCATRVRNPVLAARRVLEASEHVMFAGAGADAFAAAQGLELAPPGYFDTEPRRAQWLKARRAAGTMLDHDAAAFVFGRGGGDGGGNGGGNGGGNGGGNGGGPGARAACAPEPLDPDRKHGTVGAVARDLHGHLAAATSTGGITNKQPGRVGDTPIIGAGCYANDATCAVSATGTGEMFIRLATAYDVSAQIEYRGASLAGAAYDVVMNKLPSIAGRGGIIAVDARGNLAMPFNTEGMYRGYARVGEAPVTAIYREDAA

SEQ ID NO: 36375 - DNA, 1029 bp, Colwellia psychrerythraea 34H
  CDS (1)..(1029): transl_table=11
atgttaacttttttacttgtatcagcctttgctaatactgcattttctaatactgtcttagcaaaagacgttccttttgctatcgccattcatggtggtgcgggcaccattcaaaaagaccattttactcctgaaaaagaagcggcttatcgtgctaaattaaaagagtctgttgaagcaggttatacggttcttgagcaaggtggtactagccttgatgcggtagccactgcaataaatgttctcgaaaactcaccattttttaatgcgggtaaaggtgctgtttatacccatgatgaaactcatgaaatggacgcttcaattatggacggaaaaaaccgtcaagcaggcgctgtcgcgggagttaaacatattgaaaacccgataaatctagcacgtttggtgatggatgaatcagtacatgtgatgttaagtggtgctggcgcagaaagctttgctcatagccaaggggttaagttagttgataataagatcttcgatactgaccatagatataaatcattgcaacgcgctaaagctaaaatgaaaaaggctaaacaacaaaataaagactaccaagcagcgcactttgctttagatactgaatataaagtgggtacggttggcgctgttgcgcttgataaatttggcaatgttgctgcaggtacttctactggtggtatgacaaataagcgttatggtcgtattggtgattcacctgttattggtgcaggtacttttgctgataatgcttcctgtgctgtttcagcaacgggtcatggtgaattctttattcgttataacgtagcggctgatatttgtgccagagttcaatatcaaggtaagagtattgaccaagcgggtaaagaagttattcatgatgtgctcatgcctgttggtggtacgggtggtgtgattattatagatagtaaaggtaatatcagcttaccattcaatactaaaggtatgtatcgagccagcaaatctaccagccaagtgacttatgttggtatttttaaagatgattaa

SEQ ID NO: 36376 - protein, 342 aa, Colwellia psychrerythraea 34H
MLTFLLVSAFANTAFSNTVLAKDVPFAIAIHGGAGTIQKDHFTPEKEAAYRAKLKESVEAGYTVLEQGGTSLDAVATAINVLENSPFFNAGKGAVYTHDETHEMDASIMDGKNRQAGAVAGVKHIENPINLARLVMDESVHVMLSGAGAESFAHSQGVKLVDNKIFDTDHRYKSLQRAKAKMKKAKQQNKDYQAAHFALDTEYKVGTVGAVALDKFGNVAAGTSTGGMTNKRYGRIGDSPVIGAGTFADNASCAVSATGHGEFFIRYNVAADICARVQYQGKSIDQAGKEVIHDVLMPVGGTGGVIIIDSKGNISLPFNTKGMYRASKSTSQVTYVGIFKDD

SEQ ID NO: 36377 - DNA, 975 bp, Ralstonia eutropha JMP134
  CDS (1)..(975): transl_table=11
atgaaccaagcagtcattgccatccacggcggcgccggcacgatcacgcgcgcggccatggattcggcccgcgaacgcgaatacatcgaagcgctggaacaggtgctgctggcaggccagcgcgtgctggccggcggcggcacggccatcgacgccgtgacggaagctgtccgcctgctggaagagtgcccgctgttcaacgccggcaagggcgcagtgctgacgcacgccggcacctacgaactcgatgccgccgtcatggacggtgcgacgctcaacgccggcgcggtggcctgcgtgtcgcggctgcgcaacccggtactggccgcgcgcgcggtaatggatcacagcgaacacgtgctgtttgccggcgaaggcgctgaagcctttgccgaggcacatggcctggaactggtgtcgcgcgactactactacaccaaggcccgctacgagcaatgggaacgcgcgcgcgccgtgcaaggcatggcactgctcgatcatgacgcggccacgctcgccgcgcgcgcgctggccggcaagcccgatccgatcgatccggacagcaagttcggcacggtcggcgccgtggcctgcgacagcttcggcaacctagccgccgcgacgtccacgggcggcgtcaccaacaagcaggtcggccgcgtcggcgattcgccgctgatcggcgcaggctgctatgccgacgatgttgctgcggtgtcagccaccggtaccggtgaaatgttcatccgcactgttgcagcccatgatgtgtcggcacagatgcggtatgcgggcctgtcgctcgaggagtcggcgcgccgcgtggtcatggaaaagctgccggccattggcggccgcggcggcctgatcgcggtggaccgtgccggcaatatcacgctgccgttcaatacagagggcatgtaccgcggctttgcgcgcgcggacggtccggtgaccgtggcgatctacggctga

SEQ ID NO: 36378 - protein, 324 aa, Ralstonia eutropha JMP134
MNQAVIAIHGGAGTITRAAMDSAREREYIEALEQVLLAGQRVLAGGGTAIDAVTEAVRLLEECPLFNAGKGAVLTHAGTYELDAAVMDGATLNAGAVACVSRLRNPVLAARAVMDHSEHVLFAGEGAEAFAEAHGLELVSRDYYYTKARYEQWERARAVQGMALLDHDAATLAARALAGKPDPIDPDSKFGTVGAVACDSFGNLAAATSTGGVTNKQVGRVGDSPLIGAGCYADDVAAVSATGTGEMFIRTVAAHDVSAQMRYAGLSLEESARRVVMEKLPAIGGRGGLIAVDRAGNITLPFNTEGMYRGFARADGPVTVAIYG

SEQ ID NO: 36379 - DNA, 957 bp, Anabaena variabilis ATCC 29413
  CDS (1)..(957): transl_table=11
atgaagtcacaggtgcaaccaaaattaattattcatgggggagcaggtagttctctccacggcaaaggtggattagaagcagtgcgccaaacactccatgcaatagtagaggaagtctacaccctattattgtcaggagcgaatgcttctgtcgcagtggtgcggggttgtcaactgttggaagatgaaccccgcttcaatgctggtactggttcggtgctgcaatctgatgggcaaatccgtatgagtgcttccatcatggatggtgcattaggacgctttagtggtgtaataaatgtttcacgggtaaaaaatccgattgagttagcacaatttttacaaaattccccagaccgagtgctgtcagattacggctcggctgaattagccagggaaatgcaaattcctagctataacgctttaactgagctgcgattacaagaatggatacaagaaagacaagataatttcaaaagaacaatggctggggtaatagccgaaccagaacttttggaaactagtaatgccggacgtggcacaatcggcgtagtagctttagatacctatggtaaactagcagttggtacatctacaggtggcaaaggctttgagcgcattggacgcgtcagtgattctgctatgccagcaggtaattatgctactagttatgccgccgtcagctgtacaggcatcggcgaagatattattgatgagtgcctagcccccaagattgtcattcgtgtcacagatggattgtctctgcaagagtctatgcagcgctcctttgccgaagcacacgaaaataaaagagatttcggagcgatcgccttagatgccaccggagcgatctcctggggtaaaacttgtgacattatcctcgccgcctttcatgatggcgaaaaaattggggatacattagaactcccaggtggtacccaggtgggtagtatcagttag

SEQ ID NO: 36380 - protein, 318 aa, Anabaena variabilis ATCC 29413
MKSQVQPKLIIHGGAGSSLHGKGGLEAVRQTLHAIVEEVYTLLLSGANASVAVVRGCQLLEDEPRFNAGTGSVLQSDGQIRMSASIMDGALGRFSGVINVSRVKNPIELAQFLQNSPDRVLSDYGSAELAREMQIPSYNALTELRLQEWIQERQDNFKRTMAGVIAEPELLETSNAGRGTIGVVALDTYGKLAVGTSTGGKGFERIGRVSDSAMPAGNYATSYAAVSCTGIGEDIIDECLAPKIVIRVTDGLSLQESMQRSFAEAHENKRDFGAIALDATGAISWGKTCDIILAAFHDGEKIGDTLELPGGTQVGSIS

SEQ ID NO: 36381 - DNA, 1008 bp, Burkholderia sp. 383
  CDS (1)..(1008): transl_table=11
atgacttcacccgcgatcgttgcgattcacggcggcgcaggcacgatcctgcgcgatgcgatggattccgataccgaacgtcagtaccgtgccgaattgaccgcgatcctgacggccgcgcagcaggtgctggccgatggcggcagcgcgctcgacgctgtcaccgtcgcggtgcggatgctcgaggactgtccgctgttcaacgccgggcgcggtgccgtctatacggccgagggcaagcacgaactcgacgcggcggtgatggatggcgcgacgctcggcgccggcgcgatctgctgtgcgacgcgcgtgcgcaatccggtgcttgccgcgcggcgcgtgatggaagccagcgagcacgtgctgttcgccggtgagggcgccgatgcgttcgccgctgcgcaggggctcgaactcgcggaaccgggttacttccacaccgaggcgcgtcacgcgcagtgggtcaaggcgcgcgcagcggcgggcgcgatgctcgaccacgacgcggcgacgttcacgttcggcgcttcgcaatcacagcagcaacagcagccgcccgaaccgctcgatccggaccgcaagcacggcacggtcggtgcggtcgcatgcgaccagcatggccatatcgcggcggcgacgtcgacgggcggcattacgaacaagcagccggggcgtgtcggcgattcgccgatcatcggcgcgggctgctatgcggacgacgcaacctgcgcggtgtcgtcgacgggcaccggcgagatgttcatccggctcgcgaccgcacatgacgtggctgcgcagatcgcgtatcgcggcgcgtcgctcgccgacgccgcgcacgacgtcgtgatgaacaagctgccgcgcctcgcgggccgcggcgggatcatcgcggtcgacgcgcagggcaacgtcgcgatgccgttcaacaccgaagggatgtaccgcggctacgcgcgcgtcggtgaagcgccggtggtcggcatctatcgcgacgacgatacggcctga

SEQ ID NO: 36382 - protein, 335 aa, Burkholderia sp. 383
MTSPAIVAIHGGAGTILRDAMDSDTERQYRAELTAILTAAQQVLADGGSALDAVTVAVRMLEDCPLFNAGRGAVYTAEGKHELDAAVMDGATLGAGAICCATRVRNPVLAARRVMEASEHVLFAGEGADAFAAAQGLELAEPGYFHTEARHAQWVKARAAAGAMLDHDAATFTFGASQSQQQQQPPEPLDPDRKHGTVGAVACDQHGHIAAATSTGGITNKQPGRVGDSPIIGAGCYADDATCAVSSTGTGEMFIRLATAHDVAAQIAYRGASLADAAHDVVMNKLPRLAGRGGIIAVDAQGNVAMPFNTEGMYRGYARVGEAPVVGIYRDDDTA

SEQ ID NO: 36383 - DNA, 906 bp, Desulfovibrio desulfuricans G20
  CDS (1)..(906): transl_table=11
atgagacccagaataatagtgcacggcggggcatggaccatacccgcggagcggcggcaggaacatctggacggtgtgcgcgctgcggtggaggccgcttggccgttgctggagcagggagctgatgcgcttgacgccgttcaggcggccgtcaacgtgatggaagctgaccctacgtttgatgccggccggggagcggtgctcaatgcagacggccagatagagctggatgcggccataatggacggtcgtactttgaattatggcggagtagccggagtgcggcgttttatgacaccggtcgacattgcgcgtaaggtgctcgaaacggaattctgcctgctgattgccgacggtgcggagcgtttcgcccgcgaatgcgggctgccggaggttgatccccgcgagctgctgaccgacagggaactggagctgtatcagaagctgtgcagccgcgaaggatactgcacgcatgacgccttcaagcctgtaccgcagggtaccgtgggcgctgtggccatggatgtgcggggcaatattgccgctgccacgtccacgggggggactccgtgtaaaaaaccgggaagggtgggtgattctccgctgtgcggagcaggcacctatgccgacaacgaaaccggaggagcctccgccaccggattcggtgaaggaatcatccgtacgctgatgacccgcagcgcctgcgactgtctgcgcgggcatgacgccatgcaggcggcccgcatgggcatagaactgctgcacaggcgtgtgcagggccatgccggtctgataatgctggataaccgcggagaatatggtttttatcacaacacggatcatatggcatttgcctatgcccgccacgacggcagcgtgcatgcttcggtgcatatggcggaatga

SEQ ID NO: 36384 - protein, 301 aa, Desulfovibrio desulfuricans G20
MRPRIIVHGGAWTIPAERRQEHLDGVRAAVEAAWPLLEQGADALDAVQAAVNVMEADPTFDAGRGAVLNADGQIELDAAIMDGRTLNYGGVAGVRRFMTPVDIARKVLETEFCLLIADGAERFARECGLPEVDPRELLTDRELELYQKLCSREGYCTHDAFKPVPQGTVGAVAMDVRGNIAAATSTGGTPCKKPGRVGDSPLCGAGTYADNETGGASATGFGEGIIRTLMTRSACDCLRGHDAMQAARMGIELLHRRVQGHAGLIMLDNRGEYGFYHNTDHMAFAYARHDGSVHASVHMAE

SEQ ID NO: 36385 - DNA, 1029 bp, Burkholderia thailandensis E264
  CDS (1)..(1029): transl_table=11
atgacttcacccgcaatcgttgcgattcacggcggcgcaggcacgatcctgcgcgacgcgatgacggccgacgccgaagcgcagtaccgcgccgagctgaacgcgatcctcgccgccgcgcagaaagtgctcgccgacggcggcagcgcgctcgacgcggtcagcgtcgccgtgcgcatgctcgaggattgcccgctcttcaacgcggggcgcggcgccgtctacacggccgacggcacgcacgagctcgacgccgcgatcatggacggcgcgacgctgaaagcgggcgcgatctgctgcgcgacgcgcgtgcgcaacccggtgctcgccgcgcggcgcgtgctcgaggcgagcgagcacgtgatgttcgcgggcgcgggcgccgatgcgttcgcggccgcgcaggggctcgagcttgccgcgccgggctacttcgacaccgagttccgccgcgcgcaatggctgagggcgcggcgcgcgtcgggcacgatgctcgatcacgacgcggcggcgttcgcgttcggccagggcgacggcgatggcaacggtcacggcggcggcgagcgcgccgcgcctgcgcccgagccgctcgatccggaccgcaagcacggcacggtcggcgcggtcgcgcgcgatctgcacggccatctggcggcggcgacgtcgacgggcgggatcacgaacaagcagccggggcgcgtcggggacacgccgatcatcggcgcgggctgctatgcgaacgacgcgacgtgcgcggtgtcggcgacgggcacgggcgagatgttcatccgcctcgcgaccgcgtacgacgtgtccgcgcagatcgaatatcgcggcgcatcgctcgcgtcggccgcgtacgacgtcgtgatgaacaagctgccgagaatcgcgggccgcggcggaatcatcgcgctcgacgcgcgcggcaacctcgcgatgccgttcaacaccgaagggatgtaccgcggctacgcgcgcgtcggcgaggcgcccgtcaccgcgatctatcgcgaggacgcggcgtga

SEQ ID NO: 36386 - protein, 342 aa, Burkholderia thailandensis E264
MTSPAIVAIHGGAGTILRDAMTADAEAQYRAELNAILAAAQKVLADGGSALDAVSVAVRMLEDCPLFNAGRGAVYTADGTHELDAAIMDGATLKAGAICCATRVRNPVLAARRVLEASEHVMFAGAGADAFAAAQGLELAAPGYFDTEFRRAQWLRARRASGTMLDHDAAAFAFGQGDGDGNGHGGGERAAPAPEPLDPDRKHGTVGAVARDLHGHLAAATSTGGITNKQPGRVGDTPIIGAGCYANDATCAVSATGTGEMFIRLATAYDVSAQIEYRGASLASAAYDVVMNKLPRIAGRGGIIALDARGNLAMPFNTEGMYRGYARVGEAPVTAIYREDAA

SEQ ID NO: 36387 - DNA, 864 bp, Francisella tularensis subsp. holarctica
  CDS (1)..(864): transl_table=11
atgcaaaaaattataatccatggtggttgtggtgctagagaagacaaaaatacttcttttggagattatcaccagcatcttttaccaattgttgaaaaagcatataactacttaaaagaagtagatgatgctaatgaggcagcaatttttgctgctaaacttctagaggatgatgagatatttaatgctggtactggttcgcgcgtgcagcaagatggacaaatcaggatgtctgcatctatcatcgatagtcaaaaacaaaagtttgctggtgttataaatattcaaaatatcaaaaatccaatagaagttgcaaatagattaatgcaacagcatcatagcatccttgcaggtgatcaagctacgacattcgctcatgatgtgatgggtttaccaatttataacccgatgacagaaaaaagatatcaagaatgcctacagcttaaaaaaggctatacaggaacgataggtgtagtagctttagactcaaaaggaaaaatttgtgcagtaacctcaacaggtggtgctggatttgaatatccaggaagagtaggagatagtccgacagttgcgggtaattttgctaatgagtgtatgggaatatcgtgtacagggataggtgagcacataattaatcaagcagttgcggcaaagattgctactcgagttaaagatggaatgtctttgttggctgccgtagataaatctatagcagaaagtgatagtttgggcgattatgttggacttatagctattgataaacatggaaatatttgctctggatcaacttctatagcgcaaacattatatgcctatgctgatggtgaacagataaaaacattttatcaagaaaaaatgttataa

SEQ ID NO: 36388 - protein, 287 aa, Francisella tularensis subsp. holarctica
MQKIIIHGGCGAREDKNTSFGDYHQHLLPIVEKAYNYLKEVDDANEAAIFAAKLLEDDEIFNAGTGSRVQQDGQIRMSASIIDSQKQKFAGVINIQNIKNPIEVANRLMQQHHSILAGDQATTFAHDVMGLPIYNPMTEKRYQECLQLKKGYTGTIGVVALDSKGKICAVTSTGGAGFEYPGRVGDSPTVAGNFANECMGISCTGIGEHIINQAVAAKIATRVKDGMSLLAAVDKSIAESDSLGDYVGLIAIDKHGNICSGSTSIAQTLYAYADGEQIKTFYQEKML

SEQ ID NO: 36389 - DNA, 993 bp, Burkholderia xenovorans LB400
  CDS (1)..(993): transl_table=11
atgaactccaacgcagtcattgccattcatggcggagcagggacgatcctgcgcgcgtcgatgtcggccagcgccgaagccgactatcacgccgccttgcatgcggtgctgagcgccggccagcgcgtgcttgccgagggcggcagcgcactcgacgccgtcagcgaggccgtgcgcctgctcgaagactgcccgctcttcaacgcgggccgcggcgcggtttttacggcggcgggcacgcacgaactcgacgccgcgatcatggacggccgtacgctcgaagccggcgcgatctgctgcgtgaagcgcgtgcgcaatccggttctggccgcgcgccgcgtgctcgaaggcagcgagcatgtgctgttcacgggcgaaggtgcggaagcgttcgccgccgcgcaagggctcgaattggtcgagcctgagtatttccataccgaagcgcgccatcgtcaatggctgctcgcgcgcgatcagcagcgcgccatgctcgatcacgacggcgccacgctcgccgccgcgccggcttcgaacgacgacgatcccacgccgcatgaaccaatcgatccgaaccgcaagttcggcacggtcggcgcggtcgcgctcgatcggcacggccacgtggcggcggcgacctcgacgggcggcgtcaccaacaagcaggtcggccgggtcggcgatgcgccgctgatcggcgccggctgctatgcggacgacgcgacctgcgccgtctcgacgaccggttcgggcgagatgttcatgcgcatggtggcggcctacgacgtcgccgcgcaaatggcctaccgcaacgtgtcgctgcaggaagcggccgacgacgtggtgatgaaccgccttccgaagatcgacggccgcggcggcctgatcgccgtcgatgcgcgcggcaacgtcgcgctgccgttcaataccgaaggcatgtatcgcggttttgcgcggctcggtgaaacgccggtgacggcgatttaccgctag

SEQ ID NO: 36390 - protein, 330 aa, Burkholderia xenovorans LB400
MNSNAVIAIHGGAGTILRASMSASAEADYHAALHAVLSAGQRVLAEGGSALDAVSEAVRLLEDCPLFNAGRGAVFTAAGTHELDAAIMDGRTLEAGAICCVKRVRNPVLAARRVLEGSEHVLFTGEGAEAFAAAQGLELVEPEYFHTEARHRQWLLARDQQRAMLDHDGATLAAAPASNDDDPTPHEPIDPNRKFGTVGAVALDRHGHVAAATSTGGVTNKQVGRVGDAPLIGAGCYADDATCAVSTTGSGEMFMRMVAAYDVAAQMAYRNVSLQEAADDVVMNRLPKIDGRGGLIAVDARGNVALPFNTEGMYRGFARLGETPVTAIYR

SEQ ID NO: 36391 - DNA, 927 bp, Acidobacteria bacterium Ellin345
  CDS (1)..(927): transl_table=11
gtgaatgcttctccggttcttctcgtgcatggcggcgcctgggcgattcctgatgatgcggtggaggcccatgagcgcggagtgcgcgcggcggccgaaactggatggcgcgttctggagaagggcgggtcggcgctggacgcagtggaagaggcgatcgtcgcgatggaagacgacgagacgtttgacgcagggcgtggatcgtttctcaacgaagacggacgcgtgcaactcgatgcgctgatgatggatggggcgacgctgcaggccggcggtgtggggtgcgtggagcggttgatgaatccgatccgcgcggcgcgcaaggtgctttctgactcgccgcatatttatttcgtcggcgaaggcgcggagcggtttgcggaggagcatggcatcgcgctgtgcgcgaatgaagagctgatcatcgagcgcgaactcgtacgctggaaagatgcgaagaagcagcagtttctgaaagtgccgtccgagtttgccggcccgggaatggatacccacgacacggtgggtgcggtggcgctcgatgcacaaggcaacattgcggcgggaacttcgaccggcggcacactcaataaagctgcgggacgggtcggcgattcgtcgctcattggctgcggcggttacgccgacaatctcagcgccgcggtttccgttacgggatggggcgaaccgatgatgaagctggtgctgagcaagtgggcggcagaccgcgtggagatgggcgatgctccgcagaccgtcgccaccgccgcgatcgagcgtctctacacgcgactcaacggacatggcggcattatcttgctcgattcgaaggggcgcattgggctggcgcacaatacgccgcgcatggcgtgggcctggaagcggccgaacgcgcaagaatccggcgtggtcgtcgcgggttcgtag

SEQ ID NO: 36392 - protein, 308 aa, Acidobacteria bacterium Ellin345
MNASPVLLVHGGAWAIPDDAVEAHERGVRAAAETGWRVLEKGGSALDAVEEAIVAMEDDETFDAGRGSFLNEDGRVQLDALMMDGATLQAGGVGCVERLMNPIRAARKVLSDSPHIYFVGEGAERFAEEHGIALCANEELIIERELVRWKDAKKQQFLKVPSEFAGPGMDTHDTVGAVALDAQGNIAAGTSTGGTLNKAAGRVGDSSLIGCGGYADNLSAAVSVTGWGEPMMKLVLSKWAADRVEMGDAPQTVATAAIERLYTRLNGHGGIILLDSKGRIGLAHNTPRMAWAWKRPNAQESGVVVAGS

SEQ ID NO: 36393 - DNA, 1056 bp, Myxococcus xanthus DK 1622
  CDS (1)..(1056): transl_table=11
gtgggctgtgccacccagactggggctgctcgcaccgacagcgagcagcccacctcgcgtgatgcacccgcgcccaagccgaagtgggggctggtcatccacggcggcgcgggtgtcatctcccgggagaatctctccccagagcgcgaggaggaggtccgcgccgcgctgacccagtccctccaggcgggacacgcggtgttggccagtggtggctccgcgctggacgcagtgagcgccgcggtccgcatcctggaggactctccgtacttcaacgcgggcaagggcgccgtcttcacgcacgacggggtcaacgagctggatgccgccatcatggatggcacgacgcgcaaggcgggggccgtggcgggcttgcggcacgtgaagaaccccatctcgctggcgcggctcgtcatggagcagtcgccgcacgtgatgatggtgggggagggcgcggaggccttcgcgaagtcgcagggtgtggagttggtggacccgaagtacttctacacggaggaccggtggcagggcctccagcgcgcgctggagaaggagcgctcgcagccgcagccatcctccgcgctcccggcggggtatgacccggtgagcggggaccacaagttcggcaccgtgggcgccgtggccctggaccagacgggcgcgctcgccgcggccacgtccacgggaggcatgacgaacaagcgctacggccgcgtgggggactcgcccatcatcggcgcggggacgtatgcggacgcgcgctgcgccgtgtccgccaccggccatggcgagttcttcattcgctacaccgtggcgcgcgacatctgcgcccgcgtggaataccagaacgtgccgttgccggaggccgccgacgtcgtcatcaacgacgtgctggtgaaggtcggcggcgagggcggcgtcatcgcgatggaccgcgagggcaacgtggccatgcccttcaactccgccggcatgtaccgcggctacgtgggcgaggacggcaagcccgtcgtggccatcttccgggatgcggcggaggccgctggcgcgaagtag

SEQ ID NO: 36394 - protein, 351 aa, Myxococcus xanthus DK 1622
MGCATQTGAARTDSEQPTSRDAPAPKPKWGLVIHGGAGVISRENLSPEREEEVRAALTQSLQAGHAVLASGGSALDAVSAAVRILEDSPYFNAGKGAVFTHDGVNELDAAIMDGTTRKAGAVAGLRHVKNPISLARLVMEQSPHVMMVGEGAEAFAKSQGVELVDPKYFYTEDRWQGLQRALEKERSQPQPSSALPAGYDPVSGDHKFGTVGAVALDQTGALAAATSTGGMTNKRYGRVGDSPIIGAGTYADARCAVSATGHGEFFIRYTVARDICARVEYQNVPLPEAADVVINDVLVKVGGEGGVIAMDREGNVAMPFNSAGMYRGYVGEDGKPVVAIFRDAAEAAGAK

SEQ ID NO: 36395 - DNA, 924 bp, Trichodesmium erythraeum IMS101
  CDS (1)..(924): transl_table=11
atgcagccaaaacttattattcatggtggtgctggtagttcccttgacgaaaaaggaggattagaaattgttcggaaatctttacatcgaatagtagatgaattatataacctacttctaggtgataccgctgctctagatatagttatacgtggttgccaaatgttagaagatgacccaatttttaatgctggcaccggttcagtgctccaatctgatggacaaattcggatgagtgcttcgctgatggatggtttaaatcatcggtttagtggggtgatcaatgtctccaggattaaaaatcccattgatttagccagagcattgcaagaatcccctgatcgcgtattatcagatagtggggcggctgaatttgtgcgggaattacaaatgccagtttacaatcctctgacagataaacgattaaatgaatggcttgaagaccgcaaacaaaattttaatagaaaaatggcaaacgtggttacagtatctccaggtactggcactattggtgtagtagctttggataaagagggtagattagctgcaggtacgtctactggtgggaaaggttttgaaaaaattggtcgggttagtgactcggcgatgcctgcgggaaattatgctactgatagtgctgcagtaagttgtactggtattggagaagatattattgatgagtgtttggctgcaaaaattgtgattagggtaacggatggtttttctattaaggcagcttttgagcgttcatttgctgaggcccatgaacataaaagagatttgggagctatcggtattgatgctggtggtacaattaactggggaaaaacttgcgatgtaattttagctgcttttcacgatggggaaaaaattggtgatagtttggaagctgacaagggaaaatcaactttttctgttgaataa

SEQ ID NO: 36396 - protein, 307 aa, Trichodesmium erythraeum IMS101
MQPKLIIHGGAGSSLDEKGGLEIVRKSLHRIVDELYNLLLGDTAALDIVIRGCQMLEDDPIFNAGTGSVLQSDGQIRMSASLMDGLNHRFSGVINVSRIKNPIDLARALQESPDRVLSDSGAAEFVRELQMPVYNPLTDKRLNEWLEDRKQNFNRKMANVVTVSPGTGTIGVVALDKEGRLAAGTSTGGKGFEKIGRVSDSAMPAGNYATDSAAVSCTGIGEDIIDECLAAKIVIRVTDGFSIKAAFERSFAEAHEHKRDLGAIGIDAGGTINWGKTCDVILAAFHDGEKIGDSLEADKGKSTFSVE

SEQ ID NO: 36397 - DNA, 1032 bp, Shewanella sp. MR-4
  CDS (1)..(1032): transl_table=11
atgaaaataaaattagccacctttagtttaattctctcgagtgcactttttatgtcacaaaatacccaagcgaatgaaaaaccttttgccattgcgatccacggtggcgctggcaccatttctaaggccaacctcacgccagagctgcgtcaggcctataaagacaagctcaaagaggcgattgataaaggttcaaaagtgctcgagcagggcggtgatagcttagtcgcggtgcaaactgctatcaatgtattagaaaacagcccgctgtttaacgccggtgtcggttcggtttacacctatgatggcggccatgaattagatgcctcgattatggatggtaaaaccatgaatgcgggcgccgtagcgggcgtgcgccatatcgccaaccccatcgatttggccttagccgtgatgaataagtctgagcatgtgatgctgtcgggcgctggcgccgaggagtttgccttaacccaaggttttaaactggtacctaatagccatttcgatagcgatgcccgttatcaacaattactcgatgccagacaaaaactgcaggcggctgaaaaatcagatcaaattgcgggtattgagatgaaagatctcgattataaatttggtaccgttggtgctgtcgccttagataaaaacggcaacttagcggcgggcacttccactggtggtatgacggccaagcgttttggtcgcattggtgactcgcccgtgattggggcgggcacctatgccgaaaacggcgtttgcgctgtgtcggccacgggccacggtgagttttttattcgctaccaagtggcgggcgatatctgcgctaaggtcaagtaccagcaaaaatccattattcaagcggcagatgaagtgattaatcaacgccttattaccgctggcggctctggtggtgtgatagcagtcgaccacaggggcaatattgccacgccatttaataccgaaggcatgtaccgcgctacccgtagtaatggcgagcctgcccaagtaatgatttggcaggatcaataa

SEQ ID NO: 36398 - protein, 343 aa, Shewanella sp. MR-4
MKIKLATFSLILSSALFMSQNTQANEKPFAIAIHGGAGTISKANLTPELRQAYKDKLKEAIDKGSKVLEQGGDSLVAVQTAINVLENSPLFNAGVGSVYTYDGGHELDASIMDGKTMNAGAVAGVRHIANPIDLALAVMNKSEHVMLSGAGAEEFALTQGFKLVPNSHFDSDARYQQLLDARQKLQAAEKSDQIAGIEMKDLDYKFGTVGAVALDKNGNLAAGTSTGGMTAKRFGRIGDSPVIGAGTYAENGVCAVSATGHGEFFIRYQVAGDICAKVKYQQKSIIQAADEVINQRLITAGGSGGVIAVDHRGNIATPFNTEGMYRATRSNGEPAQVMIWQDQ

SEQ ID NO: 36399 - DNA, 903 bp, Hyphomonas neptunium ATCC 15444
  CDS (1)..(903): transl_table=11
gtgatccatggcggggccggcgtgatcctgcctggctccatgacgcctgaaatggaggcggcctatattgccgcgctgaacgtctcgcttgaggcgggcgccgccgtgctgcgcgaaggcggcagcgcgcttgacgccgttgaagccgccgtgctgacgatggaagacgacgcgctgttcaatgccgggctaggcgccgtcttcacggctgaaggcacgcacgaacttgacgcctccatcatggatggacgcgaccggaatgcgggcgccgtggccggcgtgatgcgcgtgaaaaatccgatcaaagcggcccgcgccgtcatggaaaaatccgaacacgtcatgtttgcggccgaaggcgccgatgcgtttgcgcaggaccagggcctcgagatggtggacaacacatatttcgataccgaccgccgccgcgaagcgctggaccgtgtcctgcgcgagcgggcccgcaccgccgcagatcgtcacggtacggtgggcgccgtcgccatggaccttgaaggcaacctcgccgccgccaccaccacgggcggcatgaccgccaaagccgcaggccgcgtgggcgacgcgcctttgattggcgcagccacctatgccgaaaacggcgtgtgcgcggtctccgccaccgggcatggcgaatatttcatccgcgtcggcgttgccaaaacgatctgcgaccgcgtgaaacttggcggggaagacgtgaagaccgccgctggcgttgcgctgggtgaagtggccgcgctgggcggagatggcggcgtcatcgtgatcggcggaacgggcgattatggcttcgtgttcaactccgccggcatgtatcgcggctggatcgatgcgtcagggtcgggcacagctatctatggccaagacgatgccgattaa

SEQ ID NO: 36400 - protein, 300 aa, Hyphomonas neptunium ATCC 15444
MIHGGAGVILPGSMTPEMEAAYIAALNVSLEAGAAVLREGGSALDAVEAAVLTMEDDALFNAGLGAVFTAEGTHELDASIMDGRDRNAGAVAGVMRVKNPIKAARAVMEKSEHVMFAAEGADAFAQDQGLEMVDNTYFDTDRRREALDRVLRERARTAADRHGTVGAVAMDLEGNLAAATTTGGMTAKAAGRVGDAPLIGAATYAENGVCAVSATGHGEYFIRVGVAKTICDRVKLGGEDVKTAAGVALGEVAALGGDGGVIVIGGTGDYGFVFNSAGMYRGWIDASGSGTAIYGQDDAD

SEQ ID NO: 36401 - DNA, 873 bp, Hyphomonas neptunium ATCC 15444
  CDS (1)..(873): transl_table=11
atgtcaaaaatctgggccatcgccatccatggcggcgccggaccgatcccgggccgcgattatgcgcccgaagaagcccacatcgcgggcctcctgaaacgcggcgcagacgcgctcgcgagcggcgaagccgcgctcgatgtcgtcgaagcgatggtcatcgatctggaagcctccggtctctacgtggccggcaaaggcgcgagccccaataccgccggagactgggaactcgacgccgccatcatggacgggcgcacccgcaacgccggcgccgtcggcgccctgcagggctttgaaagccccatccgcgccgcccggctggtgatggaaaagacacccaacgtcctgatcgtcggcaaaggcgcagaggccattgccagcgccgctggtctcgcccgcgtcaccgatcccgccagctattatggcgccgtcgatgaagacaccgtccaggatggcagcgtccagatgggcaccgtcggcgccgtcgcgctcgacatctatggcgacatggcggccgccacctccaccggcggcgtcctctccaaaacacccggccgtatcggcgacacgcctatcatcggcgcaggcacctgggccgacgagcgctgcgccatctcctgcacaggcctcggcgaatatttcatccgcgccaacgccgccgcagacgtctccgcccgcatccgctatggcggcgatacgctcggccccgccctcagaggcgcgctggacgatgtcaaacgcctgggcggcaatggcggcatgatcggcgtctcggcaaccggcgaactcgcctccggtttcaattcctctggtctcaagcgcggcctcgccgactggaaaggccgtttcgaagtggcaaccttcctatga

SEQ ID NO: 36402 - protein, 290 aa, Hyphomonas neptunium ATCC 15444
MSKIWAIAIHGGAGPIPGRDYAPEEAHIAGLLKRGADALASGEAALDVVEAMVIDLEASGLYVAGKGASPNTAGDWELDAAIMDGRTRNAGAVGALQGFESPIRAARLVMEKTPNVLIVGKGAEAIASAAGLARVTDPASYYGAVDEDTVQDGSVQMGTVGAVALDIYGDMAAATSTGGVLSKTPGRIGDTPIIGAGTWADERCAISCTGLGEYFIRANAAADVSARIRYGGDTLGPALRGALDDVKRLGGNGGMIGVSATGELASGFNSSGLKRGLADWKGRFEVATFL

SEQ ID NO: 36403 - DNA, 954 bp, Nostoc punctiforme PCC 73102
  CDS (1)..(954): transl_table=11
atggagttacaggtgcaacctaaattaattattcatgggggagctggtagttctctccacggtaaaggcggattagagaccgtgcgccgatcgctccatacagtaatagaagaagtctattctctgctattgtcaggagcaactgcttctgaggcggtggtgcagggttgccaaatgctcgaagataacccccgctttaatgctggtactggttcagtattgcaatctgatggtcaaatccgtatgagtgcttccctaatggatgggacattagggcgatttagtggtgtaattaatatttcgcgggtgaaaaatcccattgaattagcacaatttttacaaaactcgccagatcgagtgctatcagattttggatcggctgagttggcgcgagaaatgcaacttcccagctataatgctttaactgatttgcggttacaagagtggatgcaagagcgccaggataattttaaaagtacaatggctggcgtggtagcagaacccgaactgctagaaaccagcaatgctggacgcggaaccatcggcgtagtagctttagatgtgtttggtaggctagctgctggcacttctactggtggtaagggatttgagcggattggaagggtaagtgattctgcgatgccagcaggtaattatgctactagtaatgctggtgttagctgtactggcattggggaagatatcattgatgagtgtttagctccccggattgtagtgcgtgtaactgatgggatgtccctgaaggaggctatgcagcgttcctttggagaagcacaccagaacaaacgagatttaggagcgatcgctttagatgctagtggagcgatcgcttggggcaaaaccagcgaaattttactcgccgcctatcacgacggcgaaaaaattggcgatactttggaatggaatgatagtgaattgattggctattgttga

SEQ ID NO: 36404 - protein, 317 aa, Nostoc punctiforme PCC 73102
MELQVQPKLIIHGGAGSSLHGKGGLETVRRSLHTVIEEVYSLLLSGATASEAVVQGCQMLEDNPRFNAGTGSVLQSDGQIRMSASLMDGTLGRFSGVINISRVKNPIELAQFLQNSPDRVLSDFGSAELAREMQLPSYNALTDLRLQEWMQERQDNFKSTMAGVVAEPELLETSNAGRGTIGVVALDVFGRLAAGTSTGGKGFERIGRVSDSAMPAGNYATSNAGVSCTGIGEDIIDECLAPRIVVRVTDGMSLKEAMQRSFGEAHQNKRDLGAIALDASGAIAWGKTSEILLAAYHDGEKIGDTLEWNDSELIGYC

SEQ ID NO: 36405 - DNA, 873 bp, Nostoc punctiforme PCC 73102
  CDS (1)..(873): transl_table=11
atgataccgaccatcattgttcacggtggagcaaaaaccatcacagacgacaaagttacagccaataatgcaggctgtacagcagcagcagaagctggttgggcagtgctaattagcggaggtactgccgcagaagctgtggaagcagctacccgtgttttggaagctgacccgacatttaacgctggtcttggtgcaactcttaacagcgacggagaggtggagttagacgcggcgatcatggaaggctctttaagttggggagcgatcgcagcagttcagggtgtacgtcatccaatctcggttgcccgaaaaattatggatgataaacccagattactagtagcgcggggtggagaacgctttgccatagattgtggtgccgaaatgtgtaaaaaagaagacctaatagctgaggagcaatggcagcagtggaaagaagatcgagaagtaatcgatcgccctaacaccataggttgtgttgctttggatgctagcggtgttttagctgctggtacttcaactggcgggactacaaagcagcaacaaggtcgcgtcggtgacactgcgcttgttggctgtggcttatatgctgataataaattcggcgcttgttcaacaacaggtgatggcgagtcgattatcccggtggttttagctaaaactgcgatcgattttttgagtggagaccggcatccagatgaagccgcacagatggcaattgacgctttggtttctaaggttaaaggtgaagctgggtgcatcctcatagaccgtcaaggacgtgttggctgggcgtataactcatcacacatggcttgtgcttatatgaccgcaggacaagacaaggtggctgcctttaccaagaaataa

SEQ ID NO: 36406 - protein, 290 aa, Nostoc punctiforme PCC 73102
MIPTIIVHGGAKTITDDKVTANNAGCTAAAEAGWAVLISGGTAAEAVEAATRVLEADPTFNAGLGATLNSDGEVELDAAIMEGSLSWGAIAAVQGVRHPISVARKIMDDKPRLLVARGGERFAIDCGAEMCKKEDLIAEEQWQQWKEDREVIDRPNTIGCVALDASGVLAAGTSTGGTTKQQQGRVGDTALVGCGLYADNKFGACSTTGDGESIIPVVLAKTAIDFLSGDRHPDEAAQMAIDALVSKVKGEAGCILIDRQGRVGWAYNSSHMACAYMTAGQDKVAAFTKK

SEQ ID NO: 36407 - DNA, 939 bp, Crocosphaera watsonii WH 8501
  CDS (1)..(939): transl_table=11
atgactacaacccaacccaaactgatcattcatggtggtgctagttccctaaacgataagggcggtttagccaaagtgcgtcccatcctccataatattgtcaccgaagtttatcaattattgaacaacgggggaacagcagtggatgcagtggttaggggttgtcagttattggaaaatgaacccagtttcaacgccggaactggttcggtactgcaatccgatggacaaattcgtatgagtgcgtcgctgatggaagggttgaatcaaacctttagcggtgtgattaatatttcccgtgtcaaaaaccccatcaacttagccaaatatctgcaagatgaaagcgatcgcattctctcggatatgggggctatggaattagccagagaactaaatatccccatttatgaccccttaaccgagtttcgggctaaggaatggatagcagagtggaaagacgattttcagagcaaaatggggcgtttattcgccagtacagagtcgaatgaagcacgacggggaaccattggtgtagttgcgttggatagtcagggcaaaattgctgctggtacttctacgggaggaaaaggcttagaaagaattggccgggtgagtgattcagccatgcctgctggtaattatgctacggccgaggcaggggtaagttgtactggtgtgggggaagatattgttaacgaatgcttggctgcgcgggtagtgattcgggtgggagatggcttatctttgcccgatgccatggaaaagtcgatgaaagagtctaaaaaacgcgatcgggacttaggggcgatcgcactggctcataatggtgtaattagttgggggaaaaccagcgaaattttactggcagcttatcatgatggttcaaccattggggatactttagaatggcaaacagaagaattgatggggcattgctaa

SEQ ID NO: 36408 - protein, 312 aa, Crocosphaera watsonii WH 8501
MTTTQPKLIIHGGASSLNDKGGLAKVRPILHNIVTEVYQLLNNGGTAVDAVVRGCQLLENEPSFNAGTGSVLQSDGQIRMSASLMEGLNQTFSGVINISRVKNPINLAKYLQDESDRILSDMGAMELARELNIPIYDPLTEFRAKEWIAEWKDDFQSKMGRLFASTESNEARRGTIGVVALDSQGKIAAGTSTGGKGLERIGRVSDSAMPAGNYATAEAGVSCTGVGEDIVNECLAARVVIRVGDGLSLPDAMEKSMKESKKRDRDLGAIALAHNGVISWGKTSEILLAAYHDGSTIGDTLEWQTEELMGHC

SEQ ID NO: 36409 - DNA, 1071 bp, Croceibacter atlanticus HTCC2559
  CDS (1)..(1071): transl_table=11
atgaaacaatttatcattactactgttttcgctttgctattgttaagctgtacaaatacagtaaaaaaagaagacaaaactgctagtacaaatgaagcaaacaaccctaaagatcattttggaattgttattcatggtggtgccggaaccattctcaaaaaaaacatgtcagactctttagaaactgcatatgaagaaaaacttgctgaagctataaaaacaggtcatgcaattttagaaaaaggtggtacaagtttagaggctgttacagcaaccattaatattttagaagattcacctctgtttaatgctggtaaaggtgctgtgtttacgcatgatgaaactaatgaattagatgcctcaataatggatggcaaaacgttaaacgctggcgctgttgctggtgttacacgagtaaaaaaccctattaatttagcaaaattagtaatgacaaactctaatcatgtcatgctagcaggcaaaggagcagaagtatttgcagaagatcaaggtgtaaagctagtggacccacaatatttttatactgaaaagcgattcaactccttacagagattaaaaaagcgcaaacaagcagaattagatactaatacgaaaactgcacttttagcagaagacccttttataaaagattccaaatttggtactgttggatgtgtcgctctagataaagatggaaatttggccgcaggaacctcaacaggaggaatgacagataagcgttggaaccgcataggagatgctccaataattggtgctggcacatatgccaataatgcaacttgtgcagtatctagcacaggttggggagaatattttataagagctatggttgctcatgatatttcagctttaatggaatataaaggcttgtctttacaagacgctgcagagcttgtgatacagaaaaaagtaccagatttaggaggtgatggtggtattgtagccatagacaataaagggaatattgctatggagtttaatactgcaggtatgtatcgcgcacatatgaatgcaaatggcgaattgaatattggaatttacaaggaataa

SEQ ID NO: 36410 - protein, 356 aa, Croceibacter atlanticus HTCC2559
MKQFIITTVFALLLLSCTNTVKKEDKTASTNEANNPKDHFGIVIHGGAGTILKKNMSDSLETAYEEKLAEAIKTGHAILEKGGTSLEAVTATINILEDSPLFNAGKGAVFTHDETNELDASIMDGKTLNAGAVAGVTRVKNPINLAKLVMTNSNHVMLAGKGAEVFAEDQGVKLVDPQYFYTEKRFNSLQRLKKRKQAELDTNTKTALLAEDPFIKDSKFGTVGCVALDKDGNLAAGTSTGGMTDKRWNRIGDAPIIGAGTYANNATCAVSSTGWGEYFIRAMVAHDISALMEYKGLSLQDAAELVIQKKVPDLGGDGGIVAIDNKGNIAMEFNTAGMYRAHMNANGELNIGIYKE

SEQ ID NO: 36411 - DNA, 1005 bp, Croceibacter atlanticus HTCC2559
  CDS (1)..(1005): transl_table=11
atgaaaagaagacaatttatacaacaatctgctttaggaacagtaggacttgcagttgcaggtgcagcaatatcttgtgatgaacaaaatttgaataaagaaatgagtataccccaaaaagaaacattaaaaaaatctggaccaattgctatttgcacttggggatttgttgatgcaaataaaactgcaggtcaattcttagatgctggaaaacctgctttagatgctgttattgccggcgtacaagtagaagaagatgatattagaaacacaactgtaggaaaaggtggtgcgccagacagatctggcgaagtaactctagatgcttgcgtaatgaatccagatggagattgtggtgctgtggtatatgttaaagattatgcgcacgtagcacaattagcacgtattgtaatggaggaaacaccacacgtgatgttagctggagaaggcgcagaagaattggcagagcgttatgggtttaaaaaagagaccttgttaacagagcagtctgaaaaagcgtataaagaatggcttaaaagcccagaatataaaccaattattaatattgaaaatcacgatacgataggactgttggctattgataaatttggagatattgctggtgcgtgtacaacaagtggattaagctacaaaatgaaaggtagagtaggagatagtgccattattggaagcggacttttcttagataatgaaataggaggtgcagtagccacaggaatgggagaggaaataatgaaaacagttggtagctttttaatagtagagcttatgaggcaaggtaaaacacctcaagaagcttgtgatgaagccgtaaaacgtgttattgaaagaaatccgaattataaaaactttcaggtagcttatattgctctagataaacaaggaaatactggtggcgcctgtattcataaaggctttacttacgagaagtatgaaaatgaagaaaacactagagtacaaccttcacatattttaaacgattaa

SEQ ID NO: 36412 - protein, 334 aa, Croceibacter atlanticus HTCC2559
MKRRQFIQQSALGTVGLAVAGAAISCDEQNLNKEMSIPQKETLKKSGPIAICTWGFVDANKTAGQFLDAGKPALDAVIAGVQVEEDDIRNTTVGKGGAPDRSGEVTLDACVMNPDGDCGAVVYVKDYAHVAQLARIVMEETPHVMLAGEGAEELAERYGFKKETLLTEQSEKAYKEWLKSPEYKPIINIENHDTIGLLAIDKFGDIAGACTTSGLSYKMKGRVGDSAIIGSGLFLDNEIGGAVATGMGEEIMKTVGSFLIVELMRQGKTPQEACDEAVKRVIERNPNYKNFQVAYIALDKQGNTGGACIHKGFTYEKYENEENTRVQPSHILND

SEQ ID NO: 36413 - DNA, 1032 bp, Pseudoalteromonas tunicata D2
  CDS (1)..(1032): transl_table=11
atgaagcaattattatccgtgggtgcgttatccttcgctttatttagccaagccttacaggcacaagcagaagtaccttttgcgattgcgattcatggtggtgcgggcacgatagctaaaagtcgtttcactccagaacaagaacaagcctatcgcgttacattacgccaagccgtcgaagcgggccatgcggttttagcaaaaggtggtcaaagtcttgatgccattaccacggctattaatgtattagaaaactcccctttttttaatgcaggaaaaggggcggtgtacacctatgatgggcagcacgaactggatgcgtccattatggaaggaaagtcgcgtcaagcaggtgccgttgctggggttaagcgcatcgaaaatccaattaatttagcgcgtttggtgatggaaaaatcagtccatgtcatgttggcagctgaaggggcagagcagtttgcccaaactcaaggtgtgccactggtcgacaataccctctttgatacaaaagagcgttatgaggctttgctcaaagccaaagaaaaactcgaaaaagctactaaccacactaaagattatcaagctgcgcatcaagcgttacctagtgaatataaaatgggcactgtgggtgcggtggcgttagatcaatttggcaatattgcagctggcacgtcaaccggaggcatgacagctaaacggtttggtcgtattggtgatgcgccgattattggtgccggcacctttgctgataatcaatcgtgcgcagtgtcagcaacaggtcatggtgaattttttattcgttataatgttgcggcagatatttgtgctcgggtgcaataccaaggcaaaaccatcgagcaagcgggtaaagaggtgatttttggcccgatgtttcaagctggtggtacgggcggtgtgataattatcgaccctaaaggcaatattagcatgccgtttaatacctcaggcatgtatcgcgccagcaaatctaatttatcacctacttatgtgggtatctttgcagacgaataa

SEQ ID NO: 36414 - protein, 343 aa, Pseudoalteromonas tunicata D2
MKQLLSVGALSFALFSQALQAQAEVPFAIAIHGGAGTIAKSRFTPEQEQAYRVTLRQAVEAGHAVLAKGGQSLDAITTAINVLENSPFFNAGKGAVYTYDGQHELDASIMEGKSRQAGAVAGVKRIENPINLARLVMEKSVHVMLAAEGAEQFAQTQGVPLVDNTLFDTKERYEALLKAKEKLEKATNHTKDYQAAHQALPSEYKMGTVGAVALDQFGNIAAGTSTGGMTAKRFGRIGDAPIIGAGTFADNQSCAVSATGHGEFFIRYNVAADICARVQYQGKTIEQAGKEVIFGPMFQAGGTGGVIIIDPKGNISMPFNTSGMYRASKSNLSPTYVGIFADE

SEQ ID NO: 36415 - DNA, 1080 bp, Flavobacteria bacterium BBFL7
  CDS (1)..(1080): transl_table=11
atgaaaaaactatttcttttaattgtacttattgccatcgtagcttgccaagaaacagtgaaagagtctgtagatgttatggtgccagagactcaagatcaaactagtgaatttgcgatagtgattcatggtggtgcaggaacgattaaaaaagagaacatgacaccagagctggaaaagcagtatagcgataagctcactgaagcagtgaaagccggacatgatattcttaaaaatggaggcgatgctatggacgctgttgaggcgagcatacgcatcatggaggactcgccgttattcaactctggaaaaggagcggtatttacacacgatggtatcaactcactggatgcgagctttatggatggaaaaacgctcaatgctggtgcggtcgcaggtatcactacggttaaaaaccctatatcactagcccgtaaagtgatgacagattctgaacatgtattactaagtggtagtggtggagatgctttcgcgaaagcgttacaagatcccaacatagagattgtacctaacagttatttctatacagagaaccgttaccagtccttgcaacgtgttctaaaaagagaagccgaaaaggatgcgcaaaaccatgaaaaagtagctcagttggaacttgaagacccatttatcaaagattctaaatacggaaccgtaggttgtgtagcgctagataaaaatggcaatatagctgccggaaccagtactggcggaatgaccaacaagaaatatggccgcataggcgattcacccattataggtagcggtacttatgcaaacaatgccacttatggtgtgagtagtacaggacatggtgagtattttatacgagctcaagtcgcttatgatataagcgcactcatggaatataaaggcatgaccttagagcaagcgactgaagaagtcatccagaaaaagctcatcgatttaggcggtactggtggaatcgtagctttagatcacttaggaaacgtgtctatggaattcaacaccgcaggaatgtatcgtgcgactatgaatgatcaagatgagcttgtggttgggatgtgtaaggagtaa

SEQ ID NO: 36416 - protein, 359 aa, Flavobacteria bacterium BBFL7
MKKLFLLIVLIAIVACQETVKESVDVMVPETQDQTSEFAIVIHGGAGTIKKENMTPELEKQYSDKLTEAVKAGHDILKNGGDAMDAVEASIRIMEDSPLFNSGKGAVFTHDGINSLDASFMDGKTLNAGAVAGITTVKNPISLARKVMTDSEHVLLSGSGGDAFAKALQDPNIEIVPNSYFYTENRYQSLQRVLKREAEKDAQNHEKVAQLELEDPFIKDSKYGTVGCVALDKNGNIAAGTSTGGMTNKKYGRIGDSPIIGSGTYANNATYGVSSTGHGEYFIRAQVAYDISALMEYKGMTLEQATEEVIQKKLIDLGGTGGIVALDHLGNVSMEFNTAGMYRATMNDQDELVVGMCKE

SEQ ID NO: 36417 - DNA, 954 bp, Vibrio sp. Ex25
  CDS (1)..(954): transl_table=11
atggaaaaagcgatgacaaaacctttctcgattgcgattcatggtggcgcaggcaccattttacgtgaacagatgagcaatgaacttcagcaatccatcttggctgatttggaagcgtcggtaaaagctggctatcaaattctagagaaaggcggcgacgctttggatgcggttgttgctgcagtaaaagtattggaagactcgcctaactttaatgcgggtaaaggctcggtgctgaccaacaacgaaatggtagaaatggatgcctctgtcatggatggtcgaaaccaagccgcaggcgcggtcgctggtgttcgtcatatcaagaatccaattgagctcgctcgtgacgtaatgcgaaacagcaatcacgtgttgttggtgggtgagggcgcagagaagtttgcttttgaacaaggccatgagtataccgaacaggattacttctttactgatcgccgttatgagcagttgctgtctatgcgtgagaaagggctgtttgctttgtcggaatctcgctacccagatgatcgtaaacatggcaccgtcggagccgtagcgttggaccaacaaggcaacttagccgctgcaaccagcacgggtggcgtaacgaataagcaatacaatcgagttggggattcggctttgataggttgcggcacggtggccgaaaatggcgtcgtcgcggtttcgactacgggtgtcggtgagttttttatccgtaaacgtgtcgcagaagacgtcgccgcgcggatgcgttatttacaagaagatgttcatactgcttgtgagcatattattcagggggaactgaaagagatgggcggcgaaggcggcttaatcgcaattgacgcgcaaggtgagctgcactttgcgatgaacagctctggtatgtaccgagctggcatcaacactcaaggcgagttgagcgtcaaaatctacgctgacgaatag

SEQ ID NO: 36418 - protein, 317 aa, Vibrio sp. Ex25
MEKAMTKPFSIAIHGGAGTILREQMSNELQQSILADLEASVKAGYQILEKGGDALDAVVAAVKVLEDSPNFNAGKGSVLTNNEMVEMDASVMDGRNQAAGAVAGVRHIKNPIELARDVMRNSNHVLLVGEGAEKFAFEQGHEYTEQDYFFTDRRYEQLLSMREKGLFALSESRYPDDRKHGTVGAVALDQQGNLAAATSTGGVTNKQYNRVGDSALIGCGTVAENGVVAVSTTGVGEFFIRKRVAEDVAARMRYLQEDVHTACEHIIQGELKEMGGEGGLIAIDAQGELHFAMNSSGMYRAGINTQGELSVKIYADE

SEQ ID NO: 36419 - DNA, 1035 bp, Alteromonadales bacterium TW-7
  CDS (1)..(1035): transl_table=11
atgaaaaaaataatcttattatctattttagccagtgcgagcatagggtttagtcacagtgtactaagtgaagaatctcggcttgccattgccattcatggtggcgcaggaacaatagataaagcaaaattttcacctgagcaagaaaaagcctatcgtgctaaattatccgaagctgttgaagcaggttacagcgtacttgaaaaaggcggggaaagcttagatgcggtgactgctgcaattacagtattagaaaagtctgagttttttaatgcagggcgcggtgcagtatatacatatgacggtgggcatgaactcgacgcatcaattatggacgggcgtaaccgccaagctggggctgttgcaggtgtaaaacatgtagagagcccaattaaacttgctcgtttagttatggataactcagtgcacgttttgctcagtgggcaaggtgctgaggaatttgcaaaagagcaaggtattgaacttatcgaaaataacatatttgatactaaacatcgttacgatgctctgcttaaagcaaaagataagctcgataaagccaaagcaacaactaagtcatatcaggctgcacacaatgcactaccagataactttaaaatgggcactgttggcgctgttgcccttgataaaaatggtaatttagctgcaggcacatcaaccggtggaatgacggcaaagcgctacggccgtgttggagatgctcctgttataggtgctggtacgtttgctgagaatgagtcatgtgcggtatcagcaaccggccatggtgaatattttattcgctacaacgtggcaagtgatatttgcgctcgtgttaaataccaaggcagtacaatcgcccaagccggtgatgaagtaataaacaaggtattaaagccaataggtggtacaggcggtgttattattatcgacacgcagggcaatattagtttaccgtttaacacgtcgggaatgtatcgcgcgagtaaatcgaatacgcaagcaacttatgtaggcatttttaaaggcgaatag

SEQ ID NO: 36420 - protein, 344 aa, Alteromonadales bacterium TW-7
MKKIILLSILASASIGFSHSVLSEESRLAIAIHGGAGTIDKAKFSPEQEKAYRAKLSEAVEAGYSVLEKGGESLDAVTAAITVLEKSEFFNAGRGAVYTYDGGHELDASIMDGRNRQAGAVAGVKHVESPIKLARLVMDNSVHVLLSGQGAEEFAKEQGIELIENNIFDTKHRYDALLKAKDKLDKAKATTKSYQAAHNALPDNFKMGTVGAVALDKNGNLAAGTSTGGMTAKRYGRVGDAPVIGAGTFAENESCAVSATGHGEYFIRYNVASDICARVKYQGSTIAQAGDEVINKVLKPIGGTGGVIIIDTQGNISLPFNTSGMYRASKSNTQATYVGIFKGE

SEQ ID NO: 36421 - DNA, 1029 bp, marine gamma proteobacterium HTCC2080
  CDS (1)..(1029): transl_table=11
atgttttgcatgcgacggctattgttattgtgtctgctgggtttcgtgcccgcgacgcttgctgaccccattgcaatcgcaattcatgggggcgcgggtacgctaactcgcgactcaataactttagaacaggaaagcagttacctggcaatactcaatacggctgtgcagcagggctatgagcgattgcgcgatggcgccgatggatcagatgttgtgcgagaaactattcggttattggagaattctcctctttttaacgcagggcacggagccgttctaacatgggatggtacccacgagctcgacgcatccatgatgctgggacaaagtctggaagcgggtgccgttgcaggcgtgactcgtgtaaaaaaccctattgaagcggcttatgccgtgctgacacattcgcctcatgttctattgtcgggatctggcgccgacagatttgccgagcagcaggggctgactatggtcgagaacagttatttttcaacgcctaggcgagtagaggctctaaaattatttcgacttaaacataatgataaaagcgctcagggtggtgacgaaaaatttggtactgtcggagtagtcgtcttggatgctgctggaaacttggcagctggaacatctaccggtggcatgacgggaaagcgttggggaaggattggtgactctccactgatcggatcggggacttatgccgataatcgtagttgcgcagtatcggccacagggcatggcgagttttttattcgctggcaggtggccagcgatatttgcgcgcgtgttaggtaccagggccttgatttagaggtggcggcgaacgaagttattcatgaggaacttgcagaagtagggggcgagggtggcgttattgccattgatccagctgggaatgttgccctgatttttaataccgaaggcatgtatcgcgccagtatcaataggaagggtgaaaaggtgataggtatttttcgtgaagacgataatacagtgattaacggacagggtttgagcgatgggtga

SEQ ID NO: 36422 - protein, 342 aa, marine gamma proteobacterium HTCC2080
MFCMRRLLLLCLLGFVPATLADPIAIAIHGGAGTLTRDSITLEQESSYLAILNTAVQQGYERLRDGADGSDVVRETIRLLENSPLFNAGHGAVLTWDGTHELDASMMLGQSLEAGAVAGVTRVKNPIEAAYAVLTHSPHVLLSGSGADRFAEQQGLTMVENSYFSTPRRVEALKLFRLKHNDKSAQGGDEKFGTVGVVVLDAAGNLAAGTSTGGMTGKRWGRIGDSPLIGSGTYADNRSCAVSATGHGEFFIRWQVASDICARVRYQGLDLEVAANEVIHEELAEVGGEGGVIAIDPAGNVALIFNTEGMYRASINRKGEKVIGIFREDDNTVINGQGLSDG

SEQ ID NO: 36423 - DNA, 966 bp, Escherichia coli B
  CDS (1)..(966): transl_table=11
atgggcaaagcagtcattgcaattcatggtggcgcaggtgcaattagccgcgcgcagatgagtctgcaacaggaattacgctacattgaggcgttgtctgccattgttgaaaccgggcagaaaatgctggaagcgggcgaaagtgcgctggatgtggtgacggaagcggtgcgtctgctggaagagtgtccactgtttaacgccggaattggcgctgtctttacgcgtgatgaaacccatgaactggacgccagtgtgatggatggtaacaccctgaaagccggtgcggtggcgggcgttagtcatctgcgtaatccggttcttgccgcccggctggtgatggagcaaagcccgcatgtgatgatgattggcgaaggggcagaaaattttgcgtttgctcatggcatggagcgcgtctcaccggagattttctccacgcctttgcgttatgaacaactactggcagcgcgcgaggaaggggcaacagtcctcgaccatagcggtgcgccactggatgaaaaacagaaaatgggcaccgtgggggccgtggcgttggatttagacggcaatctggcggcagccacgtccacaggcggaatgaccaataaattacccggacgagttggcgatagtcccttagtgggtgccggatgctacgccaataacgccagtgtggcggtttcttgtaccggcacgggcgaagtcttcatccgcgcgctggcggcatatgacatcgccgcgttaatggattacggcggattaagtctcgcggaagcctgcgagcgggtagtaatggaaaaactccctgcgcttggcggtagcggtggcttaatcgctatcgaccatgaagggaatgtcgcgctaccgtttaacaccgaaggaatgtatcgcgcctggggctacgcaggcgatacgccaaccaccggtatctaccgtgaaaaaggggacaccgttgccacacagtga

SEQ ID NO: 36424 - protein, 321 aa, Escherichia coli B
MGKAVIAIHGGAGAISRAQMSLQQELRYIEALSAIVETGQKMLEAGESALDVVTEAVRLLEECPLFNAGIGAVFTRDETHELDASVMDGNTLKAGAVAGVSHLRNPVLAARLVMEQSPHVMMIGEGAENFAFAHGMERVSPEIFSTPLRYEQLLAAREEGATVLDHSGAPLDEKQKMGTVGAVALDLDGNLAAATSTGGMTNKLPGRVGDSPLVGAGCYANNASVAVSCTGTGEVFIRALAAYDIAALMDYGGLSLAEACERVVMEKLPALGGSGGLIAIDHEGNVALPFNTEGMYRAWGYAGDTPTTGIYREKGDTVATQ

SEQ ID NO: 36425 - DNA, 1173 bp, Streptomyces clavuligerus
  CDS (1)..(1173): transl_table=11
atgccccaccgccccgccaccgcctggctggcgtcctccctgctcgccgccgcggtgctgacgaccacgctcatcgtcgtacccggggcctcgggcggccatggacccaccgcggcggcccacacgacgcaacagaagcaggagcagcaggcgcgggaggagaagaaggaacgggggagcgcgccggggaagccccggccggacgcccgtgacgtggtcatcgccgtccacggcggggccggagccgccctggaccgggagacgaccggcccggaacgggagaaggcgtaccgggacgggctcgccgcagcgctccgcgccggacagcgggtgctcgcgcgcggcggggacagcctggacgcggtcgaggccgccgtccgcgaactggaggacaacccgctgttcaacgcgggcaagggcgccgtcttcaccgccgacgccgggcatgagctggacgcctccgtgatgcggggctccgatctgaaggcgggagcggtcgccggggtcacctccctgcgcaacccggtcgagggcgcccggctggtgctggagaagtcgaagcacgtcctcctctccggcgagggcgccgacgacttcggcgcccggcacgggctgcgcaccgtcacccaggactactactggacccaggcccgctgggacgcgctgctgcgcgcgaaggagaccgaggcgggcgatcccgccgcccggagggccccggaggcactggccgacgcgcagtcgacggggacggtgggcgcggtggccctcgaccggcgcggcgatctcgcggcggccacctccaccggcgggctcaccaacaagctccccggccggatcggcgactccccgctgatcggggccgggacctacgccgacaaccggaccgtcgccgcgagcgccaccggcgccggtgaggtgttcatccggggcgcggcgacctcgaccctctcccatctgatcgagttcaaggggctcggcgtggcgtccgccgcttacgaggtgatcgtcaagcgcctgccccggctcggcgggcagggcggcgtgatcgccctcgacccccggggcgacttcgacgcgccgcacagcagccccgggatgctgcacggctatctgaccgaggacgggaccgtcgtcacaaagatcttcccggacgagtcccccgccaacacctga

SEQ ID NO: 36426 - protein, 390 aa, Streptomyces clavuligerus
MPHRPATAWLASSLLAAAVLTTTLIVVPGASGGHGPTAAAHTTQQKQEQQAREEKKERGSAPGKPRPDARDVVIAVHGGAGAALDRETTGPEREKAYRDGLAAALRAGQRVLARGGDSLDAVEAAVRELEDNPLFNAGKGAVFTADAGHELDASVMRGSDLKAGAVAGVTSLRNPVEGARLVLEKSKHVLLSGEGADDFGARHGLRTVTQDYYWTQARWDALLRAKETEAGDPAARRAPEALADAQSTGTVGAVALDRRGDLAAATSTGGLTNKLPGRIGDSPLIGAGTYADNRTVAASATGAGEVFIRGAATSTLSHLIEFKGLGVASAAYEVIVKRLPRLGGQGGVIALDPRGDFDAPHSSPGMLHGYLTEDGTVVTKIFPDESPANT

SEQ ID NO: 36427 - DNA, 1002 bp, Oryza sativa
  CDS (1)..(1002)
atggcgaggtgggccattgcgatccacggcggcgccggggtggacccgaacctgccggagcacaggcaggaggaggcgaagcgcgtgctggcgcggtgcctgcaggtgggcgtggacgcgctgcgctccggcgcggcggcgctggacgtcgtggaggccgtggtgcgggagctggagagcgaccccttcttcaactccgggaggggctccgcgctcacccgcctcggcaccgtcgagatggaggccagcatcatggacggccgcggccgccgctgcggcgccgtctccggcgtctccaccgtcaagaaccccgtctccctcgcccgcctcgtcatggacaagtccccccactcctacctcgccttcgacggcgccgagcagttcgcgcgcgaccagggtctagaggtcgtcgacaacagctacttcatcaccgaggacaacgtcggcatgctgaagctcgccaaggaggccaacagcatcttgtttgactaccgtatcccgctgtccgggtcggagacgtgcggcgcgcaggccgtgtcgtcggacaacagccacggcaacggcatggtgatgaacggcctccccatcagcatctacgcgccagagacggtggggtgcgcggtggtggactccagcggccacaccgcggcggccacgtccacgggcgggctgatgaacaagatgacggggcgcatcggcgactcgccgctgatcgggtcagggacctacgcgtgcggcgcgtgcgcggtgtcgtgcacgggggaaggcgaggccatcatccgctccacgctagcgcgcgacgtcgccgccgtgatggagtacaggggcgccgggctgcaggaggccgtcgactactgcgtcaaggagcggctcgacgaagggttcgcggggctcatcgccgtgtccagcacgggcgaggtggcgtacggcttcaactgcaccggcatgttcagggggtgcgccaccgaggacggattcatggaggtcggcatctgggagtga

SEQ ID NO: 36428 - protein, 333 aa, Oryza sativa
MARWAIAIHGGAGVDPNLPEHRQEEAKRVLARCLQVGVDALRSGAAALDVVEAVVRELESDPFFNSGRGSALTRLGTVEMEASIMDGRGRRCGAVSGVSTVKNPVSLARLVMDKSPHSYLAFDGAEQFARDQGLEVVDNSYFITEDNVGMLKLAKEANSILFDYRIPLSGSETCGAQAVSSDNSHGNGMVMNGLPISIYAPETVGCAVVDSSGHTAAATSTGGLMNKMTGRIGDSPLIGSGTYACGACAVSCTGEGEAIIRSTLARDVAAVMEYRGAGLQEAVDYCVKERLDEGFAGLIAVSSTGEVAYGFNCTGMFRGCATEDGFMEVGIWE

SEQ ID NO: 36429 - DNA, 1128 bp, Pinus sylvestris
  CDS (1)..(1128)
atggggtgggccatagctgtgcatgggggtgcaggagttgatccatgcttgccaatggagcgccaacaggaagccaaggacctgctcttgcattgtcttaatttgggagtctctgctcttaaggcctctgttcccgccattgacgttgttgagctcctggtaagggagcttgagaccaacccagttttcaattcaggtcgtggttcagcattgtctgcaaaaggcacagtagaaatggaagcaagcattatggatggtttcagaaataaatgtggagcagtttctggtctttctactgttaaaaatcctatttcccttgctcgacttgtcatggaaaggtctccacatgtctaccttgcttttaatggggctgaagaatttgccagagcacagggagttgaaattgtggacacaagctatttcattactgcagaaaataaagagcgattggagcaagcaaagagtgtaaacagcatacagtttgactaccgtctcccagaatctgacgatgctgttggaaaaccaaatgaaaatgggttattgcctacagtgaaaattcatgcaaagggaatagtagcatttgacaagatccttcagaatggagaactgtctcaaaaagaattgtcacctttagaaagttgtatgcaaaatggggataaaatggcttgcagaaaaggaatgttaccggagtttcaaatgaatggagcacctatcaacatatatgagccagaaactgtgggttgtgttgttgttgacagtgagggacattgtgcatcagcaacttcaacagggggtttgataaacaaaatgtcaggtagaattggcgactctccaataataggggcaggcacttatgccaatgggctgtgtgctgtttcagctacaggtgaaggtgaagccataatccgagccactgtgggtagagatgtagctgctcttatggaatacaaagggttatctcttcaggaatctgttgattttgttattaataagaggttggaagatggtaagggtggccttatagctgtgtccagtaatggagacgttgctgcaggattcaacacttcgggaatgttcagagcctgtgctacagaggaaggctattttgaagtaggcatttggcagtag

SEQ ID NO: 36430 - protein, 375 aa, Pinus sylvestris
MGWAIAVHGGAGVDPCLPMERQQEAKDLLLHCLNLGVSALKASVPAIDVVELLVRELETNPVFNSGRGSALSAKGTVEMEASIMDGFRNKCGAVSGLSTVKNPISLARLVMERSPHVYLAFNGAEEFARAQGVEIVDTSYFITAENKERLEQAKSVNSIQFDYRLPESDDAVGKPNENGLLPTVKIHAKGIVAFDKILQNGELSQKELSPLESCMQNGDKMACRKGMLPEFQMNGAPINIYEPETVGCVVVDSEGHCASATSTGGLINKMSGRIGDSPIIGAGTYANGLCAVSATGEGEAIIRATVGRDVAALMEYKGLSLQESVDFVINKRLEDGKGGLIAVSSNGDVAAGFNTSGMFRACATEEGYFEVGIWQ

SEQ ID NO: 36431 - DNA, 978 bp, Medicago truncatula
  CDS (1)..(978)
atgggtggttgggcaattgctgtgcatggtggtgctggtgttgaccctaatctccctcttcaacgtcaagaagaagccaaacaacttcttactcgtgttctcaatcttggcatctctgctcttcgttccaatctttctgccatcgatgttgttgaacttgtggtgagggaattggaaacggatccactattcaattcgggtcgtggatctgccctgacggaaaaaggaacggtggaaatggaggctagcataatggatggaccaaaaagacgatgcggtgccgtttcaggtttaaccacggtaaaaaatccaatttcactggctcgtttagtcatggataaatctcctcattcctatcttgcttttaacggcgctgaagattttgctaggcaacagggtgtggaggttttggacaatgagtactttatcactgctgacaatgttggtatgcttaagctggcaaaggaagcaaatacaatcttgtttgattatcggattccatctggatacgaaacatgtggtgcagcagttgaaagtccaatgaaaatgaatggacttccaatgagtgtctacgcacctgaaacagtcgggtgcgtagtggtggaccgtgaaggaagatgtgctgctgccacgtcaacaggcgggctaatgaacaagatgattggtcggattggtgactcacctttgataggagctgggacctacgcgtgtaacctagctggcgtatcatgcaccggtgaaggcgaggctatcatacgtggcactttggcgcgtgaggtgtcggctgtgatggaatacaaaggtcttggtcttcaagaagcagtggatttcgtcattaagaatcgtttggatgaaggatatgctggactcattgctgtttctagtaaaggagaagttgcttatggatttaactgcaatggcatgtttaggggttgtgcttctgaggatggattcatggaggttggaatttgggagtaa

SEQ ID NO: 36432 - protein, 325 aa, Medicago truncatula
MGGWAIAVHGGAGVDPNLPLQRQEEAKQLLTRVLNLGISALRSNLSAIDVVELVVRELETDPLFNSGRGSALTEKGTVEMEASIMDGPKRRCGAVSGLTTVKNPISLARLVMDKSPHSYLAFNGAEDFARQQGVEVLDNEYFITADNVGMLKLAKEANTILFDYRIPSGYETCGAAVESPMKMNGLPMSVYAPETVGCVVVDREGRCAAATSTGGLMNKMIGRIGDSPLIGAGTYACNLAGVSCTGEGEAIIRGTLAREVSAVMEYKGLGLQEAVDFVIKNRLDEGYAGLIAVSSKGEVAYGFNCNGMFRGCASEDGFMEVGIWE

SEQ ID NO: 36433 - DNA, 981 bp, Phaseolus vulgaris
  CDS (1)..(981)
atggggggttgggctatagcggtgcatggtggcgctggtgtggatcctaatctcccaccacagcgtcaggagcaagccaaacaactccttactcgttgcctcaatcttggcatctcttcccttcgttccaatgcttccgccctcgacgtcgtcgaacttgtcgtacgggaactggaaacggatcccctgtttaactcgggtcgaggatccgccctgactgacaagggaacagtggaaatggaggcaagcatcatggacggttccaatagacgatgcggcgccgtttcgggcctcaccaccgtcaaaaaccccgtctcactcgctcgccttgtcatggacaagtctccacattcctacctcgcctttaacggcgctgaagaattcgccagacaacagggtgtggatgtggtggagaacgaatatttcgtcactcctgaaaatgtcgggatgctgaaactagcaaaggaggcaaacacaatcctgtttgattatcggattccaacggttggatacgacagttgcggtgcgggggctgagagtccgctgcagatgaatggactgccaataagcgtgtacgcgccggagacggtggggtgcgtggtggtggacaaggaggggaggtgtgcggctgcgacgtcgacagggggtttgatgaacaagatgagtggaaggatcggtgactcacctctgataggagcagggacttacgcgtgtggagtgtgtggggtttcgtgcacgggcgaaggggaggctatcatacgtggcacgctggcgcgtgaggtggcagcagtgatggaatacaagggactgcaactgcaggaggctgtggactttgtgatcaaccaccgcctggatgaagggaaggcagggctgatagctgtctcaaatactggtgaggttgcttatggcttcaactgtaacgccatgttcaggggctgcgccaccgaggatggattcatggtggttggaatctgggaataa

SEQ ID NO: 36434 - protein, 326 aa, Phaseolus vulgaris
MGGWAIAVHGGAGVDPNLPPQRQEQAKQLLTRCLNLGISSLRSNASALDVVELVVRELETDPLFNSGRGSALTDKGTVEMEASIMDGSNRRCGAVSGLTTVKNPVSLARLVMDKSPHSYLAFNGAEEFARQQGVDVVENEYFVTPENVGMLKLAKEANTILFDYRIPTVGYDSCGAGAESPLQMNGLPISVYAPETVGCVVVDKEGRCAAATSTGGLMNKMSGRIGDSPLIGAGTYACGVCGVSCTGEGEAIIRGTLAREVAAVMEYKGLQLQEAVDFVINHRLDEGKAGLIAVSNTGEVAYGFNCNAMFRGCATEDGFMVVGIWE

SEQ ID NO: 36435 - DNA, 1002 bp, Oryza sativa subsp
  CDS (1)..(1002)
atggcgaggtgggccattgcgatccacggcggcgccggggtggacccgaacctgccggagcacaggcaggaggaggcgaagcgcgtgctggcgcggtgcctgcaggtgggcgtggacgcgctgcgctccggcgcggcggcgctggacgtcgtggaggccgtggtgcgggagctggagagcgaccccttcttcaactccgggaggggctccgcgctcacccgcctcggcaccgtcgagatggaggccagcatcatggacggccgcggccgccgctgcggcgccgtctccggcgtctccaccgtcaagaaccccgtctccctcgcccgcctcgtcatggacaagtccccccactcctacctcgccttcgacggcgccgagcagttcgcgcgcgaccagggtctagaggtcgtcgacaacagctacttcatcaccgaggacaacgtcggcatgctgaagctcgccaaggaggccaacagcatcttgtttgactaccgtatcccgctgtccgggtcggagacgtgcggcgcacaggccgtgtcgtcggacaacagccacggcaacggcatggtgatgaacggcctccccatcagcatctacgcgccagagacggtggggtgcgcggtggtggactccagcggccacaccgcggcggccacgtccacgggcgggctgatgaataagatgacggggcgcatcggcgactcgccgctgatcgggtcggggacctacgcgtgcggcgcgtgcgcggtgtcgtgcacgggggaaggcgaggccatcatccgctccacgctcgcgcgcgacgtcgccgccgtgatggagtacaggggcgccgggctgcaggaggccgtcgactactgcgtcaagaagcggctcgacgaagggttcgcggggctcatcgccgtgtccagcacgggcgaggtggcgtacgggttcaactgcaccggcatgttcagagggtgcgccaccgaggacggattcatggaggtcggcatctgggagtga

SEQ ID NO: 36436 - protein, 333 aa, Oryza sativa subsp
MARWAIAIHGGAGVDPNLPEHRQEEAKRVLARCLQVGVDALRSGAAALDVVEAVVRELESDPFFNSGRGSALTRLGTVEMEASIMDGRGRRCGAVSGVSTVKNPVSLARLVMDKSPHSYLAFDGAEQFARDQGLEVVDNSYFITEDNVGMLKLAKEANSILFDYRIPLSGSETCGAQAVSSDNSHGNGMVMNGLPISIYAPETVGCAVVDSSGHTAAATSTGGLMNKMTGRIGDSPLIGSGTYACGACAVSCTGEGEAIIRSTLARDVAAVMEYRGAGLQEAVDYCVKKRLDEGFAGLIAVSSTGEVAYGFNCTGMFRGCATEDGFMEVGIWE

SEQ ID NO: 36437 - DNA, 1010 bp, Glycine max
  CDS (7)..(984)
gtgattatgggcggttgggctatagctgtgcatggtggcgctggtgtcgaccctaatctcccactcgagcgccaagaagaagcgaaacaacttctcacgcgctgtctcaatcttggaatctctgctctaaattctaatcttcccgccatagatgtcgtcgaacttgtggtgagggaattggaaacggatccgctgttcaattcgggccgtggatctgccctgacagaaaaaggaacggtggagatggaggctagcatcatggatggtccaaaacgacgatgcggcgccgtttcgggtcttaccaccgttaagaacccgatctcgcttgctcgtttggttatggacaaatccccgcattcctacctcgccttctccggcgccgaagaatttgctagacaacagggtgtggaggttgtggacaacgagtactttatcacacctgacaacgttggcatgctcaagctggcaaaggaagcgaacacaatcctgtttgattaccgaatcccaacatcggggtacgagacgtgcggatccggtgtggagagtccactgcaaatgaatggactcccaataagcgtgtacgcgcccgaaaccgttgggtgcgtggtggttgaccgggagggccggtgcgcggcagcaacatccacgggagggctgatgaacaaaatgaccgggcgcatcggtgattcgccgctgataggcgccgggacctacgcgtgcgacgtgtgcggcgtatcgtgcacgggtgaaggcgaggccatcatacgttggctggcgcgtgaggtggcagcggtgatggaatacaaaggcttgaagcttcaagaagccgtggattttgtgatcaagcaccgtctcgatgaagggatggctggtctcattgctgtgtccaacgctggggaagtggcttatggtttcaattgcaatggcatgtttaggggctgtgccactgaaaatggcttcatggaggttggaatctgggaataggttcatttatttggttcatggttgtt

SEQ ID NO: 36438 - protein, 325 aa, Glycine max
MGGWAIAVHGGAGVDPNLPLERQEEAKQLLTRCLNLGISALNSNLPAIDVVELVVRELETDPLFNSGRGSALTEKGTVEMEASIMDGPKRRCGAVSGLTTVKNPISLARLVMDKSPHSYLAFSGAEEFARQQGVEVVDNEYFITPDNVGMLKLAKEANTILFDYRIPTSGYETCGSGVESPLQMNGLPISVYAPETVGCVVVDREGRCAAATSTGGLMNKMTGRIGDSPLIGAGTYACDVCGVSCTGEGEAIIRWLAREVAAVMEYKGLKLQEAVDFVIKHRLDEGMAGLIAVSNAGEVAYGFNCNGMFRGCATENGFMEVGIWE

SEQ ID NO: 36439 - DNA, 981 bp, Glycine max
  CDS (1)..(981)
atgggagggtgggctatcgcggtgcatggtggcgctggtgtcgaccctaatctcccactcgagcaccaagaagaagcgaaacaacttctcacgcgctgtctcaatcttggaatctctgctctaaattctaatcttcccgccatagatgtcgtcgaacttgtggtgagggaattggaaacggatccgctgttcaattcgggccgtggatctgccctgacagaaaaaggaacggtggagatggaggctagcatcatggatggtccaaaacgacgatgcggcgccgtttcgggtcttaccaccgttaagaacccgatctcgcttgctcgtttggttatggacaaatccccgcattcctacctcgccttttccggcgccgaagaatttgctaggcaacagggtgtggaggttgtggacaacgagtactttatcacacctgacaacgttggcatgctcaagctggcaaaggaagcaaacacaatcctgtttgattaccgaatcccaacatcggggtacgaaacgtgcggatccggtgtggagagtccactgcaaatgaatggactcccaataagcgtgtacgcgcccgaacccgttgggggcgtggtggttgaccggaagggccggtgcgcggcagcaacatccacgggagggctgatgaacaaaatgaccgggcgcatcggtgattcgccgctgataggcgccgggacctacgcgtgcgacgtgtgcggcgtatcgtgcacgggtgaaggcgaggccatcatacgtggcacgctggcgcgtgaggtggcagcggtgatggaatacaaaggcttgaagcttcaagaagccgtggattttgtgatcaagcaccgtctcgatgaagggatggctggtctcattgctgtgtccaacgctggggaagtggcttatggtttcaattgcaatggcatgtttaggggctgtgccactgaaaatggcttcatggaggtcggaatctgggaatag

SEQ ID NO: 36440 - protein, 326 aa, Glycine max
MGGWAIAVHGGAGVDPNLPLEHQEEAKQLLTRCLNLGISALNSNLPAIDVVELVVRELETDPLFNSGRGSALTEKGTVEMEASIMDGPKRRCGAVSGLTTVKNPISLARLVMDKSPHSYLAFSGAEEFARQQGVEVVDNEYFITPDNVGMLKLAKEANTILFDYRIPTSGYETCGSGVESPLQMNGLPISVYAPEPVGGVVVDRKGRCAAATSTGGLMNKMTGRIGDSPLIGAGTYACDVCGVSCTGEGEAIIRGTLAREVAAVMEYKGLKLQEAVDFVIKHRLDEGMAGLIAVSNAGEVAYGFNCNGMFRGCATENGFMEVGIWE

SEQ ID NO: 36441 - DNA, 957 bp, Xanthomonas axonopodis pv
  CDS (1)..(957): transl_table=11
atgcggccgatggcggtgccgcgtggcgcggcgcgggtgatctccacctgggatttcggcgtcgccgccaatcaggaagcctggaagattctcagcagcggcggtattgcgctggatgcggtggaggccggcgtgcgtgtgccggaagcggacccgaacaatcccaccgtcggcctgggcggttatccggaccgcgatggccgggtaacgctggacgcctgcatcatggatcacctgggcaattgtggcgcggtggcatcgctggaagacgtggtgcacgccatttcggtggcacgtgcggtgatggagaaaaccccgcacgtgatgttggtgggcgacggcgcgcgtcaattcgccttcgaacagggttttccgaaaaccaagctgttgactccaagctcggaagcggcctggaaagagtggttgaagagctccaagtattcgcccgaagccaatgtcgaaaatcgcgcctggcgagatgccaagttgcccggcggcaaggacaatcacgacaccatcggcatgctggcgctggatacgcacggcaatctatccggtgcatgcaccaccagcggcatggcgtggaagatgcacggccgcgtgggcgacagcccgatcatcggcgcgggcctgtacgtggacaacgacgtgggcggggcgacctcgacgggtgtgggcgaggaggtgatccgcaacgtcggcagttttgcggtggtggaaatgatgcggcagggcaaatcgcccgccgatgcctgccgcgaggtggtgatgcggctgatccgtcgcaagccggagctgacgcgcacattgcaggtcggctttctggcaatgaacaagcgcggcgaagtgggagcgttcgcgatccagaagggcttcagttacgcggtgtgcgacgcgcagcggcaggatctgctggtgcctggcgagagccattacaccagcgagccggcagcatga

SEQ ID NO: 36442 - protein, 318 aa, Xanthomonas axonopodis pv
MRPMAVPRGAARVISTWDFGVAANQEAWKILSSGGIALDAVEAGVRVPEADPNNPTVGLGGYPDRDGRVTLDACIMDHLGNCGAVASLEDVVHAISVARAVMEKTPHVMLVGDGARQFAFEQGFPKTKLLTPSSEAAWKEWLKSSKYSPEANVENRAWRDAKLPGGKDNHDTIGMLALDTHGNLSGACTTSGMAWKMHGRVGDSPIIGAGLYVDNDVGGATSTGVGEEVIRNVGSFAVVEMMRQGKSPADACREVVMRLIRRKPELTRTLQVGFLAMNKRGEVGAFAIQKGFSYAVCDAQRQDLLVPGESHYTSEPAA

SEQ ID NO: 36443 - DNA, 1002 bp, Hordeum vulgare
  CDS (1)..(1002)
atggcgcgctgggccattgccatccacggcggcgcgggcgtggacccgaacctgccggagcacaggcaggaggaggccaagcgggtgctggcccggtgcctgcaggtgggcgtcgacctgctgcgcgccggcgccaccgcgctggacgtggtggaggccgtggtgcgggagctggagacggacccctgcttcaactcgggccgcggctccgcgctcacccgcgccggcaccgtcgagatggaggccagcatcatggacggccgcggccgccgctgcggcgccgtctccggcgtctccaccgttaaaaaccccgtctccctcgcccgccgcgtcatggacaggtccccgcactcctacctcgccttcgacggcgccgaggatttcgcccgcgagcagggtcttgaggttgtggacaacagctacttcatcacggaggagaacgtgggcatgctcaagctcgccaaggaggccaacagcatcctcttcgactaccgcatcccgctcgccggggccgacacctgcagcgcgcaggcggcggcgaccgagaaccacaacaacaacggcatggtgatgaacgggctgcccatcagcatctacgcgccggagacggtggggtgcgccgtggtggactgtaacggcttcacggcggcggccacctccacgggcgggctcatgaacaagatgacgggccgcatcggcgactcgccgctcatcggcgctggcacctacgcgtgcgggcactgcgccgtgtcgtgcacgggcgagggcgaggccatcatccgctccacgctggcgcgggacgtggccgccgtgatggaatcaaggggctgccttctgcaggaggccgtggacttctgcgtcaaggaacggctcgacgaagggttcgccgggctcatcgccgtgtccggcaccggcgaggtggcatacgggttcaactgcaccggcatgttcagaggctgcgccaccgaggacggattcatggaggtcggcatctgggagtga

SEQ ID NO: 36444 - protein, 333 aa, Hordeum vulgare
MARWAIAIHGGAGVDPNLPEHRQEEAKRVLARCLQVGVDLLRAGATALDVVEAVVRELETDPCFNSGRGSALTRAGTVEMEASIMDGRGRRCGAVSGVSTVKNPVSLARRVMDRSPHSYLAFDGAEDFAREQGLEVVDNSYFITEENVGMLKLAKEANSILFDYRIPLAGADTCSAQAAATENHNNNGMVMNGLPISIYAPETVGCAVVDCNGFTAAATSTGGLMNKMTGRIGDSPLIGAGTYACGHCAVSCTGEGEAIIRSTLARDVAAVMESRGCLLQEAVDFCVKERLDEGFAGLIAVSGTGEVAYGFNCTGMFRGCATEDGFMEVGIWE

SEQ ID NO: 36445 - DNA, 918 bp, Pyrococcus abyssi
  CDS (1)..(918): transl_table=11
atggtggctattatcgttcatggtggagctggaacaatacgtaaggaggagagaattccaaaggttcttgagggagttagagaggcagttttagctgggtggaaggagttaaagaaaggatcagctttggatgccgttgaagaggccataaaggttctcgaagataacccaattttcaacgcgggaaccggaagcgtcttgacgatagatggcaaggttgagatggatgctgcaataatgcgtggtaaaaccttggaagctggtgcagtcgctggaatctggggggttaagaatccaataagcgttgcgagaaaagtgatggagaagacggatcacgttcttctagttggagaaggtgcagtaaagttcgcgaggataatgggctttcccgaatacgatccaacaactgaagaaagaaggaagcagtggcaggagttgaaggagaagctaatgaaaggcgaagttagacattggaaaaagctcggtgaactcataaaggagcatccagaggttctaaggagcactgttggtgcggttgcctttgatggagaggaagtcgtcgctggaacttcaacgggaggagttttccttaagatgtttggaagggttggagatacccccataataggggccggaacttatgcaaacgaagttgctggcgcatcttgcactgggcttggggaggttgccataaagctagccctggctaaaactgccacagacttcgttaggcttggcttagatgctcaggcggccagtgaagctgccatagagcttgccacaaagcactttggcaaggatacaatggggataataatggttgattctaggggaaacgtaggcttcgcgaagaacaccaagcatatgagctatgcattcatgaaggagggcatgaacgagccggaggctggtgtttag

SEQ ID NO: 36446 - protein, 305 aa, Pyrococcus abyssi
MVAIIVHGGAGTIRKEERIPKVLEGVREAVLAGWKELKKGSALDAVEEAIKVLEDNPIFNAGTGSVLTIDGKVEMDAAIMRGKTLEAGAVAGIWGVKNPISVARKVMEKTDHVLLVGEGAVKFARIMGFPEYDPTTEERRKQWQELKEKLMKGEVRHWKKLGELIKEHPEVLRSTVGAVAFDGEEVVAGTSTGGVFLKMFGRVGDTPIIGAGTYANEVAGASCTGLGEVAIKLALAKTATDFVRLGLDAQAASEAAIELATKHFGKDTMGIIMVDSRGNVGFAKNTKHMSYAFMKEGMNEPEAGV

SEQ ID NO: 36447 - DNA, 921 bp, Pyrococcus furiosus
  CDS (1)..(921): transl_table=11
atggtagctattattgtccatggcggagcgggaacaattagaaaagaggagaggattccaaagatcatcgagggagttagggaggcagttttaaccggttggagagaactgaaaaagggttctgcccttgatgctgttgaagaagccgtaaaagttcttgaggacaatcctctctttaatgctggtacaggaagcgttttgaccttagatggaaaagtagagatggacgctgcaataatgagaggaaaaacattggatgctggtgctgttgcagggatatggggagtgaaaaacccaattagtgtggcaagaaaagttatggaaaagactgatcatgtattacttattggagaaggagctgttaaatttgcaaggctaatgggttttcctgaatacgatcccacaacagaagagagaagaaaacagtgggaggagttgaggaaaaaactacttgaaactggagaaatacgccactggaaaaagttaagtgagcttataaaggaatatccagaagtcttaaggagtaccgtaggagctgtagcctttgatggggaggagatagtagctggaacttcaactgggggagtattccttaagatgtttggtagggtaggggatactcctataatcggggctggaacgtatgcaaatgaggttgctggggcttcatgtactggtttgggggaggttgcaattaagctaagcttagcgaaaacagcaactgacttcgtaaggctcggtttggatgctcaagctgcaagtgaagcagcaataagattagctacaaagtactttgggcctgatacaatgggaataatcatggttgactctaatgggaatgttggctttgctaagaatacaaaacacatgagttacgcatttatgaaggaaggcatgaaggaaccggaggcaggggtgtaa

SEQ ID NO: 36448 - protein, 306 aa, Pyrococcus furiosus
MVAIIVHGGAGTIRKEERIPKIIEGVREAVLTGWRELKKGSALDAVEEAVKVLEDNPLFNAGTGSVLTLDGKVEMDAAIMRGKTLDAGAVAGIWGVKNPISVARKVMEKTDHVLLIGEGAVKFARLMGFPEYDPTTEERRKQWEELRKKLLETGEIRHWKKLSELIKEYPEVLRSTVGAVAFDGEEIVAGTSTGGVFLKMFGRVGDTPIIGAGTYANEVAGASCTGLGEVAIKLSLAKTATDFVRLGLDAQAASEAAIRLATKYFGPDTMGIIMVDSNGNVGFAKNTKHMSYAFMKEGMKEPEAGV

SEQ ID NO: 36449 - DNA, 918 bp, Pyrococcus horikoshii
  CDS (1)..(918): transl_table=11
atggtagctatcatcgttcatgggggtgctggaacaataaaaaaagaagaaaggataccaaaggttattgagggagtaaaagaagccgttattgttgggtggaaagaacttaggaagggatctgctttagatgctgtggaggaagccattaaagttcttgaggataaccctatattcaatgccggaactgggagcgttctcacgatcgatggaaaagttgaaatggatgctgcaataatgagagggaagacgctagaagctggagctgtggccgggatatggggagttaagaatccgataagtgttgcaagaaaggtaatggaaaagactgatcatgtactccttgttggggaaggtgcagtaaagtttgctagactcatgggattccctgaatacaatccaataacggaagaaaggattgagcagtggaaagaactaaaggaaaagctaatgaaaggtgagatcaagtactggaaaaagcttggtgagcttataaaagagtatccagaagttttgaggagtaccgttggggccgtagcttttgacggggaagaaatagttgcaggaacttcaactgggggagtttttttgaagatgtttggaagggttggtgatactcccataataggggctggaacttatgcaaatgaagttgctggagcgtcttgtactggactaggagaggttgcaataagacttgcattggcgaaaaccgcaaccgacttcgtcagacttggtatggatgctcaagcagccagcaatgcggcaatctctcttgcaacaaagtactttgggaaggatactatggggataataatggtagatgcagccggtaacgttgggttcgctaagaatacgaagcatatgagctatgcttatatgaaagatggtatggaggaaccggaggctggtgtttag

SEQ ID NO: 36450 - protein, 305 aa, Pyrococcus horikoshii
MVAIIVHGGAGTIKKEERIPKVIEGVKEAVIVGWKELRKGSALDAVEEAIKVLEDNPIFNAGTGSVLTIDGKVEMDAAIMRGKTLEAGAVAGIWGVKNPISVARKVMEKTDHVLLVGEGAVKFARLMGFPEYNPITEERIEQWKELKEKLMKGEIKYWKKLGELIKEYPEVLRSTVGAVAFDGEEIVAGTSTGGVFLKMFGRVGDTPIIGAGTYANEVAGASCTGLGEVAIRLALAKTATDFVRLGMDAQAASNAAISLATKYFGKDTMGIIMVDAAGNVGFAKNTKHMSYAYMKDGMEEPEAGV

SEQ ID NO: 36451 - DNA, 921 bp, Pyrococcus kodakaraensis
  CDS (1)..(921): transl_table=11
atggccgctatcatagtccacggtggggctggaacaataaggaaagaggagagaatacccaaggtcattgagggtgttagggaggctgttctcgccggctggagagagctgaagaggggttccgcgctggatgcagttgaggaggcagttaaagccctcgaggacaaccctatttttaatgcaggaactggaagcgttcttacccttgatgggaaggtcgagatggacgccgctataatgcgcggtaaaacgctcgacgctggcgccgttgctggaatctggggcgtcaagaacccgataagcgttgccagaaaggtcatggagaaaaccgaccacgttctcctgataggtgagggagctgtaaagttcgccagactgctcggcttcgaggagtacgacccgataacggaggagaggctcaagcagtgggaggagctcagaaagaagctcatagagaagggcgaaacaaagcactggaagaagctcaacgagctgatcaaggagtatccagaagtcctgaggagcactgttggcgctgtggccttcgacggtgaggaagttgttgcaggaacttccactggtggggttttcctcaagatgttcggccgcgttggagacactccaataatcggcggcggaacttacgcgaacgaagttgcgggagcttcctgtaccggcctcggcgaggtcgcgataaagctcgcactggcaaagagtgctgccgacttcgtcaggcttggcatggacgctcagacggcaagcgaagccgctataagcctcgccacgaagtacttcggcccagatacgatgggcattatcatggtcgatgcaaagggcaacgtcggcttcgccaagaacaccaagcacatgagctacgccttcatgaaggacggaatggacgagccggaggctggtgtttag

SEQ ID NO: 36452 - protein, 306 aa, Pyrococcus kodakaraensis
MAAIIVHGGAGTIRKEERIPKVIEGVREAVLAGWRELKRGSALDAVEEAVKALEDNPIFNAGTGSVLTLDGKVEMDAAIMRGKTLDAGAVAGIWGVKNPISVARKVMEKTDHVLLIGEGAVKFARLLGFEEYDPITEERLKQWEELRKKLIEKGETKHWKKLNELIKEYPEVLRSTVGAVAFDGEEVVAGTSTGGVFLKMFGRVGDTPIIGGGTYANEVAGASCTGLGEVAIKLALAKSAADFVRLGMDAQTASEAAISLATKYFGPDTMGIIMVDAKGNVGFAKNTKHMSYAFMKDGMDEPEAGV

SEQ ID NO: 36453 - DNA, 990 bp, Synechocystis sp
  CDS (1)..(990): transl_table=11
atgacccccaaattaatcatccatggtggtgcgagttccctcgacgataaggggggcttggccactgtgcgccaatccctacatcaaattgtggccgcagtgtatgaaaccctaacagcggggggcagtgccatggatgcggtggtacaaggttgtgaattattggaaaatgagcctcgttttaacgctggtactggttcggtgctccagtcggatggacaagttcgcatgagtgcttctttgatggacggcgatcgccagaattttagtggggtaattaacgtttcccgcattaaaaatccgatccagatggcccaatttttgcaggggcaaacagaccggattttgtccgattatggggcggcggatttagccagggaaatgcaactgcccatttacgatcccgccacggattttcgcattcaggaatggatggaggaacggggagaagatgtgcgcaaaaaaatggctcggctaattgctgatcccaccgtgggcattgaagccagaaaaggcaccatcggcgtagtggcgttggatgctaacggcaaaattgcggccggtacttccactgggggcaaagggctagagcgcattggtcgggtgagtgattctgctatgccggcggggaactatgccacccgttttgctggggttagttgcactggagtaggggaagacattatcaatgaatgtttggccgccaaggtggtaatccgggttaaggatggccaaaatttagctcaagccatggcaaaatccatcacggaagctttggaaaataacactgacctgggggcgatcgccttggatcatcaaggccatattgcctggggaaaaacctgccctgtcctattggcggcctatcacaccggtacggcgatcggagacacgctggaattaaccgatggcgaccactacggcaacgcctcaatattaaaactgcaaaaaacagttaaaaaaatacagacaaaaacacggggaaaataa

SEQ ID NO: 36454 - protein, 329 aa, Synechocystis sp
MTPKLIIHGGASSLDDKGGLATVRQSLHQIVAAVYETLTAGGSAMDAVVQGCELLENEPRFNAGTGSVLQSDGQVRMSASLMDGDRQNFSGVINVSRIKNPIQMAQFLQGQTDRILSDYGAADLAREMQLPIYDPATDFRIQEWMEERGEDVRKKMARLIADPTVGIEARKGTIGVVALDANGKIAAGTSTGGKGLERIGRVSDSAMPAGNYATRFAGVSCTGVGEDIINECLAAKVVIRVKDGQNLAQAMAKSITEALENNTDLGAIALDHQGHIAWGKTCPVLLAAYHTGTAIGDTLELTDGDHYGNASILKLQKTVKKIQTKTRGK

SEQ ID NO: 36455 - DNA, 948 bp, Arabidopsis thaliana
  CDS (1)..(948)
atggtggggtgggcgattgcgctacacggcggtgccggagacattccgatcgatctccccgacgagcgacgtatccctcgtgagagcgccctccgtcactgcctcgatcttggcatctccgccctcaaatccggcaagcctcccttggacgtcgccgaacttgtcgttcgtgaacttgagaaccacccggacttcaatgcgggtaaaggatctgtcttaactgcacaaggcactgttgaaatggaagcttccattatggacggtaaaaccaaaagatgtggagctgtctccggcttgaccactgttgttaatcccatttctttagctcgcctcgtcatggagaaaactcctcatatatatcttgcattcgatgctgctgaagcttttgcaagagcacatggtgttgagacggtagattctagccatttcataactcctgaaaacattgcaaggctaaagcaggccaaagaattcaatcgagtccagttggattacacagtccctagtccgaaagtaccggacaattgcggtgacagccaaataggaacggtcggatgtgtagctgtggacagtgctggaaatctagcttcggctacatcaacgggcggttatgtcaacaaaatggttggcagaattggggatacgccagtcattggcgcaggaacttacgctaaccacctttgtgccatctcagccacaggtaaaggagaggatatcatccgtggaaccgtggctagagacgtggctgcactcatggaatataaaggcttgtctttgactgaggcagcggcttatgttgttgaccaatctgttcccagaggaagctgtggactcgttgctgtctctgccaatggtgaagtcacaatgccgtttaacactaccggaatgttcagggcttgtgctagcgaagatggttactctgagatcgcaatctggccaaacaattga

SEQ ID NO: 36456 - protein, 315 aa, Arabidopsis thaliana
MVGWAIALHGGAGDIPIDLPDERRIPRESALRHCLDLGISALKSGKPPLDVAELVVRELENHPDFNAGKGSVLTAQGTVEMEASIMDGKTKRCGAVSGLTTVVNPISLARLVMEKTPHIYLAFDAAEAFARAHGVETVDSSHFITPENIARLKQAKEFNRVQLDYTVPSPKVPDNCGDSQIGTVGCVAVDSAGNLASATSTGGYVNKMVGRIGDTPVIGAGTYANHLCAISATGKGEDIIRGTVARDVAALMEYKGLSLTEAAAYVVDQSVPRGSCGLVAVSANGEVTMPFNTTGMFRACASEDGYSEIAIWPNN

SEQ ID NO: 36457 - DNA, 978 bp, Arabidopsis thaliana
  CDS (1)..(978)
atgggtgggtgggcaatcgcagtacacggtggtgccggtatcgaccctaatcttccggcggagagacaagaagaggctaaacagcttttaactcgttgtctcaacctcggcataatagctttgcgttccaatgtctccgccattgacgtcgttgagctcgtcattagagaattggagacggatcctctgtttaattcaggccgtggatctgctttgacggaaaaaggaacggttgagatggaagctagcattatggacggtacgaagagacgatgcggtgccgtttcggggataaccaccgtgaaaaatcctatatctcttgctcgtctcgtcatggacaaatctccccactcttaccttgctttctcaggtgcagaggatttcgcccgcaaacagggagttgaaattgtggacaacgagtactttgtcacggacgacaacgtaggaatgctcaagttggccaaggaagctaactccatcttgtttgattaccggattccgccgatgggatgtgccggtgcagctgcgaccgacagtccaatccaaatgaacggtcttccgatcagcatttacgcaccggagacagtcgggtgcgttgtggttgacgggaaaggacattgtgccgccgggacatccacgggtggtttaatgaacaagatgatgggaaggattggtgactcgccgctgataggagccgggacgtatgcgtcggagttttgtggtgtgtcgtgtaccggagaaggagaagccattataagagcaaccctagctcgtgatgtgtcagctgttatggagtataaaggacttaacctccaagaagcggttgattacgtcatcaagcatcgacttgacgaagggttcgctggactcattgctgtctcgaataaaggagaggtggtttgtggttttaactctaatgggatgttcaggggatgtgcaactgaggatggattcatggaggttgctatttgggagtga

SEQ ID NO: 36458 - protein, 325 aa, Arabidopsis thaliana
MGGWAIAVHGGAGIDPNLPAERQEEAKQLLTRCLNLGIIALRSNVSAIDVVELVIRELETDPLFNSGRGSALTEKGTVEMEASIMDGTKRRCGAVSGITTVKNPISLARLVMDKSPHSYLAFSGAEDFARKQGVEIVDNEYFVTDDNVGMLKLAKEANSILFDYRIPPMGCAGAAATDSPIQMNGLPISIYAPETVGCVVVDGKGHCAAGTSTGGLMNKMMGRIGDSPLIGAGTYASEFCGVSCTGEGEAIIRATLARDVSAVMEYKGLNLQEAVDYVIKHRLDEGFAGLIAVSNKGEVVCGFNSNGMFRGCATEDGFMEVAIWE

SEQ ID NO: 36459 - DNA, 978 bp, Lupinus angustifolius
  CDS (1)..(978)
atgggtggttggagtatagctctgcacggcggcgctggcgacattccattttcactgccaccggagcgccgtcagcctcgggaagaaggcctccgccactgcctccaaatcggcgttgaagctctcaaatcccaaaagcctcctttggacgttgtagaacttgttgttcgtgagttagagaatattcaacatttcaatgcgggaataggatctgtgttaacgaatagtggaacagtggaaatggaagcatcaataatggatggaaaaactatgaaatgtggagcagtttctggtctgagtacagttctgaatccaatttcactagctcgattagttatggataaaactcctcatatatatcttgctttccaaggagctcaagattttgctaaacaacaaggtgttgagactgtagattcaagtcattttattactgcagaaaatgttgaaaggctaaagctggcaatagaagccaatagggtccaggttgattatagtcaatataattatccccaacctgctcaagatgatgctgagaaggaattaccacttgcaaatggtgatagtcaaattggaactgttgggtgtgtagctgttgatagccatggaaatctagcttctgcaacatccactggtggattagttaacaaaatggttggtcgaatcggtgacacgcccctcataggtgccggaacttatgcgaatgaactttgtgcagtttctgcaacaggtaaaggtgaagcaataatatctgcgacggtagcaagggatgtggctgcactcatggagttcaaaggcctttctctcaaggaagctgctgattatgttgtacatgagcgtacaccaaaaggcactgttggtttgattgctgtgtctgctgcaggagaaattgccatgccttttaatacaacaggcatgttcagagcatctgctactgaagatggctattcagagattgcaatttggcctactacctaa

SEQ ID NO: 36460 - protein, 325 aa, Lupinus angustifolius
MGGWSIALHGGAGDIPFSLPPERRQPREEGLRHCLQIGVEALKSQKPPLDVVELVVRELENIQHFNAGIGSVLTNSGTVEMEASIMDGKTMKCGAVSGLSTVLNPISLARLVMDKTPHIYLAFQGAQDFAKQQGVETVDSSHFITAENVERLKLAIEANRVQVDYSQYNYPQPAQDDAEKELPLANGDSQIGTVGCVAVDSHGNLASATSTGGLVNKMVGRIGDTPLIGAGTYANELCAVSATGKGEAIISATVARDVAALMEFKGLSLKEAADYVVHERTPKGTVGLIAVSAAGEIAMPFNTTGMFRASATEDGYSEIAIWPTT

SEQ ID NO: 36461 - DNA, 978 bp, Lupinus luteus
  CDS (1)..(978)
atgggtggttggagcatagctctgcacggcggcgctggcgacattccattttcactgccaccggagcggcgaaagcctcgggaagaaggactccgccactgccttcaaatcggtgttgaagctctcaaagcccaaaagcctcctttggacgttgtagaacttgttgttcgtgagttagagaatattgaacatttcaatgcgggaataggatctgtgttgaccaatagtgggacagtggaaatggaagcatcaataatggatgggaatactatgaaatgtggagcagtttctggtctgagtacagttctgaatcctatttcactagctcgactcgttatggataaaactcctcatatatatcttgctttccaaggagctcaggattttgctaaacaacaaggtgttgagactgtagattcaagtcatcttattactgcagaaaatgttgaaagactaaagctggcaatagaagccaatagggtccaggttgattatagtcaatataattatcccgaacctgtcaaagatgatgctgagaaggaattaccacttacaaatggtgatagtcaaattggaactgttgggtgtgtggctgttgatagtcatgggaatctagcttctgcaacatccactggtggattggttaacaaaatggttggtcgaatcggtgacacgcccctcatcggtgccgggacttatgccaatgaactttgtgcagtttctgcaacaggcaaaggtgaagaaataatacgtgcaacggtagcaagagatgtggctgcactcatggagttcaaaggcctttctctcaaggaagctgctgattttgttatacatgagcgtacaccaaaaggcactgttggtttgattgctgtgtctgctgcaggagaaattgcaatgccttttaacacaacaggcatgttcagagcatgtgctactgaagatggctattcagagattgcaatttggcctactacctaa

SEQ ID NO: 36462 - protein, 325 aa, Lupinus luteus
MGGWSIALHGGAGDIPFSLPPERRKPREEGLRHCLQIGVEALKAQKPPLDVVELVVRELENIEHFNAGIGSVLTNSGTVEMEASIMDGNTMKCGAVSGLSTVLNPISLARLVMDKTPHIYLAFQGAQDFAKQQGVETVDSSHLITAENVERLKLAIEANRVQVDYSQYNYPEPVKDDAEKELPLTNGDSQIGTVGCVAVDSHGNLASATSTGGLVNKMVGRIGDTPLIGAGTYANELCAVSATGKGEEIIRATVARDVAALMEFKGLSLKEAADFVIHERTPKGTVGLIAVSAAGEIAMPFNTTGMFRACATEDGYSEIAIWPTT

SEQ ID NO: 36463 - DNA, 948 bp, Brassica napus
  CDS (1)..(948)
atgttggggtgggcgatagcgttacacggcggtggaggagacattccgatcgacctccctgacgagctgcgtatccctcgcgagaccgctctgcgtcactgccttgatctcggcgtttccgccctcaaatccggcaaacatccattggacgtcactgaactcgtcgttcgtgaacttgagaaccacccatacttcaatgctggtaaaggatccgttctaactgcacaaggcactgttgaaatggaagcttctattatggacggtaaaaccaaaagatgtggagccgtctctggcctcaccactgtcgttaaccccgtctctttagctcgactcgtcatggagaaaactcctcatatctatcttgctttcaacgctgcagaagctttcgctagagcacatggcgttgagacggctgaatcaacctatttcataactcctgaaaacattgcaaggctaaaacaggccaaagagttcaatcgcgtccagttggattacacagcgcctacaccaaaagaacctgaaatccgtggcgacagccagataggaacggtgggatgtgtagcagtggacagcgctggaaacctagctgcggccacatcaaccggcggctatgtcaataaaatggctggcagaatcggagactctccgttgattggtgcaggaacgtacgctaaccacctttgtgccgtctcagccacaggtaaaggagaatatataatacgcgcaaccatggctagagaagtggctgcacttatggaatacaaaggtttgtctttaaccgaagcagcggcttatgctgttgaacagtccggacctagaggaacctgtggactcgttgctgtgtctgctaatggtgaagttgctatgccgtataacaccaatgggatgtttagagcttgtgcaacagaggatggtttcactgaggtcgcaatctggcctaaaaattga

SEQ ID NO: 36464 - protein, 315 aa, Brassica napus
MLGWAIALHGGGGDIPIDLPDELRIPRETALRHCLDLGVSALKSGKHPLDVTELVVRELENHPYFNAGKGSVLTAQGTVEMEASIMDGKTKRCGAVSGLTTVVNPVSLARLVMEKTPHIYLAFNAAEAFARAHGVETAESTYFITPENIARLKQAKEFNRVQLDYTAPTPKEPEIRGDSQIGTVGCVAVDSAGNLAAATSTGGYVNKMAGRIGDSPLIGAGTYANHLCAVSATGKGEYIIRATMAREVAALMEYKGLSLTEAAAYAVEQSGPRGTCGLVAVSANGEVAMPYNTNGMFRACATEDGFTEVAIWPKN

SEQ ID NO: 36465 - DNA, 1008 bp, Zea mays
  CDS (1)..(1008)
atggggtgggcgctggctctgcacggcggcgccggggacgtgccgcgcacgctgccgcccgagagcagggagccgcgcctcgccacactccgccgctgcctcgacatcggcaccgccgcgctccgggagggccgcaccgcgctcgacgttgtcgagctcgtcgtgagggagctggaggactgcccgcacttcaacgccggccggggctccgtgctcacctccgccggcaccgtcgagatggaggcctgcgtcatggagggagccaccctgcactgcggcgcggtctccggactctccaccgtcgccaacgccgtctccctcgccagactcgtcatggagaagacgccgcacatctacctcgccttcgatggcgccgaggccttcgccagggaacagggggtggagactaaggatccaagccactttatcacggacaacaatatcgagcgtctgaggcaggccaaagaggccaacagggtgcagatcgactacacccagccagcagcaggccaaagccaaaaggcccaggccgtggtggacgacaactgccagacgggcacggtagggtgcgtggccgtggacgcggcgggcaacctcgcgacggcgacgtccacgggcgggctggtgaacaagatgcccggcaggatcggcgacacgcctctggtgggcgccggaacgtacgccaacgcgctgtgcgcggtgtccgccacgggcaagggcgaggagatcatccgccgcacggtggcgcgcgacgtcgcggcgctgatggagcgcggggacgcgctcccgctgcgcgacgccgcggcgcgcgtcgtggcgggggcggcccgcggcgccgtggggctggtggccgtgtcgcgccagggggaggtctgtatggcgcacaacaccaccgccatgttcagggcgtgcgccaccgaggccggccacaccgaagtcggcatctggacggacgccgccgacgcaggcacgggcgcggacggagagactgtcagcgtcgcgctctag

SEQ ID NO: 36466 - protein, 335 aa, Zea mays
MGWALALHGGAGDVPRTLPPESREPRLATLRRCLDIGTAALREGRTALDVVELVVRELEDCPHFNAGRGSVLTSAGTVEMEACVMEGATLHCGAVSGLSTVANAVSLARLVMEKTPHIYLAFDGAEAFAREQGVETKDPSHFITDNNIERLRQAKEANRVQIDYTQPAAGQSQKAQAVVDDNCQTGTVGCVAVDAAGNLATATSTGGLVNKMPGRIGDTPLVGAGTYANALCAVSATGKGEEIIRRTVARDVAALMERGDALPLRDAAARVVAGAARGAVGLVAVSRQGEVCMAHNTTAMFRACATEAGHTEVGIWTDAADAGTGADGETVSVAL

SEQ ID NO: 36467 - DNA, 948 bp, Brassica napus
  CDS (1)..(948)
atggtggggtgggcgatagcgttacacggcggcgcaggagacattccgatcgacctccctgacgagcgacgtatccctcgcgagaccgccctccgtcactgcctcgatctcggcgtctccgccctcaaatccggcaaacatccattagacgtcaccgaactcgtcgttcgtgaacttgagaaccatccagacttcaatgctggtaaaggatccgttttaactgcacaaggcactgttgaaatggaagcttctattatggacgggaaaaccaaaagatgtggagccgtctctggcctcaccaccgtcgttaaccccatctctgtagctcgactcgtcatggagaaaactcctcatatctatcttggattcgatggcgcagaagctttcgctagagcacatggcgttgagacggttgaatcaagccatttcataactcctgagaacattgcaaggctaaaacaggccaaagagttcaaccgagtccagttggattacacagcgcctacaccaaaagaacctgaaatccctggagacagccaaataggaacggtaggatgtgtagcagtggacagcgctggaaacctagctgcggccacatcaaccggaggctatgtcaataaaatggctggcagaatcggagactcgccgttgattggagcaggaacatacgctaaccacctttgtgccgtatcagccacaggtaaaggagaatatataatccgtgcaaccatggctagagaagtggctgcgcttatggaatacaaaggtttgtctttaaccgaagcagcggcttatgctgttgaacaatccggaccgagaggaacttgtggactcgttgctgtttctgctaatggtgaagttgctatgccgtataacaccaatgggatgttcagagcttgtgctacggaagatggttacactgaggtcgcaatctggcctaaaaattga

SEQ ID NO: 36468 - protein, 315 aa, Brassica napus
MVGWAIALHGGAGDIPIDLPDERRIPRETALRHCLDLGVSALKSGKHPLDVTELVVRELENHPDFNAGKGSVLTAQGTVEMEASIMDGKTKRCGAVSGLTTVVNPISVARLVMEKTPHIYLGFDGAEAFARAHGVETVESSHFITPENIARLKQAKEFNRVQLDYTAPTPKEPEIPGDSQIGTVGCVAVDSAGNLAAATSTGGYVNKMAGRIGDSPLIGAGTYANHLCAVSATGKGEYIIRATMAREVAALMEYKGLSLTEAAAYAVEQSGPRGTCGLVAVSANGEVAMPYNTNGMFRACATEDGYTEVAIWPKN

SEQ ID NO: 36469 - DNA, 978 bp, Brassica napus
  CDS (1)..(978)
atgggtagatgggcaatcgcagtacacggtggcgcaggaatcgacccaaatcttcccgtagagagacaagaacaggcgaaacagcttttaactcgctgtcttaacctcggcatagcagctttacgttccaacgtctccgccattgacgtcgttgagctcgtcattagagaattagagacggatcctctgtttaactcaggccgtggatctgctttgacggaacaaggaacggtggagatggaagcaagcattatggacggtacgaagagacgatgcggcgccgtttcggggataaccaccgtgaagaaccctatttctctcgctcgtctcgtcatggacaaatctccccactcttacctagccttctcaggcgcggaggagttcgctcgcaaacagggagttgaaattgtggacaacgattactttgtcacggacgacaacgtggggatgctcaagctggcaaaagaagccaactccatcttgtttgattaccggatcccactgataggatgcgccggcgccgccgtaaacgacagtccactccagatgaacggacttccgatcagcatttacgcgccggagacagtaggatgcgtggtggtggacagagaaggacggtgcgccgccgggacatcaaccggtggtctgatgaacaagatgatgggaaggataggagactcgcccctgataggagccggtacgtacgcgtcggagctctgcggagtgtcgtgcaccggagaaggggaagccatcataaggtcgacgctggcgcgtgacgtgtcggctgttatggagtacaaaggagttgggctacaagaagcggttgattacgtcatcaagcatcggctcgacgaagggttcgctggactcattgccgtgtcgaataaaggagaggtggtttgtgggtttaactctaatgggatgttcagaggatgtgcaactgaggatgggttcatggaagttgctatgtgggaatga

SEQ ID NO: 36470 - protein, 325 aa, Brassica napus
MGRWAIAVHGGAGIDPNLPVERQEQAKQLLTRCLNLGIAALRSNVSAIDVVELVIRELETDPLFNSGRGSALTEQGTVEMEASIMDGTKRRCGAVSGITTVKNPISLARLVMDKSPHSYLAFSGAEEFARKQGVEIVDNDYFVTDDNVGMLKLAKEANSILFDYRIPLIGCAGAAVNDSPLQMNGLPISIYAPETVGCVVVDREGRCAAGTSTGGLMNKMMGRIGDSPLIGAGTYASELCGVSCTGEGEAIIRSTLARDVSAVMEYKGVGLQEAVDYVIKHRLDEGFAGLIAVSNKGEVVCGFNSNGMFRGCATEDGFMEVAMWE

SEQ ID NO: 36471 - DNA, 981 bp, Glycine max
  CDS (1)..(981)
atgggagggtgggctatcgcggtgcatggtggcgctggtgtcgaccctaatctcccactcgagcgccaagaagaagcgaaacaacttctcacgcgctgtctcaatcttggaatctctgctctaaattctaatcttcccgccatagatgtcgtcgaacttgtggtgagggaattggaaacggatccgctgttcaattcgggccgtggatctgccctgacagaaaaaggaacggtggagatggaggctagcatcatggatggtccaaaacgacgatgcggcgccgtttcgggtcttaccaccgttaagaacccgatctcgcttgctcgtttggttatggacaaatccccgcattcctacctcgccttctccggcgccgaagaatttgctaggcaacagggtgtggaggttgtggacaacgagtactttatcacacctgacaacgttggcatgctcaagctggcaaaggaagcaaacacaatcctgtttgattaccgaatcccaacatcggggtacgagacgtgcggatccggtgtggagagtccactgcaaatgaatggactcccaataagcgtgtacgcgcccgaaaccgttgggtgcgtggtggttgaccgggagggccggtgcgcggcagcaacatccacgggagggctgatgaacaaaatgaccgggcgcatcggtgattcgccgctgataggcgccgggacctacgcgtgcgacgtgtgcggcgtatcgtgcacgggtgaaggcgaggccatcatacgtggcacgctggcgcgtgaggtggcagcggtgatggaatacaaaggcttgaagcttcaagaagccgtggattttgtgatcaagcaccgtctcgatgaagggatggctggtctcattgctgtgtccaacgctggggaagtggcttatggtttcaattgcaatggcatgtttaggggctgtgccactgaaaatggcttcatggaggtcggaatctgggaatag

SEQ ID NO: 36472 - protein, 326 aa, Glycine max
MGGWAIAVHGGAGVDPNLPLERQEEAKQLLTRCLNLGISALNSNLPAIDVVELVVRELETDPLFNSGRGSALTEKGTVEMEASIMDGPKRRCGAVSGLTTVKNPISLARLVMDKSPHSYLAFSGAEEFARQQGVEVVDNEYFITPDNVGMLKLAKEANTILFDYRIPTSGYETCGSGVESPLQMNGLPISVYAPETVGCVVVDREGRCAAATSTGGLMNKMTGRIGDSPLIGAGTYACDVCGVSCTGEGEAIIRGTLAREVAAVMEYKGLKLQEAVDFVIKHRLDEGMAGLIAVSNAGEVAYGFNCNGMFRGCATENGFMEVGIWE

SEQ ID NO: 36473 - DNA, 984 bp, Glycine max
  CDS (1)..(984)
atggggggttgggctatagcggtgcatggtggcgcgggtgtggaccctaatcttccaccagagcgtcaagagcaagccaaacaactcctcactcgcgttctcaatcttggcatctctgcccttcgttccgatgcttctgccctcgacgtcgtcgaacttgtcgtacgggaactggaaacagatcccctgttcaactctggtcgcggagcagctctgacagaaaagggaacagcggaattggaagcaagcatcatggatggttacaagagacgatgcggcgccgtttcgggcgtcaccaccgtcaaaaatcctatctcactcgctcgtcttgtcatggaaaagtcaccccactcctacctcgcctttaacggcgctgaagatttcgccagacaacagggagtggagattgtggagaacgaatacttcatcactcctgaaaatgttggtatgctgaaactggcaaaggaagcaaacacaatcctgtttgattatagggtgccattgcaaaatggatacgataactgcggtgtggaggttgagaatccattgcaaatgaatggactgccaataagcgtgtacgcgccggagacggtggggtgcgtggtggtggacagcgagggacggtgcgcggctgccacgtcgacaggagggttgatgaacaagaagtgcggtaggatcggtgactcaccactaataggtgcagggacttacgcgtgtaaggtgtgtggggtttcgtgcactggtgaaggagaagctataatacgtggcacgctggcgcgtgaggtggcagcggtgatggaatataaaggactgggacttgaggaggcagtggagtatgtgatggagcaccgtttggatggagggaaggcagggttgatcgccgtgtcaagttctggtgaggtggcctatggattcaactctaatgcaatgttcagggcatgcgccacccaggatggattcattgaggttggaatctgggaataa

SEQ ID NO: 36474 - protein, 327 aa, Glycine max
MGGWAIAVHGGAGVDPNLPPERQEQAKQLLTRVLNLGISALRSDASALDVVELVVRELETDPLFNSGRGAALTEKGTAELEASIMDGYKRRCGAVSGVTTVKNPISLARLVMEKSPHSYLAFNGAEDFARQQGVEIVENEYFITPENVGMLKLAKEANTILFDYRVPLQNGYDNCGVEVENPLQMNGLPISVYAPETVGCVVVDSEGRCAAATSTGGLMNKKCGRIGDSPLIGAGTYACKVCGVSCTGEGEAIIRGTLAREVAAVMEYKGLGLEEAVEYVMEHRLDGGKAGLIAVSSSGEVAYGFNSNAMFRACATQDGFIEVGIWE

SEQ ID NO: 36475 - DNA, 969 bp, Glycine max
  CDS (1)..(969)
atgggttgggccatagcactacacggcggcgccggcgacatcccgctttcccttccaccggagcgccgccagcctcgcgaggaggccctccgccactgcctccaaatcggcgtggaagctctcaaggccaaactgcctcctctcgacgtggttgaacttgtcgttcgggagttggagaacattccgcagtttaacgcgggaaggggatctgtgctgacttgcagaggcaccgtggaaatggaagcttccataatggacggcaccactatgaattgcggagctgtttccggcctcactaccgtcgtcaacgccatctctcttgctcgattggtcatggaaaacacgcctcacatctatctcgctttcgatggagcagaggaatttgcaagacaacaaggcgttgagactgtggattcaagccattttattacaaaagaaaatattgaaaggctaaagcaggcaaaagaagctaacagggttcagattgattatacgcaacctatccaaaatgatactaagaaagagaccgcattggctaatggtgatagccaaattggaactgttgggtgtgtggctgtagatagtcttgggaatttggcttctgcaacatctactggtggattagtgaacaaaatggtgggtcgaattggtgacacaccagtcattggtgctggtacctatgcggatgcacgttgtgcggtttcagcgacaggcaaaggtgaagcaataatacgtgggacagtggcaagagatgtggctgctctgatggagtttaagggtctttctctcgtggaagctgctaattgtgttgtacatgagcgcacaccaaaaggcactgttggtttggttgctgtgtctgccaaaggagaagttgcaatgccttttaatacaacaggcatgttcagagcgtgtgctactgaagatggatattctgagattgcaatttggcctgctgccaaaatagagtag

SEQ ID NO: 36476 - protein, 322 aa, Glycine max
MGWAIALHGGAGDIPLSLPPERRQPREEALRHCLQIGVEALKAKLPPLDVVELVVRELENIPQFNAGRGSVLTCRGTVEMEASIMDGTTMNCGAVSGLTTVVNAISLARLVMENTPHIYLAFDGAEEFARQQGVETVDSSHFITKENIERLKQAKEANRVQIDYTQPIQNDTKKETALANGDSQIGTVGCVAVDSLGNLASATSTGGLVNKMVGRIGDTPVIGAGTYADARCAVSATGKGEAIIRGTVARDVAALMEFKGLSLVEAANCVVHERTPKGTVGLVAVSAKGEVAMPFNTTGMFRACATEDGYSEIAIWPAAKIE

SEQ ID NO: 36477 - DNA, 981 bp, Glycine max
  CDS (1)..(981)
atgggagggtgggctatcgcggtgcatggtggcgctggtgtcgaccctaatctcccactcgagcgccaagaagaagcgaaacaacttctcacgcgctgtctcaatcttggaatctctgctctaaattctaatcttcccgccatagatgtcgtcgaacttgtggtgagggaattggaaacggatccgctgttcaattcgggccgtggatctgccctgacagaaaaaggaacggtggagatggaggctagcatcatggatggtccaaaacgacgatgcggcgccgtttcgggtcttaccaccgttaagaacccgatctcgcttgctcgtttggttatggacaaatccccgcattcctacctcgccttctccggcgccgaagaatttgctaggcaacagggtgtggaggttgtggacaacgagtactttatcacacctgacaacgttggcatgctcaagctggccaaggaagcaaacacaatcctgtttgattaccgaatcccaacatcggggtacgagacgtgcggatccaatgtggagagtccactgcaaatgaatggactcccaataagcgtgtacgcgcccgaaaccgttgggtgcgtggtggttgaccgggagggccggtgcgcggcagcaacatccacgggagggctgatgaacaaaatgaccgggcgcatcggtgattcgccgctgataggcgccgggacctacgcgtgcgacgtgtgcggcgtatcgtgcacgggtgaaggcgaggccatcatacgtggcacgctggcgcgtgaggtggcagcggtgatggaatacaaaggcttgaagcttcaagaagccgtggattttgtgatcaagcaccgtctcgatgaagggatggctggtctcattgctgtgtccaacgctggggaagtggcttatggtttcaattgcaatggcatgtttaggggctgtgccactgaaaatggcttcatggaggtcggaatctgggaatag

SEQ ID NO: 36478 - protein, 326 aa, Glycine max
MGGWAIAVHGGAGVDPNLPLERQEEAKQLLTRCLNLGISALNSNLPAIDVVELVVRELETDPLFNSGRGSALTEKGTVEMEASIMDGPKRRCGAVSGLTTVKNPISLARLVMDKSPHSYLAFSGAEEFARQQGVEVVDNEYFITPDNVGMLKLAKEANTILFDYRIPTSGYETCGSNVESPLQMNGLPISVYAPETVGCVVVDREGRCAAATSTGGLMNKMTGRIGDSPLIGAGTYACDVCGVSCTGEGEAIIRGTLAREVAAVMEYKGLKLQEAVDFVIKHRLDEGMAGLIAVSNAGEVAYGFNCNGMFRGCATENGFMEVGIWE

SEQ ID NO: 36479 - DNA, 987 bp, Glycine max
  CDS (1)..(987)
atggggggttgggctatagcggtgcatggtggcgcgggtgtggaccctaatcttccaccagagcgtcaagagcaagccaaacaactcctcactcgcgttctcaatcttggcatctctgcccttcgttccgatgcttctgccctcgacgtcgtcgaacttgtcgtacgggaactggaaacagatccactgttcaactctggtcgcggagctgctctgacagaaaagggaacagcggaattggaagaagcaagcatcatggatggttccaatagacgatgcggcgccgtttcgggcgtcaccaccgtcaaaaaccccatctcactcgctcgccttgtcatggaaaactcaccccactcctacctcgcctttaacggcgctgaagatttcgccagacaacagggtgtggagattgtggagaacgaatacttcatcacccctgaaaatgttggtatgctgaaactcgcaaaggaagcaaacgcaatcctgtttgattatagggttccattgcacaatggatacgaaagttgcggtgtggaggttgagaatccgttgcaaatgaatggactgccaatcagcgtgtacgcgccggagacggtggggtgcgtggtggtggacagcgagggacggtgtgcggctgccacgtcgacaggagggttgatgaacaagaagtgcggtaggatcggtgactcaccactaataggtgcagggacttacgcgtgtaaggtgtgtggggtttcgtgcactggtgaaggagaagctataatacgtggcacgctggcgcgtgaggtggcagcggtgatggaatataaaggactgggacttgaggaggcagtggagtatgtgatggagcaccgtttggatggagggaaggcagggttgatcgccgtgtcaagttctggtgaggtggcctatggattcaactctaatgcaatgttcagggcatgcgccacccaggatggattcatggaggttggaatctgggaataa

SEQ ID NO: 36480 - protein, 328 aa, Glycine max
MGGWAIAVHGGAGVDPNLPPERQEQAKQLLTRVLNLGISALRSDASALDVVELVVRELETDPLFNSGRGAALTEKGTAELEEASIMDGSNRRCGAVSGVTTVKNPISLARLVMENSPHSYLAFNGAEDFARQQGVEIVENEYFITPENVGMLKLAKEANAILFDYRVPLHNGYESCGVEVENPLQMNGLPISVYAPETVGCVVVDSEGRCAAATSTGGLMNKKCGRIGDSPLIGAGTYACKVCGVSCTGEGEAIIRGTLAREVAAVMEYKGLGLEEAVEYVMEHRLDGGKAGLIAVSSSGEVAYGFNSNAMFRACATQDGFMEVGIWE

SEQ ID NO: 36481 - DNA, 1014 bp, Zea mays
  CDS (1)..(1014)
atggcgccctgggccattgccatccacggcggcgcgggcgtggacccgaacctcccggagcaccggcaggaggaggcgaagcgcgtgctggcgcggtgcctgcaggtgggcgtggacctgctgcgcgcgggcgcgcaggcgctggacgtcgtggaggccgtggtgcgcgagctggagacggaccccttcttcaactcggggcgcgggtccgcgctcacccgcgccggcaccgtggagatggaggccagcatcatggacggccgcggccgccgctgcggcgccgtgtccggcgtctccaccgtcaagaaccccgtgtccctggcgcgccgcgtcatggacaactcgccccactcgtacctcgccttcgacggcgccgaggagttcgcccgtgcgcagggcctggagaccgtggacaacagctacttcatcacggatgacaacgtcggcatgctcaagctcgccaaggaggccggcagcatcctgttcgactaccggatcccgctggcggggacggacacgtgcagcgcgctggcgggcgcggcggacagcaacggcggcggcgtgcacaaggcggggatggtcatgaacgggctgcccatcagcgtgtacgcgccggagacggtggggtgcgcggtggtggacgcgacgggggcctgcgcggcggccacgtccacgggcgggctcatgaacaagatggccggccgcatcggggactcgccgctcatcggctccggcacctacgcgtgcggcgcctgcgccgtgtcgtgcacgggcgagggcgaggccatcatccgctgcacgctcgcgcgcgacgtggccgccgtcatggagtacaagggactgcccctgcagcaggccgtcgactactgcgtcaaggagcgcctcgaccagggattcgccggcctcatcgccgtctccggcaccggcgaggtggcgtacggattcaactgcaccggcatgttccggggctgcgccaccgaggacgggttcatggaggtcggcatctgggagtga

SEQ ID NO: 36482 - protein, 337 aa, Zea mays
MAPWAIAIHGGAGVDPNLPEHRQEEAKRVLARCLQVGVDLLRAGAQALDVVEAVVRELETDPFFNSGRGSALTRAGTVEMEASIMDGRGRRCGAVSGVSTVKNPVSLARRVMDNSPHSYLAFDGAEEFARAQGLETVDNSYFITDDNVGMLKLAKEAGSILFDYRIPLAGTDTCSALAGAADSNGGGVHKAGMVMNGLPISVYAPETVGCAVVDATGACAAATSTGGLMNKMAGRIGDSPLIGSGTYACGACAVSCTGEGEAIIRCTLARDVAAVMEYKGLPLQQAVDYCVKERLDQGFAGLIAVSGTGEVAYGFNCTGMFRGCATEDGFMEVGIWE

SEQ ID NO: 36483 - DNA, 24 bp, Artificial sequence
  primer
atgggcaaagcagtcattgcaatt

SEQ ID NO: 36484 - DNA, 23 bp, Artificial sequence
  primer
ttactgtgtggcaacggtgtccc

SEQ ID NO: 36485 - protein, 375 aa, Artificial sequence
  consensus sequence
  Variant (6)..(28): Xaa in position 6 to 28 is any amino acid
  Variant (29)..(35): Xaa in position 29 to 35 is any or no amino acid
  Variant (37)..(38): Xaa in position 37 to 38 is any amino acid
  Variant (39)..(46): Xaa in position 39 to 46 is any or no amino acid
  Variant (48)..(48): Xaa in position 48 is any amino acid
  Variant (50)..(50): Xaa in position 50 is any amino acid
  Variant (52)..(57): Xaa in position 52 to 57 is any amino acid
  Variant (60)..(61): Xaa in position 60 to 61 is any amino acid
  Variant (63)..(63): Xaa in position 63 is any amino acid
  Variant (64)..(64): Xaa in position 64 is any or no amino acid
  Variant (69)..(69): Xaa in position 69 is any amino acid
  Variant (71)..(76): Xaa in position 71 to 76 is any amino acid
  Variant (78)..(79): Xaa in position 78 to 79 is any amino acid
  Variant (81)..(82): Xaa in position 81 to 82 is any amino acid
  Variant (84)..(84): Xaa in position 84 is any amino acid
  Variant (85)..(86): Xaa in position 85 to 86 is any or no amino acid
  Variant (88)..(88): Xaa in position 88 is any amino acid
  Variant (90)..(92): Xaa in position 90 to 92 is any amino acid
  Variant (93)..(94): Xaa in position 93 to 94 is any or no amino acid
  Variant (98)..(103): Xaa in position 98 to 103 is any amino acid
  Variant (104)..(104): Xaa in position 104 is any or no amino acid
  Variant (107)..(109): Xaa in position 107 to 109 is any amino acid
  Variant (112)..(112): Xaa in position 112 is any amino acid
  Variant (114)..(117): Xaa in position 114 to 117 is any amino acid
  Variant (118)..(118): Xaa in position 118 is any or no amino acid
  Variant (120)..(124): Xaa in position 120 to 124 is any amino acid
  Variant (125)..(125): Xaa in position 125 is any or no amino acid
  Variant (128)..(129): Xaa in position 128 to 129 is any amino acid
  Variant (132)..(133): Xaa in position 132 to 133 is any amino acid
  Variant (134)..(137): Xaa in position 134 to 137 is any or no amino acid
  Variant (139)..(146): Xaa in position 139 to 146 is any amino acid
  Variant (147)..(250): Xaa in position 147 to 250 is any or no amino acid
  Variant (254)..(254): Xaa in position 254 is any amino acid
  Variant (256)..(257): Xaa in position 256 to 257 is any amino acid
  Variant (259)..(260): Xaa in position 259 to 260 is any amino acid
  Variant (262)..(263): Xaa in position 262 to 263 is any amino acid
  Variant (266)..(266): Xaa in position 266 is any amino acid
  Variant (272)..(274): Xaa in position 272 to 274 is any amino acid
  Variant (276)..(277): Xaa in position 276 to 277 is any amino acid
  Variant (280)..(280): Xaa in position 280 is any amino acid
  Variant (283)..(283): Xaa in position 283 is any amino acid
  Variant (285)..(286): Xaa in position 285 to 286 is any amino acid
  Variant (290)..(290): Xaa in position 290 is any amino acid
  Variant (293)..(297): Xaa in position 293 to 297 is any amino acid
  Variant (298)..(298): Xaa in position 298 is any or no amino acid
  Variant (301)..(301): Xaa in position 301 is any amino acid
  Variant (304)..(304): Xaa in position 304 is any amino acid
  Variant (307)..(308): Xaa in position 307 to 308 is any amino acid
  Variant (310)..(312): Xaa in position 310 to 312 is any amino acid
  Variant (313)..(313): Xaa in position 313 is any or no amino acid
  Variant (315)..(327): Xaa in position 315 to 327 is any amino acid
  Variant (328)..(333): Xaa in position 328 to 333 is any or no amino acid
  Variant (335)..(347): Xaa in position 335 to 347 is any amino acid
  Variant (348)..(355): Xaa in position 348 to 355 is any or no amino acid
  Variant (357)..(357): Xaa in position 357 is any amino acid
  Variant (359)..(363): Xaa in position 359 to 363 is any amino acid
  Variant (365)..(368): Xaa in position 365 to 368 is any amino acid
  Variant (369)..(370): Xaa in position 369 to 370 is any or no amino acid
  Variant (372)..(373): Xaa in position 372 to 373 is any amino acid
  Variant (374)..(374): Xaa in position 374 is any or no amino acid
HGGAGXXXXXXXXXXXXXXXXXXXXXXXXXXXXXXLXXXXXXXXXXAXDXVXXXXXXLEXXPXXFNAGXGXXXXXXGXXEXXAXXXMXGXXXXXGAVXXXXXXXNPXXXARXVXXXXXHXXXXXXGAXXFAXXXXXXGXXXXXXXXXXXXXXXXXXXXXXXXXXXXXXXXXXXXXXXXXXXXXXXXXXXXXXXXXXXXXXXXXXXXXXXXXXXXXXXXXXXXXXXXXXXXXXXXXXXXXXXXXXXXXXXXTVGXVXXDXXGXXAAXTSTGGXXXKXXGRXGDXPXXGAGXYAXXXXXXVSXTGXGEXXIXXXXAXXXXXXXXXXXXXXXXXXXAXXXXXXXXXXXXXXXXXXXXXGXIXXXXXGXXXXXXNXXXM

SEQ ID NO: 36486 - protein, 33 aa, Artificial sequence
  protein pattern
  Variant (2)..(2): Xaa in position 2 is any amino acid
  Variant (3)..(3): Xaa in position 3 is any or no amino acid
  Variant (5)..(5): Xaa in position 5 is any amino acid
  Variant (6)..(6): Xaa in position 6 is any or no amino acid
  Variant (8)..(9): Xaa in position 8 to 9 is any amino acid
  Variant (11)..(12): Xaa in position 11 to 12 is any amino acid
  Variant (14)..(14): Xaa in position 14 is Ala, Ser, Thr or Val
  Variant (15)..(15): Xaa in position 15 is Ala or Gly
  Variant (21)..(26): Xaa in position 21 to 26 is any amino acid
  Variant (27)..(27): Xaa in position 27 is Gly or Asn
  Variant (29)..(29): Xaa in position 29 is any amino acid
  Variant (30)..(30): Xaa in position 30 is Gly or Ser
  Variant (32)..(32): Xaa in position 32 is Ala, Ser or Thr
  Variant (33)..(33): Xaa in position 33 is Ala, Cys or Pro
GXXVXXDXXGXXAXXTSTGGXXXXXXXRXXDXX

SEQ ID NO: 36487 - protein, 21 aa, Artificial sequence
  protein pattern
  Variant (2)..(2): Xaa in position 2 is Ala or Ser
  Variant (4)..(4): Xaa in position 4 is any amino acid
  Variant (6)..(6): Xaa in position 6 is Ala or Ser
  Variant (7)..(7): Xaa in position 7 is Ala or Val
  Variant (8)..(8): Xaa in position 8 is any amino acid
  Variant (9)..(9): Xaa in position 9 is Ala, Asn, Gln, Ser or Thr
  Variant (10)..(11): Xaa in position 10 to 11 is any amino acid
  Variant (12)..(12): Xaa in position 12 is Ala, Glu or Gly
  Variant (13)..(15): Xaa in position 13 to 15 is any amino acid
  Variant (16)..(16): Xaa in position 16 is Leu or Met
  Variant (17)..(17): Xaa in position 17 is Asp, Glu or Ser
  Variant (19)..(19): Xaa in position 19 is Ala, Cys, Gly or Ser
  Variant (20)..(20): Xaa in position 20 is Phe, Ile, Leu, Met or Val
NXGXGXXXXXXXXXXXXAXXM

SEQ ID NO: 36488 - protein, 14 aa, Artificial sequence
  protein pattern
  Variant (2)..(4): Xaa in position 2 to 4 is any or no amino acid
  Variant (6)..(6): Xaa in position 6 is Ala, Cys, Gly, Ser or Thr
  Variant (9)..(9): Xaa in position 9 is any amino acid
  Variant (12)..(12): Xaa in position 12 is any amino acid
  Variant (13)..(13): Xaa in position 13 is any or no amino acid
VXXXSXTGXGEXXI

SEQ ID NO: 36489 - DNA, 705 bp, Escherichia coli
  CDS (1)..(705): transl_table=11
atgcgcctggttcagctttctcgccattcaatagccttcccttccccggaaggcgcattacgtgagcctaacggcctgctggcacttgggggcgatcttagccctgcgcgcctgttaatggcttaccagcgtggtatttttccgtggttttctccaggcgaccccatcctctggtggtcgcccgatccccgcgcggtgctatggccagaatcactgcatatcagccgtagtatgaagcgatttcataaacgctcgccctatcgtgtcacgatgaattacgcttttggtcaggtcattgaaggctgtgccagcgatcgcgaagaaggaacctggatcacgcgtggcgtggtcgaagcctaccatcgccttcacgaactcggccatgcccactccattgaagtctggcgtgaagatgagcttgtcggcggtatgtacggcgtggcccagggaacgctattttgtggcgagtccatgttcagccggatggaaaatgcgtctaaaacggcgcttctggtattctgtgaggaatttatcggtcatggcggtaagcttatcgactgccaggtccttaacgatcacacagcatcgcttggtgcctgcgaaattccccgccgggattaccttaattatctcaatcaaatgcgcctcggacgattgccgaataatttctgggtaccacgatgcttgttttcaccacaagaataa

SEQ ID NO: 36490 - protein, 234 aa, Escherichia coli
MRLVQLSRHSIAFPSPEGALREPNGLLALGGDLSPARLLMAYQRGIFPWFSPGDPILWWSPDPRAVLWPESLHISRSMKRFHKRSPYRVTMNYAFGQVIEGCASDREEGTWITRGVVEAYHRLHELGHAHSIEVWREDELVGGMYGVAQGTLFCGESMFSRMENASKTALLVFCEEFIGHGGKLIDCQVLNDHTASLGACEIPRRDYLNYLNQMRLGRLPNNFWVPRCLFSPQE

SEQ ID NO: 36491 - DNA, 681 bp, Dichelobacter nodosus VCS1703A
  CDS (1)..(681): transl_table=11
atgcctcgtatttttcccgacgttgcaaccgctgatgatcaaggtttattagctgtcagccgtactttaaccgcggaattagcttttagcgcacattgtgaaggcgtatttccttggtttgaaaaagacgacaccattttatggtgggcgcctgatccgcggtgcgtcattccaaccgaccgcgcgcatttaagccgtagtttaggaaaaacgctgcgcgatcctgactaccgcatcactttagatatggattttgcagcaaccattgatcattgtgctcggctgcacggcaaaacgtggattacgccgctaattcgaaaaacttatacccgtttgcatcaacacggattggcgcacagctgcgaattatggcgcggtcaagaattaatcggtggtatgtatggcgtgggtttagataagattttttgtggtgaatcgatgttttccgtgcaaaaaagtgcttcaaaaattgtcttattatggttatgcgcttatttagctgaacacggagttttgttgttggatacgcaatttatgacgccgcacttaatgagcatgggcgccgttgaaataccgcgccagcgttatcaaacttatttaagcgagcaaccgcagcggttgcgcggaaattgggcgcaatcatcagaacaccctgccgaaaaaatcaaacgttggttttaa

SEQ ID NO: 36492 - protein, 226 aa, Dichelobacter nodosus VCS1703A
MPRIFPDVATADDQGLLAVSRTLTAELAFSAHCEGVFPWFEKDDTILWWAPDPRCVIPTDRAHLSRSLGKTLRDPDYRITLDMDFAATIDHCARLHGKTWITPLIRKTYTRLHQHGLAHSCELWRGQELIGGMYGVGLDKIFCGESMFSVQKSASKIVLLWLCAYLAEHGVLLLDTQFMTPHLMSMGAVEIPRQRYQTYLSEQPQRLRGNWAQSSEHPAEKIKRWF

SEQ ID NO: 36493 - DNA, 705 bp, Escherichia coli O157:H7 EDL933
  CDS (1)..(705): transl_table=11
  misc_feature (412)..(412): r is g or a
atgcgcctggttcagctttctcgccattcaatagccttcccttccccggaaggcgcattacgtgagcctaacggcctgctggcacttgggggcgatcttagccctgcgcgcctgttaatggcttaccagcgtggtatttttccgtggttttctccaggcgaccccatcctctggtggtcgcccgatccccgcgcggtgctatggccagaatcactgcatatcagccgtagtatgaagcgatttcataaacgctcgccctatcgtgtcacgatgaattacgcttttggtcaggtcattgaaggctgtgccagcgatcgcgaagaaggaacctggatcacgcgtggcgtggtcgaagcctaccatcgccttcacgaactcggtcatgcccactccattgaagtctggcgtgaaratgagcttgtcggcggtatgtacggcgtggcccagggaacgctattttgtggcgagtccatgttcagccggatggaaaatgcgtctaaaacggcgcttctggtattctgtgaggaatttatcggtcatggcggtaagcttatcgactgccaggtccttaacgatcacacagcatcgcttggtgcctgcgaaattccccgccggaattaccttaattatctcaatcaaatgcgcctcggacgattgccgaataatttctgggtaccacgatgcttgttttcaccacaagaatga

SEQ ID NO: 36494 - protein, 234 aa, Escherichia coli O157:H7 EDL933
MRLVQLSRHSIAFPSPEGALREPNGLLALGGDLSPARLLMAYQRGIFPWFSPGDPILWWSPDPRAVLWPESLHISRSMKRFHKRSPYRVTMNYAFGQVIEGCASDREEGTWITRGVVEAYHRLHELGHAHSIEVWREBELVGGMYGVAQGTLFCGESMFSRMENASKTALLVFCEEFIGHGGKLIDCQVLNDHTASLGACEIPRRNYLNYLNQMRLGRLPNNFWVPRCLFSPQE

SEQ ID NO: 36495 - DNA, 735 bp, Yersinia pestis KIM
  CDS (1)..(735): transl_table=11
ttgtcagtgccattaaggagatttatgcgcgtcacacagctctcatcacagtcatttatttttccctcacctgagctggctctgcgcgaaccaaacggtttattggcactagggggggatctaactgctcctcgcctactggcggcctaccagcggggtatttttccctggtttaaccctggggagatgattttatggtggtcaccagatccccgagccgtattattcccagaagatttacacatcagccggagtatgcggcgctttattcgtcattgcccttatcgttttaccctcaatcacgcttttgctgatgtgattagcgcctgtgccacagaacgtgatgaagggacatggattggccgtgatgtacaacaagcttactgccagttgcacgctttgggacatgcccattcactggaagtttggttggaaaatgagctggttggtggtttgtatggtgttgctgttggcgcggtattttgcggcgagtcgatgttcagtagggcggataacgcttcaaaaagtgcattaatggttttttgtcatcattttacccaacatggtggagaactgattgactgtcaggtcctcaacgctcacactgcgtcgctgggtgcggttgagatcccacgcaacttttttttgcagcagttgagtcaactccagtttagtccactaccggctgaatgctggttaccgcaatcgttgaatttttcatccgcgatgcagtaa

SEQ ID NO: 36496 - protein, 244 aa, Yersinia pestis KIM
MSVPLRRFMRVTQLSSQSFIFPSPELALREPNGLLALGGDLTAPRLLAAYQRGIFPWFNPGEMILWWSPDPRAVLFPEDLHISRSMRRFIRHCPYRFTLNHAFADVISACATERDEGTWIGRDVQQAYCQLHALGHAHSLEVWLENELVGGLYGVAVGAVFCGESMFSRADNASKSALMVFCHHFTQHGGELIDCQVLNAHTASLGAVEIPRNFFLQQLSQLQFSPLPAECWLPQSLNFSSAMQ

SEQ ID NO: 36497 - DNA, 741 bp, Treponema denticola ATCC 35405
  CDS (1)..(741): transl_table=11
atgcagaccggtttttcttcattatcgcttttaagttctacggaaaaaaagatactcttaaaaagaagtcaaaaggattttccttggcttgagagcgaagatttttttgattttaataaggccttgggagaagaagattatattcaaaaatcccaagatgatgaggtcatatcgggaggaaacctttcgccgggcatgattctttcggcctataaacattcttttttcccttggttttccgaagaagacccgataatctggttttctccatctctgcggtttgtaatcgacaaggcttcttttcatattccgtcccgcctaaaaagagaaataaaaaagacgaattttaagataagccgaaatgaagcctttgatgaagttatagaaaactgtgccctaatcaaaagagagggtcaaaaaggaacttggatcacggatgacatgcttcaagcttacagacttcttcataagctgggctttgctcactctgtagaagcatggagaggcggcgaattggcaggaggcttttacggcctttatataaacgaagtctttataggcgaatccatgttcagcgagataagcggagcctccaaaacagccttcgccctctttgcccaagacttctttgaaaacaaaaagggcattttaatagatgcccaaattccttccgaaaacataaaacgcttcggcggctttaaaataccgcgaaatcggtatctcgggattttaaattcctga

SEQ ID NO: 36498 - protein, 246 aa, Treponema denticola ATCC 35405
MQTGFSSLSLLSSTEKKILLKRSQKDFPWLESEDFFDFNKALGEEDYIQKSQDDEVISGGNLSPGMILSAYKHSFFPWFSEEDPIIWFSPSLRFVIDKASFHIPSRLKREIKKTNFKISRNEAFDEVIENCALIKREGQKGTWITDDMLQAYRLLHKLGFAHSVEAWRGGELAGGFYGLYINEVFIGESMFSEISGASKTAFALFAQDFFENKKGILIDAQIPSENIKRFGGFKIPRNRYLGILNS

SEQ ID NO: 36499 - DNA, 702 bp, Clostridium thermocellum ATCC 27405
  CDS (1)..(702): transl_table=11
atgcccgttttcagacttacagacaaattggtttttccccatccgtcacttgccgatgaagatggaattttagcggtgggaggagacctttcgtgcgagcgtctcctccttgcatataaaaacggaatatttccctggttttcggaagacgagcctatattatggtggtccccgaatcccaggtgtgttcttttcccaaaagacataaaaatatcgaggtctatgagaaaatttttaaagaaacagctctacgaagtcacctttgacacatgcttcagacatgtaattgccatgtgtgcaaagttgagagaaggcaatacatggataactcccgaaattatcgaaagttattccaaactgcacgacttaggattcgcccattccgttgagacctggtatgaaggtcgccttgtcggaggactttatggtgtctctttaggaaaatgtttctttggcgagtccatgttttcgactatggacaacgcttcaaaaacagcccttatcactctatgtcagaaactcgaggaaaaaggttttcttttgatagactgccaagtctattcaaaacaccttgagtctttaggagcggtaaatatagaccgtgacctgtttttaaaataccttgaagccgggctttcccatgagacactgagaggaaattggaagttcttcaatgagcaaaaacaagttcgaaataattaa

SEQ ID NO: 36500 - protein, 233 aa, Clostridium thermocellum ATCC 27405
MPVFRLTDKLVFPHPSLADEDGILAVGGDLSCERLLLAYKNGIFPWFSEDEPILWWSPNPRCVLFPKDIKISRSMRKFLKKQLYEVTFDTCFRHVIAMCAKLREGNTWITPEIIESYSKLHDLGFAHSVETWYEGRLVGGLYGVSLGKCFFGESMFSTMDNASKTALITLCQKLEEKGFLLIDCQVYSKHLESLGAVNIDRDLFLKYLEAGLSHETLRGNWKFFNEQKQVRNN

SEQ ID NO: 36501 - DNA, 732 bp, Herminiimonas arsenicoxydans
  CDS (1)..(732): transl_table=11
atgatcccgtggctggaagcagacgaccccttccccaatgtgtccagcgcgctcaccgaggccgatggcgcacccggcttgctggcagccggcgcagacctttccgccgaacgcttgctgctggcttatcaaaacgggatattcccgtggttctccgaaggtcagccgattttgtggtggagcaccgatccgcgcatggtgctgttcattcaggatttcaaaatctccgccagcctgaaaaaaacgctgaaaaaaattgatcgcagcatgattgccaacggtcgttggcaaattcgtttcgatcacgcgtttgaagacgtcatgcgggcctgtgcggcaccacgcaatggtgaagctggcacctggatatcggacgacatcatcgccggctatacccgcctgcatcgtctgggttatgcgcactcatccgagctgtggctcgatgacgagctggttggcggcttatatggcgtcagtatcggcaacatgttttacggcgaatccatgttcacacgcgtcaccgatgcctccaaaatagctctggcctatctcgtgcgcttcctgggaagtcatggagtttcgatgatagactgtcagcagcagacagcccatctggcatcgctgggcgcaatgccgatttcgcgtacagaatttatttcccttttgcgacaagctatcgcggcgccgcaaatcatggactggaaaccaattcccatgtttgaggtcaattag

SEQ ID NO: 36502 - protein, 243 aa, Herminiimonas arsenicoxydans
MIPWLEADDPFPNVSSALTEADGAPGLLAAGADLSAERLLLAYQNGIFPWFSEGQPILWWSTDPRMVLFIQDFKISASLKKTLKKIDRSMIANGRWQIRFDHAFEDVMRACAAPRNGEAGTWISDDIIAGYTRLHRLGYAHSSELWLDDELVGGLYGVSIGNMFYGESMFTRVTDASKIALAYLVRFLGSHGVSMIDCQQQTAHLASLGAMPISRTEFISLLRQAIAAPQIMDWKPIPMFEVN

SEQ ID NO: 36503 - DNA, 765 bp, Burkholderia vietnamiensis G4
  CDS (1)..(765): transl_table=11
atggtcccctggctcgacccgaacgatccgtttccgcccgtcgaacgcgcgctcgggcccgcgaccggcgcgccggggctgctcgccgcgagcgccgacctgctgccgtcgcggctgatcgacgcttacctgcgcggcatcttcccgtggtactcggacggccagccggtgctgtggtggagccccgatccgcggatgattctcgcgccggcggaattcaaggtgtcgccgtcgctgcgcaagacgctcaagcgcgtgctgcgcgacgccgcatgggaagtgcgcgtcgatcacgattttgccggcgtgatgcgcgcctgcgcgcaggcgccgcgccgcggccaacgcggcacgtggatcaccgcggagatcatcgacgcgtacacgtcgctccaccgctcgggcaacgcgcacagcatcgagacgtggcacgacggccggcgggtgggcggcctctacggcgtcgcgttcggacggatgttcttcggcgaatcgatgtacgcggatgccaccgacgcatcgaaaatcgcgctggcgacgctggtcgcgcaccttcgcgaccaggggctggaaatgatagactgccagcagaatacgtcgcatctagcgtcgctcggcggccgcgagatcgcacgcaaggcctttgtcgctcacgtgcgccgcgcggcggccgaaccgccgattccgtggcagttcgacaagcgcgcgctcgccgcgctgacgggccccgccggagcggcggcccctcgtgggatcgagcgctag

SEQ ID NO: 36504 - protein, 254 aa, Burkholderia vietnamiensis G4
MVPWLDPNDPFPPVERALGPATGAPGLLAASADLLPSRLIDAYLRGIFPWYSDGQPVLWWSPDPRMILAPAEFKVSPSLRKTLKRVLRDAAWEVRVDHDFAGVMRACAQAPRRGQRGTWITAEIIDAYTSLHRSGNAHSIETWHDGRRVGGLYGVAFGRMFFGESMYADATDASKIALATLVAHLRDQGLEMIDCQQNTSHLASLGGREIARKAFVAHVRRAAAEPPIPWQFDKRALAALTGPAGAAAPRGIER

SEQ ID NO: 36505 - DNA, 714 bp, Erwinia carotovora subsp. atroseptica SCRI1043
  CDS (1)..(714): transl_table=11
ttgaacaacatgcgtctatatcagttatcgcctcaatcgcttcagtttcctgacccgaatcatgcactggataaccccaacggcctgctggccgttggcggcgatctctccgttgccaggctgaaggtagcttaccggcaaggtattttcccctggttctctcccggtgaacctatcttatggtggtctccgaatccgcgtgcggttctgcttcccggcgaactccatcttagccgtagcatgaaaaaattcctgaagcgccatacttttcatgccacgctgaatcaggcgtttgatgatgttattcacgcctgcgcgcaggaacaccatgacggcacctggattacgccggacataatttcagcttatcgccagcttcatcaggttgggaaagcacattccgtcgaagtgtggcacaatggcgcactggttggtgggttatatggtattgaacaagggcgattattttgcggtgagtcaatgttcagccgtatggataatgcctcaaaatatgcgctactggcgtttcaacagcattttattcgccacggcggtcatttaattgattgtcaggtgttaaattcccatacagcgtcgcttggcgtgagtgaaattccacgagttcgctttctgcaacagctttcccagtggcaggatatcgctgtcgaggagggttgttggctaccacagcagctcgcagaaccggcattctga

SEQ ID NO: 36506 - protein, 237 aa, Erwinia carotovora subsp. atroseptica SCRI1043
MNNMRLYQLSPQSLQFPDPNHALDNPNGLLAVGGDLSVARLKVAYRQGIFPWFSPGEPILWWSPNPRAVLLPGELHLSRSMKKFLKRHTFHATLNQAFDDVIHACAQEHHDGTWITPDIISAYRQLHQVGKAHSVEVWHNGALVGGLYGIEQGRLFCGESMFSRMDNASKYALLAFQQHFIRHGGHLIDCQVLNSHTASLGVSEIPRVRFLQQLSQWQDIAVEEGCWLPQQLAEPAF

SEQ ID NO: 36507 - DNA, 702 bp, Desulfotalea psychrophila LSv54
  CDS (1)..(702): transl_table=11
ttggaatttcatcaaaaaaatatgaccgtatttcgattgaacagagactgtacctttccccacccgaagcatgcagagtcagatggtttactcgcagtcggcggtgatctctccgccaaacgtcttattaacggctaccgggatggtatctttccctggtattcagagggtgatcccatattatggtggtatactcatccccgttttgtcatatatcctgacaggtttactgcaggaaaacgcctgatgcgatattggaaaaagaccagctataccttcactatagaccaggcattttcgcaagttattggcctctgcggttcttcccgaacaggccgaggtgaagagacatggatactacccgaaatgcgagaggcatatggacaattacatgagcttggttatgcccattctgttgagtgctgggatgttgacaggctggtaggggggctttatggggtagagttaggtggcgttttcttcggtgaatctatgttctcaactgtaagtaatagctctaaattttgtcttatttatttagttgaacaggcccggaaaaggggcgttcaacttattgattgtcaaatgaccacccggcatcttcttcagtttggtgcggtggagataagcggcgaaaaattttaccaacatctgcaactgcttattgctgatatcggacctcaacctgcgtggaaaatatga

SEQ ID NO: 36508 - protein, 233 aa, Desulfotalea psychrophila LSv54
MEFHQKNMTVFRLNRDCTFPHPKHAESDGLLAVGGDLSAKRLINGYRDGIFPWYSEGDPILWWYTHPRFVIYPDRFTAGKRLMRYWKKTSYTFTIDQAFSQVIGLCGSSRTGRGEETWILPEMREAYGQLHELGYAHSVECWDVDRLVGGLYGVELGGVFFGESMFSTVSNSSKFCLIYLVEQARKRGVQLIDCQMTTRHLLQFGAVEISGEKFYQHLQLLIADIGPQPAWKI

SEQ ID NO: 36509 - DNA, 735 bp, Methylobacillus flagellatus KT
  CDS (1)..(735): transl_table=11
atggtcgattccacaacaactcaacaagatgaccctcgcatgacacatcaatactaccgcttgcctggcggcccggtacgtgtattgcaggccggtacaccctttcctcccctggaggccgctctgcgggagcccaatggactgattgccattggcggcgacctgactgccgaacgcctgctcaacgcatatgcgcagggcatattcccctggttcagcgagggagagcccatactgtggtggagtccggatcctcgcatggtgctgttccccggcgaactgaaaatttcccggtcattggccaagcggctcaagcgccgagattatgaaatccgcttcaacacggctttcagccaggtcattgccgcatgcgccgccactccgcgcgaaggccaggatggtacctggattaccgacggcatcatggaagcctacaatacgctgcatctgctaggccacgcccacagcgccgagacctgggtggatggcaaactggtgggcggcttgtacggcgtcagcctgggcaggatgttctacggggagtccatgtttcatcatacaaccgatgcctccaagctcgcatttgtgcatatggtgcgacgccttcaagcactggggtatggcatgatcgactgccagatgaaaacccggcacctggcctcgctaggcgcacgcgagattacccgcgcggaattttcccaacgactgaatgaattggtacactacccagcatga

SEQ ID NO: 36510 - protein, 244 aa, Methylobacillus flagellatus KT
MVDSTTTQQDDPRMTHQYYRLPGGPVRVLQAGTPFPPLEAALREPNGLIAIGGDLTAERLLNAYAQGIFPWFSEGEPILWWSPDPRMVLFPGELKISRSLAKRLKRRDYEIRFNTAFSQVIAACAATPREGQDGTWITDGIMEAYNTLHLLGHAHSAETWVDGKLVGGLYGVSLGRMFYGESMFHHTTDASKLAFVHMVRRLQALGYGMIDCQMKTRHLASLGAREITRAEFSQRLNELVHYPA

SEQ ID NO: 36511 - DNA, 711 bp, Shewanella sp. MR-4
  CDS (1)..(711): transl_table=11
gtgaactcactgtcttttctgaatcacgaatttgaagcttttccttcacccgaactcgccctcaccgatccaaacggcttattggcgataggcggtgacctacgcccagaacgtttattgaccgcttattatcacggtattttcccttggtttaacgccgacgaccccattttgtggtggtcgcccgatccccgtgccatttttattccaggccaagtgaatatcagcaccagtttacgtaaatatttaaaaaaacagccctggcgcttcaccatcaatcatgcctttaccgatgtgatggcgggttgcgctcaaccaagacgtaagcaagctggcacttggataacccatgaaattcaaatggcttatcgcgagttgcatcacaacggccacgctcactcagtcgaggtctggcacggtgagcgattgattggcggactttatggtcttgccatcggccaagtcttttgtggtgaatccatgttccaccgtgaaaccaacgcctcaaaggcggccatgttgttattgcaacagcatcttatcaacatggattttaaactgattgacgcacaagtgatgaatccccaccttgaaagcttaggggccaagcccgttaaacgcgcgaattttattcaactcttaacccagtttagggataacacggccaatcctgcggcttggataccgagtgaggtcacacttgaactctaa

SEQ ID NO: 36512 - protein, 236 aa, Shewanella sp. MR-4
MNSLSFLNHEFEAFPSPELALTDPNGLLAIGGDLRPERLLTAYYHGIFPWFNADDPILWWSPDPRAIFIPGQVNISTSLRKYLKKQPWRFTINHAFTDVMAGCAQPRRKQAGTWITHEIQMAYRELHHNGHAHSVEVWHGERLIGGLYGLAIGQVFCGESMFHRETNASKAAMLLLQQHLINMDFKLIDAQVMNPHLESLGAKPVKRANFIQLLTQFRDNTANPAAWIPSEVTLEL

SEQ ID NO: 36513 - DNA, 777 bp, Alkalilimnicola ehrlichei MLHE-1
  CDS (1)..(777): transl_table=11
atgtaccgactctactggctggatgaacacaacccgcgcagtccctttcctcccgccgagcaggcgatggacgaacccaacgggctgctcgcggtggggggcgacctgtcgccggtgcgcctggagcaggcctaccggcggggcatcttcccctggtacgggcccggtcaacccatcctctggtggagccccgacccgcgctgcatcttccgcccgggctggttgcacgtcagccgccgactggcacggcggctgcgcaccggcgcgttccgcatgagcctggacaccgacttcaccggcgtcatcagtgcctgcgcggccccgcgggaggaccaggccggcacctggatcgtgcccgagatgatgcacgcctacgaggcgctgttcgaactgggcatcgcccattcggtggagtgctgggaccgggacggcgagctggtgggcggtctgtacggcgtggccctgagcggggccttcttcggtgagagcatgttcagccggcgcagcgacgcctccaaggcctgcatggcctggctcagcgcgcagctccaccgctggggcttcgccctgttcgactgccaggtcagctccccccacctgcgccgcatgggcgccgtggatgtcagccgcagccgctttctcgcccagcttcagcaggccctggtcctgccccaccggcgcgggccctggcgcttcgaccgggacctggacccggtggccatccatcgacaacaccaaacgcggaccaccgcaccggaggtgctgtatgggtcgtaa

SEQ ID NO: 36514 - protein, 258 aa, Alkalilimnicola ehrlichei MLHE-1
MYRLYWLDEHNPRSPFPPAEQAMDEPNGLLAVGGDLSPVRLEQAYRRGIFPWYGPGQPILWWSPDPRCIFRPGWLHVSRRLARRLRTGAFRMSLDTDFTGVISACAAPREDQAGTWIVPEMMHAYEALFELGIAHSVECWDRDGELVGGLYGVALSGAFFGESMFSRRSDASKACMAWLSAQLHRWGFALFDCQVSSPHLRRMGAVDVSRSRFLAQLQQALVLPHRRGPWRFDRDLDPVAIHRQHQTRTTAPEVLYGS

SEQ ID NO: 36515 - DNA, 708 bp, Magnetococcus sp. MC-1
  CDS (1)..(708): transl_table=11
atgcctgtctatcgactcgctgccgaacataatgcctttccccccgccgagggggcgaatgaagatggcttggtcgctgttggtggcgatctgtcaccgcaacggctgttggcggcctatcgaagcggtatttttccctggtacagtgccggcgagcccctcttgtggtggagtttggatccccgcttggtgctgcggccccccgcgctgcatgtgccgcgctccttaaaaaaagcgattcggcaaggggcgtttcgtatcacctttgaccatgtgtttgaacaggttatgcaccaatgtggggccgtgcgtgcggcagaaggcacctggattaccccagagatggagcaggcttacctgcgtctgcaccagatgggctttgcccatagctgcgaaagttggctgatggatgaaaaccaccgctatcaactggcgggggggatttatggggtggccattggcggggctttttttggggagtcgatgttctatcgccagcccaacgcctccaaggtggcgctggtggccctggtggggcacttggcccagcagggctatagcctaatggattgccaaatgaccacccagcacatgctgcgcttcggggcggttgagatgccccgttcggtgtttttagaagatcttcaacaggcgattgcacagcccataccggcgggcctgtggcaaacggtaagcccgcttatttaa

SEQ ID NO: 36516 - protein, 235 aa, Magnetococcus sp. MC-1
MPVYRLAAEHNAFPPAEGANEDGLVAVGGDLSPQRLLAAYRSGIFPWYSAGEPLLWWSLDPRLVLRPPALHVPRSLKKAIRQGAFRITFDHVFEQVMHQCGAVRAAEGTWITPEMEQAYLRLHQMGFAHSCESWLMDENHRYQLAGGIYGVAIGGAFFGESMFYRQPNASKVALVALVGHLAQQGYSLMDCQMTTQHMLRFGAVEMPRSVFLEDLQQAIAQPIPAGLWQTVSPLI

SEQ ID NO: 36517 - DNA, 711 bp, Shewanella sp. ANA-3
  CDS (1)..(711): transl_table=11
gtgaactcactgtcttttctgaatcacgaatttgaagcttttccttcgcccgaactcgctctaactgatccaaacggtttattggcgataggcggcgatcttcgccctgaacgtttattgaccgcatattatcatggcattttcccttggtttaacgccgacgatcccattttgtggtggtcaccggatccacgcgccatttttattcctggccaagtgaatatcagcaccagtttgcgtaaatatttaaaaaaacagccctggcgtttcaccatcaaccatgcctttaccgatgtcatggcgggctgcgctcaacctcggcgtaagcaagccggcacttggataacccatgaaattcaaatggcttatcgcgagttgcaccataatggccatgcccattccgtcgaagtctggcacggcgagcgtttaattggcggactttatggcattgccatcggccaagtcttttgtggggaatccatgttccaccgcgaaactaacgcatccaaggcggccatggcggtgttgcaacagcatcttatcaaaatgaattttaaactgattgacgcacaagtgatgaatccccaccttgagagcttaggggccaaaccggtgaagcgcgctgattttattcaactcttaactcagtttagggataagccagtcaaccctgcggcttggataccaagtgaggtcacacttgaactctaa

SEQ ID NO: 36518 - protein, 236 aa, Shewanella sp. ANA-3
MNSLSFLNHEFEAFPSPELALTDPNGLLAIGGDLRPERLLTAYYHGIFPWFNADDPILWWSPDPRAIFIPGQVNISTSLRKYLKKQPWRFTINHAFTDVMAGCAQPRRKQAGTWITHEIQMAYRELHHNGHAHSVEVWHGERLIGGLYGIAIGQVFCGESMFHRETNASKAAMAVLQQHLIKMNFKLIDAQVMNPHLESLGAKPVKRADFIQLLTQFRDKPVNPAAWIPSEVTLEL

SEQ ID NO: 36519 - DNA, 714 bp, Vibrio vulnificus CMCP6
  CDS (1)..(714): transl_table=11
atggcgatctatctgacagaacttgatagtaaaagtttagactttcctcctgcagaaaatgcattagccgatccaaatggcttattggcctttggtggtgacctcactccagaaagactgatcgcagcatatcaccacggtattttcccgtggtatgggccgggagagccgattttgtggtggagtccatcaacgcgagccgtttttgatccaaacaccttcttacccgctaaaagccttaaaaagttccagagaaaggctcaataccaagtcagcattaatcatgcgacgccagaagtcattaagctatgtggcaacacacgaccagcggaagaaacttggctaaatgaagagatgcaagcggcctacatctcattagctttgcaaggtgtctgtcactcggttgaggtttggcaagatcaaagactcattggcggtttctatggccttagcataggagaattgttttgtggcgaatcgatgtttagcctcgaaaccaacgcatctaaaattgcattatggtatttttgccgtcatttcagcgagcatggtggcaagctgatcgattgccaggtgatgaattctcatttgcactcattgggggcttttacgttgccgagagaggaatttctccaacggctgctatgcttaaaacaacagagagtaacgtcgggttgtttctcaccccaatggttgaagaggcacaatgcatga

SEQ ID NO: 36520 - protein, 237 aa, Vibrio vulnificus CMCP6
MAIYLTELDSKSLDFPPAENALADPNGLLAFGGDLTPERLIAAYHHGIFPWYGPGEPILWWSPSTRAVFDPNTFLPAKSLKKFQRKAQYQVSINHATPEVIKLCGNTRPAEETWLNEEMQAAYISLALQGVCHSVEVWQDQRLIGGFYGLSIGELFCGESMFSLETNASKIALWYFCRHFSEHGGKLIDCQVMNSHLHSLGAFTLPREEFLQRLLCLKQQRVTSGCFSPQWLKRHNA

SEQ ID NO: 36521 - DNA, 684 bp, Nocardioides sp. JS614
  CDS (1)..(684): transl_table=11
atgggtgccgacctggagccgggcaccctgctcgcggcgtaccgacgcgggctgttcccgatgccgtccgggcggccgggcgacccgatggcgtggttctgcccggtgcgccgcggcgtcgtcccgctcgacgggctgcgggtgtcgcggtccctgcgccgcgcgacccgcgacttcgagatccgcatcgacacggccttcgaccaggtggtcgcgggctgcgccgacccgcgccgctccggcggctggatcgacgaggaggtcggagcggcgtacgccgcgctgcaccagctgggctgggcgcactcggtcgaggcctggcgccacggtcggctggccggtgggctgtacggcgtcgccatcggtgggctgttcgcgggtgagtcgatgttccaccggcagcgggacgcctcgaaggtcgccctggtggcgctggtcgaggcgttgaacgacgagtggacggccgaccggctgctcgacgtgcagtggctgacccctcacctggcctcgctcggggcggtcgaggtcccgcgcccgacgtacctccgccggctcgcgcgagcgctcccgctgccgctcccagagcccttttcctctgtcgcgccgacccccggcgggtggagcatgggcgcaccggccgggccggagcccgacggaccaccgagacgggagacggacagatga

SEQ ID NO: 36522 - protein, 227 aa, Nocardioides sp. JS614
MGADLEPGTLLAAYRRGLFPMPSGRPGDPMAWFCPVRRGVVPLDGLRVSRSLRRATRDFEIRIDTAFDQVVAGCADPRRSGGWIDEEVGAAYAALHQLGWAHSVEAWRHGRLAGGLYGVAIGGLFAGESMFHRQRDASKVALVALVEALNDEWTADRLLDVQWLTPHLASLGAVEVPRPTYLRRLARALPLPLPEPFSSVAPTPGGWSMGAPAGPEPDGPPRRETDR

SEQ ID NO: 36523 - DNA, 708 bp, Azoarcus sp. BH72
  CDS (1)..(708): transl_table=11
atgatcccgtggctgaccgaccgcccggcgtttccgcctgttgaacgcgccctgaccgagcccaacggcctgctcgccgccggcggccggctgacgcccgaatggctgctcgcggcctaccggcgcggcatctttccgtggtacagcgacggcgaacccatcctgtggtggagcccggacccacgcctggtgctgcaaccggcccagatccgcatcacgcgctcgctgcgcaaggtgctgcgcgggcgacgcttcgaagtgcgcttcgacaccgcctttgcacgcgtcatcgaagaatgcgccgccccgcgcgaacccggcggcggcacctggatcaccccggaaatccgcgccgcctatctgcggatgcacgaactgggctacgcccacagtgtggagtcatggctcgacggccgcctcgtcgggggcctctacggcatggcactggggcgcgccttcttcggcgaatccatgttcagccgcgtcagcgacgcttccaaggtcgccctcgcccacctcgcccgcttccttgagcagcgcgattttggcgtgatagattgccagatgactacgccccacctgctctccatgggggctcacgaaatcgcccggcgcgagttctgcgcgggcctggaacggtggacggtggaaggaccgccgcccgcgaaatggagcggaacgactgccgccgaattcgactggaactga

SEQ ID NO: 36524 - protein, 235 aa, Azoarcus sp. BH72
MIPWLTDRPAFPPVERALTEPNGLLAAGGRLTPEWLLAAYRRGIFPWYSDGEPILWWSPDPRLVLQPAQIRITRSLRKVLRGRRFEVRFDTAFARVIEECAAPREPGGGTWITPEIRAAYLRMHELGYAHSVESWLDGRLVGGLYGMALGRAFFGESMFSRVSDASKVALAHLARFLEQRDFGVIDCQMTTPHLLSMGAHEIARREFCAGLERWTVEGPPPAKWSGTTAAEFDWN

SEQ ID NO: 36525 - DNA, 726 bp, Neisseria meningitidis FAM18
  CDS (1)..(726): transl_table=11
atgcgtattccgctgcttgcccctgacaattatgcctttcccgatcctgcctatgctttggcacggtgcgacgggctggtcggcgtgagcagggatttggacgcggggcggctgctcgaggcgtatcggaacggcgtgtttccttggtttttgcgagacggttggtttttttggtatgcggtcgggccgcgtgcggtgattgttcccgaacgtctgcacgttccgcgctcgctggagaaaacgctacgcaactgcagctatcgggttacggtcaacggctgttttgcggaagtggtcgcgcattgtgcggcagcggtgcgcccgaatcaggacggaacttggattgcgcccgagtttcagacggcatatttgaagctgcacgaaatgggatacgcgcattcgtttgagtgccattatcccgatgaaaacggtaaaacgaggttggcgggcgggttttacggcgttcagatcggcagggtgttttacggcgaatcgatgttcgcattacaaccggatgcgtcgaaaatcgcgtttgcctgcgccgtgccgtttctcgcgtctttgggtgtggaactgatagactgccagcaggatacggggcatatgcgccgtttcggttcggagctgctgccgtttgcggattttgccgaacgtctgcggatgttgaacgccgtgccgttgaaagaggaaatcgggcggcgcgaagtggcgtgcaaggggctttga

SEQ ID NO: 36526 - protein, 241 aa, Neisseria meningitidis FAM18
MRIPLLAPDNYAFPDPAYALARCDGLVGVSRDLDAGRLLEAYRNGVFPWFLRDGWFFWYAVGPRAVIVPERLHVPRSLEKTLRNCSYRVTVNGCFAEVVAHCAAAVRPNQDGTWIAPEFQTAYLKLHEMGYAHSFECHYPDENGKTRLAGGFYGVQIGRVFYGESMFALQPDASKIAFACAVPFLASLGVELIDCQQDTGHMRRFGSELLPFADFAERLRMLNAVPLKEEIGRREVACKGL

SEQ ID NO: 36527 - DNA, 765 bp, Acidovorax sp. JS42
  CDS (1)..(765): transl_table=11
ttgattgcctgcatgaccacatcgcttccctggctggagcccgacgatccttttccacccaccgacggtgcctggggcacggactctcccgcgcccggcctgctggccgcgggcggcacgctgggggtgccccgcctggtgcaggcctatgcccagggtgtctttccgtggttcagcaccggccagcccatcctgtggtggagcccggacccgcgcatggtgctgcatgtgcaggaattccgcctgcatcgatcgctgcgccgcgtgctgcagcgctttcgcgccacgcccggttgcgaggtgcgcatcgacagcgacttttccgccgtgatccacgcctgcgccaacaagccgcgggccgggcagtccggcacctggatcgtgccctccatggttgccgcgtatgaggcgctgcatgctgctggccatgcccatagcgtggaaacctgggtgaacgggcaactggtgggggggctttattgcgtggcgctaggacgggccgtgtttggcgaatcgatgttcgcgcacgcgaccgatgcttccaagatcgccctggcggcgctggtatgcctgtgccggcgcgagggggtccggttgatcgactgccagcagaacacgggccatctggcctcgctgggcgcccgggagatggaacgttcgcagtttctgaatcacgtggcgcgagcgcggcaagaccctgcctgcacctggaaattcgagcccgtatactggaccgagcttttgcccaacccctcagcggcgtga

SEQ ID NO: 36528 - protein, 254 aa, Acidovorax sp. JS42
MIACMTTSLPWLEPDDPFPPTDGAWGTDSPAPGLLAAGGTLGVPRLVQAYAQGVFPWFSTGQPILWWSPDPRMVLHVQEFRLHRSLRRVLQRFRATPGCEVRIDSDFSAVIHACANKPRAGQSGTWIVPSMVAAYEALHAAGHAHSVETWVNGQLVGGLYCVALGRAVFGESMFAHATDASKIALAALVCLCRREGVRLIDCQQNTGHLASLGAREMERSQFLNHVARARQDPACTWKFEPVYWTELLPNPSAA

SEQ ID NO: 36529 - DNA, 852 bp, Kineococcus radiotolerans SRS30216
  CDS (1)..(852): transl_table=11
gtgactccttcagctgaaccgcagcgccccgcgccgcgcgaaccggcccccgcacctcccggtgcgggggccggtcctgtgtgggcggcgccgctgcccggccccgggcggggacgccgccgccgcgaccccgggcccgcctccttcgcgttcgccgacctcgtcgcgcccgaggacgacgacctcgtggcggccgggggcgacctggacccggcgacgctgctggaggcctaccggtgcggcctcttccccatggggctgggcggcggggggcgcggaccggtcggctggtggtccccggaccctcggggcgtcctggtacccgaggacgtccacgtctcccggtcgctgcgccgggcggtgcgccgcttcgaggtccgggtggacaccgccttcgacgaggtcgtcgccggctgcgccgaccccgcccgccccggcgcctggatcacggcggaggtggcgcgggcctacgcccggctgcaccggctgggctgggcgcactcggtggaggtgtggtgcgggggggagctggccgggggcctgtacgggctgagcatcgggggcctcttcgccgcggagtccaagttccaccgcgtcaccggcgcctccaaggcggcggtggtggccctggcgcagctcgtgaccgccgacggggtccggggccggctggtggacgtgcagtggcgcaccgagcacctggcgaccctcggcgtgcgggaggtccccagagccgcgtacctgaggtcgttgcgggccgccctggccctgccggggcccccggtcttcgagcccgcgacgtccccgtccggcgtggcgcgccccgaacggcgcaccgactacgacggggggtag

SEQ ID NO: 36530 - protein, 283 aa, Kineococcus radiotolerans SRS30216
MTPSAEPQRPAPREPAPAPPGAGAGPVWAAPLPGPGRGRRRRDPGPASFAFADLVAPEDDDLVAAGGDLDPATLLEAYRCGLFPMGLGGGGRGPVGWWSPDPRGVLVPEDVHVSRSLRRAVRRFEVRVDTAFDEVVAGCADPARPGAWITAEVARAYARLHRLGWAHSVEVWCGGELAGGLYGLSIGGLFAAESKFHRVTGASKAAVVALAQLVTADGVRGRLVDVQWRTEHLATLGVREVPRAAYLRSLRAALALPGPPVFEPATSPSGVARPERRTDYDGG

SEQ ID NO: 36531 - DNA, 735 bp, Xylella fastidiosa Dixon
  CDS (1)..(735): transl_table=11
gtgcattcccaaccctatctgctctctcccgcacccaacaatacaccattcccacccgcggaacacgccctgcgcgaacccaatgggctccttgcaatcggcggtgacctgaccccacaacgtttgctcgcagcttataggagcggcatatttccatggttcacagaaggacaaccgccgttgtggtggtcgcctgaccctcgcaccgtgtttcacagtgacagcatccatttgagcagacgcttccgccgcagcctacgcacttcaacctggagagtgcgcgccgacacaatgttcgccgcagtgatcgacgcctgtgcatctaccccgcgccgcggccaagatggaacatggatcactgcgaatatgcgcgaagcgtacctcacgctacatcaacatggttatgcccattcggtcgaagtatttgacggcaccatgctcgttggtggtatttatggcgtggcaattggacgcatgttttttggcgaaagcatgttcagtactcacaacggagcctccaaaatcgctctcgccagtcttgcatatttcttacacacccacagcgtgccactcattgatgcccaagtcgagaaccagcacttgctgaatctgggtgccgaacgctggccacgaagggacttcctgacctacgtacgtcgcttaatcacgcaaactgagctacctgcctgttggagtgtactgttcggtgagaagctaagtagagacctcgtataa

SEQ ID NO: 36532 - protein, 244 aa, Xylella fastidiosa Dixon
MHSQPYLLSPAPNNTPFPPAEHALREPNGLLAIGGDLTPQRLLAAYRSGIFPWFTEGQPPLWWSPDPRTVFHSDSIHLSRRFRRSLRTSTWRVRADTMFAAVIDACASTPRRGQDGTWITANMREAYLTLHQHGYAHSVEVFDGTMLVGGIYGVAIGRMFFGESMFSTHNGASKIALASLAYFLHTHSVPLIDAQVENQHLLNLGAERWPRRDFLTYVRRLITQTELPACWSVLFGEKLSRDLV

SEQ ID NO: 36533 - DNA, 639 bp, Croceibacter atlanticus HTCC2559
  CDS (1)..(639): transl_table=11
atgtacttattagacgagacgttatggttccccaatccgagtgaagctaatcaagatggcttgttggctgtaggcggaaatttatctccagaacgtttgtcattagcctataactctggtatttttccttggtttaatgatgacgaaatgattatgtggtggtcaccaaatccaaggatggtgttatttccaaaagaactaaaagttcataaaagtatgcgccaattatttaatcaacaaaagtttaaagtaacatacaacacccattttaaagatgttataactgcgtgttctgaaattgagagaccagaccaagacggtacttggattacatctcaaatgattgatgcttatacagaattacaccaccaaggtgttgcaacgtctgtagaggtttggcaagacaatttactggtaggcggtttgtatggcatttacctaaaagacaaacacctgttttgtggagaaagtatgtttacaaaagttagtaacgcctcaaaatacgggtttatatcattagtgagaaaacttgaaagcgaaggtgtaaaacttattgattgccagatgcacactaatcacttggaacgtctaggtgctaaagaaatttcaagggaatcgtttttagagtttctaaaatag

SEQ ID NO: 36534 - protein, 212 aa, Croceibacter atlanticus HTCC2559
MYLLDETLWFPNPSEANQDGLLAVGGNLSPERLSLAYNSGIFPWFNDDEMIMWWSPNPRMVLFPKELKVHKSMRQLFNQQKFKVTYNTHFKDVITACSEIERPDQDGTWITSQMIDAYTELHHQGVATSVEVWQDNLLVGGLYGIYLKDKHLFCGESMFTKVSNASKYGFISLVRKLESEGVKLIDCQMHTNHLERLGAKEISRESFLEFLK

SEQ ID NO: 36535 - DNA, 636 bp, Sulfitobacter sp. EE-36
  CDS (1)..(636): transl_table=11
atgcctgacctcacgcccgagctgttattacacggctattccatcgggattttccccatggccgaacaccgcgacgatccagagattttctgggtcgatccgcggcgtcggggtgtctttcccctcgacgggttccatatctcgcggtcgctggcgcgcgcgatgcggcgcacgcgctttaccatcaccaccaacaccgcgttcaacgacgttgtcaccggctgcgccgatcgcgccgacacctggatcaacgccgagatttttagcctttatggccagctacacgcgcttggtcatgcccacgcccttgaggtctgggaggatgacatgctggtgggcggggtttatggcgtcacgctggggcgtgcgttctttggcgaaagcatgttttcaaggcgcgacaacgcgtccaagatcgcgctggcctgtctggtggaccggttgaaccgcggcgggtttaccctgtttgacacacagttcctgaccccgcatctggcgtcccttggcgcgcaagagatcacccgcgcggcctatcacgcacggctagagatggcgttgatgaaaaccgcagacttcacagcgcccgctgcggccagccctcaggacgtagtgcagcggatgacccagatgtcatag

SEQ ID NO: 36536 - protein, 211 aa, Sulfitobacter sp. EE-36
MPDLTPELLLHGYSIGIFPMAEHRDDPEIFWVDPRRRGVFPLDGFHISRSLARAMRRTRFTITTNTAFNDVVTGCADRADTWINAEIFSLYGQLHALGHAHALEVWEDDMLVGGVYGVTLGRAFFGESMFSRRDNASKIALACLVDRLNRGGFTLFDTQFLTPHLASLGAQEITRAAYHARLEMALMKTADFTAPAAASPQDVVQRMTQMS

SEQ ID NO: 36537 - DNA, 654 bp, Oceanicola batsensis HTCC2597
  CDS (1)..(654): transl_table=11
atgaaagaccacgacgccagcgatctgacgccggaccttttgctgcatgcctacgcgtcgggtatctttccgatgtccgagcaccgggacgaccccgagatcttctgggtggaaccgcgccgaaggggcatcataccgctcgacgggttccgcacctcgcgctcgctctcccgggctctccggcgcgacgactataatgttacgatcaaccgtgacttcaccggcgtcctcgacggctgtgcggatcgtgacgagacctggatcagcggccgcatcgtggccctctaccaccagcttcacctcagcggctatgcccattcgctcgaggtctggcgcgagggcgcgctgatcggcggcgtctacggggtcgccctgggcggcgccttcttcggcgaaagcatgttctcgcgccgcaccgatgcctcgaagatcgccctcgcctggctggtcgcgcatctacggaacggcgggttcgaactcttcgacacgcagttcctgacgccgcacctcgcctcgctcggcgggatcgaggtcagccgtgccgaataccggtcacgcctggccgaggcgctggtgcatccggccgccttcaccacgcccgccctgcccgcttcgggtcaggaggtcgtgcagctcaacacccagacatcgtag

SEQ ID NO: 36538 - protein, 217 aa, Oceanicola batsensis HTCC2597
MKDHDASDLTPDLLLHAYASGIFPMSEHRDDPEIFWVEPRRRGIIPLDGFRTSRSLSRALRRDDYNVTINRDFTGVLDGCADRDETWISGRIVALYHQLHLSGYAHSLEVWREGALIGGVYGVALGGAFFGESMFSRRTDASKIALAWLVAHLRNGGFELFDTQFLTPHLASLGGIEVSRAEYRSRLAEALVHPAAFTTPALPASGQEVVQLNTQTS

SEQ ID NO: 36539 - DNA, 720 bp, Erythrobacter sp. NAP1
  CDS (1)..(720): transl_table=11
atgcactcgccacttcgcgccaccatcccggtcgagacgctgctgcttgcctatcgcagcggtatctttccgatggccgacaagcgcgaggatcaagacatcttctgggtagagccgcgcgaccgggcgatcatcccgctaagcggcctccacgtctcgaaaagcttgcgcaaggtgcttcgctcagaccgcttcgaggtcacgcataacgaggcctttaccgaagtgatgcgcgcctgcgctgcgccgcgtccgggccatcccgaaagctggatcagcgaacgcatcgtcgcaagctacaccggccttcaccgtgccggccatgcgcattcgctcgaatgctggcttacgggcgatgcgggcgagcgccgacttgtgggcggcctctacggtgtctcgttcgacaaggtgttctgcggcgaaagcatgttcagccttgcgagcaatgcgagcaaggtcgcgctgtgctggcttgtcgcgatgctgcgcgaggcgggttaccagttgctcgactgccagttcatgaccgaccacctcgcctcgatgggcgcggtggagatgccgcagaaggattacctcgcgctcgtcgagaaagcgcgcggggaagccgaactgagccttgatgtgacctatcaacggttcgcccatggcgatccgtacaatcccgattattcgtcgcctggaaagctcatcgcgcagtctttgacccagacatcgtag

SEQ ID NO: 36540 - protein, 239 aa, Erythrobacter sp. NAP1
MHSPLRATIPVETLLLAYRSGIFPMADKREDQDIFWVEPRDRAIIPLSGLHVSKSLRKVLRSDRFEVTHNEAFTEVMRACAAPRPGHPESWISERIVASYTGLHRAGHAHSLECWLTGDAGERRLVGGLYGVSFDKVFCGESMFSLASNASKVALCWLVAMLREAGYQLLDCQFMTDHLASMGAVEMPQKDYLALVEKARGEAELSLDVTYQRFAHGDPYNPDYSSPGKLIAQSLTQTS

SEQ ID NO: 36541 - DNA, 759 bp, Pseudoalteromonas tunicata D2
  CDS (1)..(759): transl_table=11
ttgttatcattaacattacaatacccaacaaaagcaactatgaatcgcattttatatcagctgtcaaaccatactgttgaatttccagatcctactcttgcattggaagatcctgatggcttacttgctattggaggagatttatcagccactagactcattaacgcatatcaacatggggtcttcccttggttcaatgatgacgatcccattatgtggtggagcccatctcagcgagccattatcgagcttgaagagtttcatgttagccgcagcctaaaaaaaagcttaaacaagcacccttttaaagtattcatcaaccgagattttgcagaggtgatgtatcaatgccagcgccaacgcattcaccatgagggtacatggataagtgatgagatgttagacgcttatacaacgcttcataaaatgggtcatgcccacagcattgaaatatggttaaatgatcagctagttggtggattatatggcattatgttaggcgctgttttttgtggtgaatcaatgtttcataccatgccaaatacttctaagcttgcaagttgggccttagttaattggcttaaaagaaaccaaggcgcgtttattgattgccaagtacttaatccacatactgcatcgttaggagctaaggccatctcaagagacgaatatttatcgcgattatcaacccaaatgactcatatcgaccttaaacgtatgtggcaaagccaagagctaataaatatatatgaatactaa

SEQ ID NO: 36542 - protein, 252 aa, Pseudoalteromonas tunicata D2
MLSLTLQYPTKATMNRILYQLSNHTVEFPDPTLALEDPDGLLAIGGDLSATRLINAYQHGVFPWFNDDDPIMWWSPSQRAIIELEEFHVSRSLKKSLNKHPFKVFINRDFAEVMYQCQRQRIHHEGTWISDEMLDAYTTLHKMGHAHSIEIWLNDQLVGGLYGIMLGAVFCGESMFHTMPNTSKLASWALVNWLKRNQGAFIDCQVLNPHTASLGAKAISRDEYLSRLSTQMTHIDLKRMWQSQELINIYEY

SEQ ID NO: 36543 - DNA, 714 bp, Photobacterium sp. SKA34
  CDS (1)..(714): transl_table=11
atgactatttatttaccagagctcgatagcagcacttaccaattcccacacccatcaaacgccttatcagaacctaatgggttactggcaatgggaggagatctcagccccaaacgcttacaaactgcctatcgtgaaggtattttcccttggttttctgaaggtgaacctcttctttggtggagtcctacccctcgtggcgtttttcatccacatacctttatgccaagtaagagcttgaagaagtttttccgcaaatcaggctataccgttacgattaataagggatgccatgatgtgattcgtcactgtgctagttgtcgagggcctgaacaaacttggatcactgaagaaatgatttcagcctatcaaagactacataccctaggtatttgtcattccgtggaagtttggtctagtggaaaactagtaggcggtttttatggtattgaaataggaactgttttttgtggtgagtcgatgttttcattggcagataatgcatctaaaattgcattatggcagttttgtcgttatttctcggagcttggtggtacattaattgattgtcaaatgatgaacccacaccttgaatccttaggcgcagaaacctttgagcgttcgttatttttagaccgtctttaccagcagcgagatattatactgccaattgaaacctatctttctcacgttttaccgattgcacaggcctaa

SEQ ID NO: 36544 - protein, 237 aa, Photobacterium sp. SKA34
MTIYLPELDSSTYQFPHPSNALSEPNGLLAMGGDLSPKRLQTAYREGIFPWFSEGEPLLWWSPTPRGVFHPHTFMPSKSLKKFFRKSGYTVTINKGCHDVIRHCASCRGPEQTWITEEMISAYQRLHTLGICHSVEVWSSGKLVGGFYGIEIGTVFCGESMFSLADNASKIALWQFCRYFSELGGTLIDCQMMNPHLESLGAETFERSLFLDRLYQQRDIILPIETYLSHVLPIAQA

SEQ ID NO: 36545 - DNA, 705 bp, Oceanospirillum sp. MED92
  CDS (1)..(705): transl_table=11
atgatcccttggttacaagacgcagacacaccttttcctcctatcgatatggcgctcgatgaacctaatggtttgttagccgcaggaggcgaacttgatcagcaacgcatcatcactgcctaccgctctggaatctttccatggtatagccctggcgaacccgtactttggtggagcccaaatcccagatgtgttgtttttcccgatcaacttcacgtctcaagaagtatgcgtaagcgattgaagaaaaaggattttaaggttgtttttgacactaatttcgatgcagtgatcaatgcctgcgcggcgccaagagatggtgcagacggcacatggattaccgctgaaatgaaggctgcctacaacgcgttacatgccgcaggcatagcccactccgttgaagtctatatggacgatcaattagtcggcggactttatggactagccataggcaaactattcttcggtgagtctatgtttagccgtagtcgcgatgcttcgaaaattgcatttattaaaatggtcgaacagatgcaaatctggggctatgctttaattgattgccaggttagtaacgagcacctgttctctttgggcgcaactgaaatacccagggatcagtttcagtcctatctgaataggtatttggatcaacctcagtctcatgcctggcagtttgatgcgatagattctgaactggagtaa

SEQ ID NO: 36546 - protein, 234 aa, Oceanospirillum sp. MED92
MIPWLQDADTPFPPIDMALDEPNGLLAAGGELDQQRIITAYRSGIFPWYSPGEPVLWWSPNPRCVVFPDQLHVSRSMRKRLKKKDFKVVFDTNFDAVINACAAPRDGADGTWITAEMKAAYNALHAAGIAHSVEVYMDDQLVGGLYGLAIGKLFFGESMFSRSRDASKIAFIKMVEQMQIWGYALIDCQVSNEHLFSLGATEIPRDQFQSYLNRYLDQPQSHAWQFDAIDSELE

SEQ ID NO: 36547 - DNA, 645 bp, Flavobacteria bacterium BBFL7
  CDS (1)..(645): transl_table=11
gtgcaaattctagatcacaatcttaatttccctcatcccagcactgctccagaccatggattacttgccataggaggagatttaagtgttgaaagattactgctagcatatcaatcaggtatatttccttggtatagcgatggtgaccctatttgctggtggagcccagatcccagaatgatatttgatttatccagtgatcgacctatgcgagttacaaagtcacttaaacaaagtctgcgcaatagaggttatacggtaaaagagaatactagttttaccgaggttatgcagcattgcgcaaatgtaaaacgtaaagatgaagacagcacatggattaataatgacttcataaattcatattccaagctacatgagttaggtcacgcaaaaagtgtagaagtttttaaagacaatcaattagtaggtgggctatatggaattgatttacctaataaaaagattttttgtggagagtctatgtttactctagcaacagacgctagtaaaatcgctctactacacttagtaaacactcttaaaataaaaggctaccatttcatagacgctcaactatataatgatcacctacatagtttaggagcagtagaaattgatcgcgagatattcttaacttatctataa

SEQ ID NO: 36548 - protein, 214 aa, Flavobacteria bacterium BBFL7
MQILDHNLNFPHPSTAPDHGLLAIGGDLSVERLLLAYQSGIFPWYSDGDPICWWSPDPRMIFDLSSDRPMRVTKSLKQSLRNRGYTVKENTSFTEVMQHCANVKRKDEDSTWINNDFINSYSKLHELGHAKSVEVFKDNQLVGGLYGIDLPNKKIFCGESMFTLATDASKIALLHLVNTLKIKGYHFIDAQLYNDHLHSLGAVEIDREIFLTYL

SEQ ID NO: 36549 - DNA, 720 bp, marine gamma proteobacterium HTCC2207
  CDS (1)..(720): transl_table=11
gtgcagatacctctgctagatcaggatcatccgcgctttcctgatcccagtggcgctttaactgaacccgacggtcttcttgccgtcgggggtaatttgcagccgcaaaccctacttagcgcctatagatccggtatcttcccctggtatcaggatgaggatcctattctttggtggagcccggcaactcgctgtgtgttgccgccctcggatttgcactgctccaaaagcctacgtaaaacgctgcgtcgcaatgattatcaggtgaccgttaatcaggcctttaatactgttgttgacgcctgcagcgagccccgtgaggacgatggcggcacctggattaccgaagagatgaaggctgcctatactcagctccaccagcaaggcaaggcccactctcttgaggtctggtttgagggtaacttggttggtggcctctatggtgttgcggtgggcagcattttttgcggcgaatcaatgttcagccggcgtgctagtgcctctaaaatcgccctggctcatctctgccgctggggtttggatgctggcttgaaactaatcgactgtcagctagttaacccgcatttaatcagcttgggtgcgattagcattgatcgcagcatctttatcgagcagttatcaaagagtcgagacaagggtttgaactggccccttcccggcacgggtcagcagacaacagaattacagttcaattggtga

SEQ ID NO: 36550 - protein, 239 aa, marine gamma proteobacterium HTCC2207
MQIPLLDQDHPRFPDPSGALTEPDGLLAVGGNLQPQTLLSAYRSGIFPWYQDEDPILWWSPATRCVLPPSDLHCSKSLRKTLRRNDYQVTVNQAFNTVVDACSEPREDDGGTWITEEMKAAYTQLHQQGKAHSLEVWFEGNLVGGLYGVAVGSIFCGESMFSRRASASKIALAHLCRWGLDAGLKLIDCQLVNPHLISLGAISIDRSIFIEQLSKSRDKGLNWPLPGTGQQTTELQFNW

SEQ ID NO: 36551 - DNA, 651 bp, delta proteobacterium MLMS-1
  CDS (1)..(651): transl_table=11
atgccggttttcgaactcgacgacagactcttctttccgccgccggagttggcccgttacgatggcctgttggccatcggtggcgatctggagcccgagcggctgctgttggcctacagccaggggattttcccctggtattcgccgggggagccgatcctgtggtgggcgcccgatccgcgcctggtgctgctgcccggcgagtttcagggcggccgtcgcctggcccgcaaattgcgccagggatgttttagtgtgagctataacgacgatttcgtggcggttattcgtgcctgcgcggaaatccagcggcccggtcagcaaggcagttggttggatcaggcgatgatcgacgcttactgtcgcctgcatgaacagggctacgcccattcggtggagtgccggcgggacggggttttggtgggtgggctctacggggtgcggctggggcggatattctttggcgaatcgatgttcagccgggtggcggacgcctccaaggcggccctggccaggctggtggccgaccttgtccgggaggactgctcactcatcgattgccaggtgcccagtgatcatctgttgcggcttggcgcccgcctggtccccggccgggcctttcagcaggccctggcaatgggtataaagtga

SEQ ID NO: 36552 - protein, 216 aa, delta proteobacterium MLMS-1
MPVFELDDRLFFPPPELARYDGLLAIGGDLEPERLLLAYSQGIFPWYSPGEPILWWAPDPRLVLLPGEFQGGRRLARKLRQGCFSVSYNDDFVAVIRACAEIQRPGQQGSWLDQAMIDAYCRLHEQGYAHSVECRRDGVLVGGLYGVRLGRIFFGESMFSRVADASKAALARLVADLVREDCSLIDCQVPSDHLLRLGARLVPGRAFQQALAMGIK

SEQ ID NO: 36553 - DNA, 696 bp, Oceanobacter sp. RED65
  CDS (1)..(696): transl_table=11
atgtccttggccatatcctacttaacaccggatccaaactggttccccaatccagctcaagccttagaggaccctaatggcttgttggctgtaggtggtgatctgactccaaagcgcctagtaagtgcctattgccaaggaatttttccttggtttagtgaagaagatcccattttatggtggagtcctgacccacgctctgtattgatccctaaaacctataaaacatcgcgatcattgcaaaaatttatgcgtaagcaagagcatgaggtcactatcgaccaatgctttgagcaagttatgatcaattgcgcaacgacccgagaggaaacctggatcaacgatgctatgctacacgcatactgcacactacacgagctgggcatagcccatagcgtagaatattggcaaggaaaacaactcatgggtggcctttatggccttagtatcggcggagccttttttggcgaatccatgttctcgaagtgcagcaatgcaagcaaagttgcattcacccgcctgtgccagctttgcaatgaattaggcatcgaactgatagactgccaagtccataacccacacttagcttccttaggggcaatagagataaaccgcaaagactttctcgctaaaataagtaaactaatcaataaaccagtaaaatggcaacccgagataatggctgagcatgaataa

SEQ ID NO: 36554 - protein, 231 aa, Oceanobacter sp. RED65
MSLAISYLTPDPNWFPNPAQALEDPNGLLAVGGDLTPKRLVSAYCQGIFPWFSEEDPILWWSPDPRSVLIPKTYKTSRSLQKFMRKQEHEVTIDQCFEQVMINCATTREETWINDAMLHAYCTLHELGIAHSVEYWQGKQLMGGLYGLSIGGAFFGESMFSKCSNASKVAFTRLCQLCNELGIELIDCQVHNPHLASLGAIEINRKDFLAKISKLINKPVKWQPEIMAEHE

SEQ ID NO: 36555 - DNA, 717 bp, Alteromonadales bacterium TW-7
  CDS (1)..(717): transl_table=11
atgactaaccagctataccaactaagtgatacagatatagcatttcccaatccagaatatgcattagtttctccagacggcctactagctgtgggtggtgacttgagcctacctcgcctttgcaatgcttatagtaatggtatatttccttggtttagcgataacgaacccattatgtggtggtcaccaagtgagcgtggcattgtggagttaaatgagtttcatgttagtaaaagtttacgtaagcacctaaaaaaataccccgtaacagtgacagttaataacgcctttgttgaagtcattgaagcatgccgtgaccaacgcattgataccgacggtacttggatcactaatgatatgctaagtgcttacataaatgctcatcatgcaggcatagcgcacagcttagaagtgtggcgcaatggagagcttgcaggtgggctgtatggaattatgcaaaatggtgtgttttgtggcgaatcgatgtttcatcatcaaactaattgttctaaattagctatgtgggcgcttgtgaattggttaaaaaaccatgatgctcattttattgattgccaactcgaaaacccatatttgatgagtttgggagcaaaagttattcctcgaactgattttttagctaaacttagcactgcacttacctataacgttaatcctactatgtgggaaccacaggaacttattgcaatctatgaatga

SEQ ID NO: 36556 - protein, 238 aa, Alteromonadales bacterium TW-7
MTNQLYQLSDTDIAFPNPEYALVSPDGLLAVGGDLSLPRLCNAYSNGIFPWFSDNEPIMWWSPSERGIVELNEFHVSKSLRKHLKKYPVTVTVNNAFVEVIEACRDQRIDTDGTWITNDMLSAYINAHHAGIAHSLEVWRNGELAGGLYGIMQNGVFCGESMFHHQTNCSKLAMWALVNWLKNHDAHFIDCQLENPYLMSLGAKVIPRTDFLAKLSTALTYNVNPTMWEPQELIAIYE

SEQ ID NO: 36557 - DNA, 774 bp, marine gamma proteobacterium HTCC2143
  CDS (1)..(774): transl_table=11
ttgcgacaaaatgagaagcctgacaatgccctactggcattgtcaaaactgactatgtcacaaattccctggcttgaagccgacagtctcatatttccgccgagtacctctgcgatggaggaacctaatggcttgttggccgttggcggtgatcttagtcccgcgcggctcgtcgctgcctacaagcttgggatctttccctggttcgaagaaaatcaaccgattctttggtggtcgcccagcccgagggccgtgttgtttccgccgcaagtacatatatcgaaaagcctgaaaaaaagactacgccaacaggcatttaacgtaactggtgatcaccatttttcgctcgttgtggaacactgcgcccaggtatcgcgccgtgggcaagatggaacctggattacggatgaaatgcttgacgcctacagcctgctgcacgatatgggcattgcccattctgtggaagtttggcatcaaggtcagttggcgggtggcttatacggtttggcgattggtggggtattcttcggagagtcgatgttcagcttagttagtgatgcctccaaaattgccttctttgcactttgcaatcaattgcaacagtggggattcgccgttattgattgtcaggtgactaacccccacctactgagtcttggagctgaagaaattgatagatcacgatttaaccagctgctatcgtctaacatcgaacgatcaatgacatatcaatggtcgggtagttgggatttaccctcagggaatagcgattaa

SEQ ID NO: 36558 - protein, 257 aa, marine gamma proteobacterium HTCC2143
MRQNEKPDNALLALSKLTMSQIPWLEADSLIFPPSTSAMEEPNGLLAVGGDLSPARLVAAYKLGIFPWFEENQPILWWSPSPRAVLFPPQVHISKSLKKRLRQQAFNVTGDHHFSLVVEHCAQVSRRGQDGTWITDEMLDAYSLLHDMGIAHSVEVWHQGQLAGGLYGLAIGGVFFGESMFSLVSDASKIAFFALCNQLQQWGFAVIDCQVTNPHLLSLGAEEIDRSRFNQLLSSNIERSMTYQWSGSWDLPSGNSD

SEQ ID NO: 36559 - DNA, 756 bp, marine gamma proteobacterium HTCC2080
  CDS (1)..(756): transl_table=11
ttgcccgactttgaatttcccgcgagcattgaggcattaaaagaacccaacgggcttctcgctatggggggggatctctctcccgagcgacttttacttgcctacagtcggggaattttcccttggttcagcagcgacgaaccaatactctggtgggcgccagatccgagagcaatacttgagccttctgaatttattgtttcaaaatctttcggtaaatcattaaaaaagcgcggctaccggctgtctttaaacaaggaattttcatcagttgtgaaggcttgcgcggcacctcgtccctcgcaggagggaacttggattcttccttccatgataagcgcttacagcgcccttcatcggctcggatatgcccattcgatagaggtatggtgtgaagacaatctcatcggagggctttacggggtttgtattggtaaggctttttttggggagtcgatgttctctgttaagacagacgcatcaaaaactgccttagcgtccttagcgtatattgggcaaatggggtattttaagcttattgattgccaagtagagagccagcatctgacctcaatgggtgcacgttcgctagatagagcagtctttgaacacaaactcgaaaacgctataagtgacgatatggagcaagttcaacaaatcattcagggtgttaaacccagcacaatgcaccgtgtgccctgggcgagcatgctaccggagtcttcggtagagttgtttttgtggcttaatacatga

SEQ ID NO: 36560 - protein, 251 aa, marine gamma proteobacterium HTCC2080
MPDFEFPASIEALKEPNGLLAMGGDLSPERLLLAYSRGIFPWFSSDEPILWWAPDPRAILEPSEFIVSKSFGKSLKKRGYRLSLNKEFSSVVKACAAPRPSQEGTWILPSMISAYSALHRLGYAHSIEVWCEDNLIGGLYGVCIGKAFFGESMFSVKTDASKTALASLAYIGQMGYFKLIDCQVESQHLTSMGARSLDRAVFEHKLENAISDDMEQVQQIIQGVKPSTMHRVPWASMLPESSVELFLWLNT

SEQ ID NO: 36561 - DNA, 810 bp, Candidatus Desulfococcus oleovorans Hxd3
  CDS (1)..(810): transl_table=11
atgattcgccggattcccttcactgagccccatacggttcaacgtatgtctgtattctttctagacggagccgcagaagctttccccccggcgcgccttgccgatgcaaacggcctgctggccgtggggggagatctttgcgtcgaacgcctgctggccgcctaccgggcgggcatctttccatggtatgccgaaggagaccccattctgtggtggtccccggatccccggctggtgctgttccccggcgacctcagaatatcccggcgcctggggcgggtgcttcgcaaaaaaccctttcaggtgaccatggacgcggcgtttgaacaggtggttcgcgcctgcgcggcggcgccccgacggtccggccccggcacctggatcgtggacgagatgatcgacgcctactgccgtctgcacagggccggatatgcccactccgttgaggcgtggcaggagggcgagctcgccggcgggctttacggggtttccctgggccgctgctttttcggagagtccatgtttacccggaccagcaacgcgtccaaggcggcgttggtgaggcttgtgcagtttctttcggatcgcggctttgacatgatcgactgccagatgaccacggctcatctggtggggtttggcgccgtggagatcagccggaaactgtttttaaagcggctggcggcggccctgatggcgccgaccctgaccggaaactggcggctggaaacggtgggccccggttttcataatgttttagcgtcccgtaccgaccgggcggcgacatattcacatcagggggaaatatga

SEQ ID NO: 36562 - protein, 269 aa, Candidatus Desulfococcus oleovorans Hxd3
MIRRIPFTEPHTVQRMSVFFLDGAAEAFPPARLADANGLLAVGGDLCVERLLAAYRAGIFPWYAEGDPILWWSPDPRLVLFPGDLRISRRLGRVLRKKPFQVTMDAAFEQVVRACAAAPRRSGPGTWIVDEMIDAYCRLHRAGYAHSVEAWQEGELAGGLYGVSLGRCFFGESMFTRTSNASKAALVRLVQFLSDRGFDMIDCQMTTAHLVGFGAVEISRKLFLKRLAAALMAPTLTGNWRLETVGPGFHNVLASRTDRAATYSHQGEI

SEQ ID NO: 36563 - DNA, 681 bp, Pseudomonas putida GB-1
  CDS (1)..(681): transl_table=11
atgcttacctggctgactcgcgactcgctgaccttcccacccctggaaaaggccctgcatgaccccaacggcctgctggccgctggcggtgacctgagccccgagcgcctggtacaagcgtatcgccatggctgcttcccgtggtaccaggacggccagccgatcctgtggtggtcacccgacccacgtacagtgctgctccccgaccagttgcacgtgtcgcgctcgctggccaagctgatgcgccaaggccgctaccaggtcagcttcgacaccgactttccggccgtgatcgccgcctgcgctgcgccacgcgactacgccgacggcacctggattaccgacaccatgcgcaacgcctattgcgagctgcaccgccgcggcatcgcccattcggtggaggtacgccaggacggtaagctggtcggcggcctgtacggcctggccatgggccagctgttctttggcgaatcgatgttcagccgcgccgacaacgcctccaaggtcggcttcgtcaccctggtcaaccacctgcgcgatgcgggctttgcgcttatcgactgccagatgcccaccaaccacctgcacagcctgggtgcccatgccatcagccgcgccgagttcgccgattacctggcacaccacctcgaccagcccaacagcgctacatgggttgcctag

SEQ ID NO: 36564 - protein, 226 aa, Pseudomonas putida GB-1
MLTWLTRDSLTFPPLEKALHDPNGLLAAGGDLSPERLVQAYRHGCFPWYQDGQPILWWSPDPRTVLLPDQLHVSRSLAKLMRQGRYQVSFDTDFPAVIAACAAPRDYADGTWITDTMRNAYCELHRRGIAHSVEVRQDGKLVGGLYGLAMGQLFFGESMFSRADNASKVGFVTLVNHLRDAGFALIDCQMPTNHLHSLGAHAISRAEFADYLAHHLDQPNSATWVA

SEQ ID NO: 36565 - DNA, 717 bp, Marinobacter sp. ELB17
  CDS (1)..(717): transl_table=11
atgacgtctttgccctggttgcctgaacatgcgctgtggttcccctcgcccgagagcgcgatggtggaacccgacggcctgctggccgccggcggtgatctgagcagcaagcgcctggtattggcttatgaaaacggtattttcccctggtacagcgacgaccaacccatactttggtggtcacccgatccgcgctgcgtcatatatccagaaaatattcacatttcccgcagcctgcgccgcagcctcaacaaaggctatttcacggtaacggcggaccgtgccttcagccggattatgcgcctgtgtggctctacccgcgctgaaggcacctggattaccgaaaacatgcttcaggcctacaacaagcttcaccgagaaggcattgcccattctattgaaatctggaacccccacggcgaattggcgggaggcatgtacggtatagcgctgggcagctgtttttttggcgagtcgatgttctcgctggaaaccaacgcgtccaaggtattaatggtgcatctggccaaccaattgcaacagtggggatatcagattattgactgtcaggtagccagcgatcacctattgagcatgggcgcacaaacaataccgcgaacggagtttctggccatgctcggccgctatacaaaacaaccaccggcagtggcagactggcagtttcaatggcgctggccgagcccggagggtgaatga

SEQ ID NO: 36566 - protein, 238 aa, Marinobacter sp. ELB17
MTSLPWLPEHALWFPSPESAMVEPDGLLAAGGDLSSKRLVLAYENGIFPWYSDDQPILWWSPDPRCVIYPENIHISRSLRRSLNKGYFTVTADRAFSRIMRLCGSTRAEGTWITENMLQAYNKLHREGIAHSIEIWNPHGELAGGMYGIALGSCFFGESMFSLETNASKVLMVHLANQLQQWGYQIIDCQVASDHLLSMGAQTIPRTEFLAMLGRYTKQPPAVADWQFQWRWPSPEGE

SEQ ID NO: 36567 - DNA, 615 bp, Agrobacterium tumefaciens
  CDS (1)..(615): transl_table=11
atggctgggcggcgcagcagaaacaacgacataacggtcgatattctgctgcgcgcctattccgccggcctgtttcccatggccgattcggctgatgatcccgagcttttctgggtcgagccggagatacgcggtatcattccgctcgatgatttccacgtttccaaaagcctcgccaaggcgatgcgcaagaagccgtttgcgatacgcttcaacaccgctttcgaagatgtcatggcgggctgtgcggcggaagcggcggacaggccaagcacctggatcaacgccaccatccgccggctctacaccgagctgcaccagatcggtcatgcccacagcgttgaggcatgggagggtgatgagcttgtcggcgggctttacggtgtttctctgggtgctgccttcttcggcgaaagcatgttttcccgccgcaccaatgcgtcgaagatctgcctcgtccatctggtggagcgattaaacgcgaagggcttcgtgctgctcgacacgcaattcaccacagaacatctgaagacgttcggcgcgatagacgtgcccaagctggactatgcaagaatgctcgatctcgccgtcaaccggccgagcctgcaattctag

SEQ ID NO: 36568 - protein, 204 aa, Agrobacterium tumefaciens
MAGRRSRNNDITVDILLRAYSAGLFPMADSADDPELFWVEPEIRGIIPLDDFHVSKSLAKAMRKKPFAIRFNTAFEDVMAGCAAEAADRPSTWINATIRRLYTELHQIGHAHSVEAWEGDELVGGLYGVSLGAAFFGESMFSRRTNASKICLVHLVERLNAKGFVLLDTQFTTEHLKTFGAIDVPKLDYARMLDLAVNRPSLQF

SEQ ID NO: 36569 - DNA, 681 bp, Bradyrhizobium japonicum
  CDS (1)..(681): transl_table=11
atgacttcgcgcgactccgcttcgtctgaaattacgccggccgtgctgctgcgcgcctatgcctgcggcatctttccgatggccgagagcgccgacgatccgaccctgttctgggtcgagccggaattgcgcggcgtcatcccgctcggcggcttccgcgtggcctcgcggctcgcgcgcaccgtgcgctcggatgggtttcgcgtgaccgtcaacaccgcgttcaaggccacgattgccggctgcgccgcgccgcaggccgggcgcgaggacacctggatcaacaagcgcatccgcgacctctatagtggcctgttcgagctcggccattgccacagcgtcgaggcctggcagggcgacgacctcgtcggtgggctctacggcgtgagcctgggacgcgccttcttcggcgagagcatgtttcacaccgcgcgcgatgcctcgaaggtcgcgctggtgcacctggtcgcgcggctcatccatggcggtttcgagctgctcgacacgcaatatgtcaccgagcatctgaagaacttcggtgcggtcgagattccgcggcggcgctacaccgcgctgctcgacaaggcgctggcgggcgagcccggcgatttcctcaagctctcgcccggcgaggcgatcccgggcgctcgcgcgctcgagatcatcgcctcgcggcaatag

SEQ ID NO: 36570 - protein, 226 aa, Bradyrhizobium japonicum
MTSRDSASSEITPAVLLRAYACGIFPMAESADDPTLFWVEPELRGVIPLGGFRVASRLARTVRSDGFRVTVNTAFKATIAGCAAPQAGREDTWINKRIRDLYSGLFELGHCHSVEAWQGDDLVGGLYGVSLGRAFFGESMFHTARDASKVALVHLVARLIHGGFELLDTQYVTEHLKNFGAVEIPRRRYTALLDKALAGEPGDFLKLSPGEAIPGARALEIIASRQ

SEQ ID NO: 36571 - DNA, 702 bp, Chromobacterium violaceum
  CDS (1)..(702): transl_table=11
atgattccctggctcggtcccgagcctgtcttcccgccggtgtcgcaggccctgagtcatcccaacggcctgctggccgccggcggcgatctgtcgtcccgccgcattctcaccgcttactcggaaggcatcttcccctggttttccgacggcgagccgatactgtggtggtcccccgcgccgcgcatggtgatgtttcccgacgagctcaaggtcagccgctcgctggccaagacgttgcgcaatctcgattatgaaatccgcgtcgacagcgccttcccagaagtgatgcgcgcttgcgccgagcccagggccgggcaggacggcacctggatcgtgcccgagatggtggccgcctattgccggctgcaccagatcggctacgcgcacagtttcgaaacctggatcgatggcgagctggccggagggctgtacggcgtgtccatcggccgcatgttctacggcgagtcgatgttttcccgcagaagggacgcctccaagctcgccttcgtccacatggtccggcatctgcaggcgcagggcgtgacgatgatagactgccagatgcataccgagcatctggccagcctcggcgcgaggctgatatcgcgcgatgtttttcttgctactctgaaagagaatgtccggcatccccagccggatcggatgtgggattaccattaccgccatgagtcatcgtga

SEQ ID NO: 36572 - protein, 233 aa, Chromobacterium violaceum
MIPWLGPEPVFPPVSQALSHPNGLLAAGGDLSSRRILTAYSEGIFPWFSDGEPILWWSPAPRMVMFPDELKVSRSLAKTLRNLDYEIRVDSAFPEVMRACAEPRAGQDGTWIVPEMVAAYCRLHQIGYAHSFETWIDGELAGGLYGVSIGRMFYGESMFSRRRDASKLAFVHMVRHLQAQGVTMIDCQMHTEHLASLGARLISRDVFLATLKENVRHPQPDRMWDYHYRHESS

SEQ ID NO: 36573 - DNA, 726 bp, Colwellia psychrerythraea
  CDS (1)..(726): transl_table=11
atgggtcaaattttatatcaacttgatgataatagtttgacctttcccttgatagaatgtgccctaactgaacccaatggcttattagcgcttggtggtgatttatcaccagagcgattaatagcggcgtacagtcagggtatttttccatggtacagcgataacgaccccttaatgtggtggtcacccaaccccagagcgatcatagatattgatcaactacgtataaatcgtactttacgtaaagccatcaacaaatcaccttatcaaatcacgttgaatcaagattttagccaagtaactcaattatgcgccaatgcgccgtttcgaacagatggcacctggattttgcctgaaatggaagctgcttacctgacattacatcaacaaggttatgcccattctatagaagtatggtataccgatgagcatgataataaagcactcgttggcggtttatatggggtcgccgttaatggtttcttttctggtgagtcaatgttttataaacaaagcaatgcgtcaaaatttgcacttattgctttaggacaattacttaagtcagttgatattaactttattgattgtcaattacttaatccttttctcgaagatatgggcgcgaaagaaactagtcgtgacatttttattcacaaacaacaacatgccttaactaaaacaatgccagatgatttttggcaaccacgaacattaacggttatttag

SEQ ID NO: 36574 - protein, 241 aa, Colwellia psychrerythraea
MGQILYQLDDNSLTFPLIECALTEPNGLLALGGDLSPERLIAAYSQGIFPWYSDNDPLMWWSPNPRAIIDIDQLRINRTLRKAINKSPYQITLNQDFSQVTQLCANAPFRTDGTWILPEMEAAYLTLHQQGYAHSIEVWYTDEHDNKALVGGLYGVAVNGFFSGESMFYKQSNASKFALIALGQLLKSVDINFIDCQLLNPFLEDMGAKETSRDIFIHKQQHALTKTMPDDFWQPRTLTVI

SEQ ID NO: 36575 - DNA, 705 bp, Dechloromonas aromatica
  CDS (1)..(705): transl_table=11
atgattccctacctcggcccgctcgacctctttccgccggtcgaaatggctcgcgaagacatgggaggactcctcgccgtcggcggagatctgcagccggaccgcctgctcgacgcctaccggcgcggtattttcccttggggcacggtggaaggacagcccttgtggtatagcccgaacccgcgcatggttctctttcctgaagaatttcggctgacccgctcgctgaagaaaaccctgcgctcgggtaaattcgaagtccgtttcgacagcaacttccgtggcgtgatggccaattgcgccagcaccccccgccccggccaggatggcacctggatctcgccggaaatgaaacacgcctatacccgcctgcatgaactcggctgggcgcactcggtcgaaacctacgaagaaggtgtgatggtcggggggctgtatggcttggcgatcggacacatgttttacggcgaatcgatgttctcgcatcgcaccgatgcctccaaggtcgccttcgcccatctggtggattatcttgtgaacaaccaattcggcatgatcgactgtcagatgtacaccgaccacctggcctcgctcggcggcagagagattccgcgagatgcgtttcaggcccgcttgtcagccttgaccgcatccggcagtccacgcacagtctggtcgaccgacccgcttgacccggcgagatag

SEQ ID NO: 36576 - protein, 234 aa, Dechloromonas aromatica
MIPYLGPLDLFPPVEMAREDMGGLLAVGGDLQPDRLLDAYRRGIFPWGTVEGQPLWYSPNPRMVLFPEEFRLTRSLKKTLRSGKFEVRFDSNFRGVMANCASTPRPGQDGTWISPEMKHAYTRLHELGWAHSVETYEEGVMVGGLYGLAIGHMFYGESMFSHRTDASKVAFAHLVDYLVNNQFGMIDCQMYTDHLASLGGREIPRDAFQARLSALTASGSPRTVWSTDPLDPAR

SEQ ID NO: 36577 - DNA, 747 bp, Desulfovibrio desulfuricans
  CDS (1)..(747): transl_table=11
atgcacctttacgcactgtctgaaaagctggagtttcccgacccgcagacggcatcgtcggaagggctgctggccatagggggcgacctcagtgtcgcccggctggtcactgcctacgcaaacggtatttttccgtggtacgatgatgacacccccatcctgtggtggtcgcccgacccgcggtgtgtgttgtatccttcgcagctgcatgtgcctgcaagcctgcgcaggcgtatcaactccgggcagtttgaagtgacgctcgataccgcttttgaggcggttatacatgcctgtgccgacgctgcgcgtcccgggcagagcggaacatggattgtagatgagatgatagacgcctatatgaatctgcacgaggccggtgtggcgcattctgtggaggtatggagccgcggtgcgggtgatgggcgcgtgctggccggcgggctgtacggtgtagcgttgggtggcgttttttacggcgagtcaatgttctaccgccgcactgatgcttcaaaggtggcggtggtgtggcttgtgcgcctgcttgaattctggggataccgcgttgtggattgtcagcagactacgacacatatgctgcgctttggcgcgcaggaggtgtcccgggcatgttttctggaagagcttgaccgcgcgctgcggatgcctttgcgggcgggcaggtggcagatacccgatggattccgcccgttgcggcgcgcgacgctgccggatgagaatcagtga

SEQ ID NO: 36578 - protein, 248 aa, Desulfovibrio desulfuricans
MHLYALSEKLEFPDPQTASSEGLLAIGGDLSVARLVTAYANGIFPWYDDDTPILWWSPDPRCVLYPSQLHVPASLRRRINSGQFEVTLDTAFEAVIHACADAARPGQSGTWIVDEMIDAYMNLHEAGVAHSVEVWSRGAGDGRVLAGGLYGVALGGVFYGESMFYRRTDASKVAVVWLVRLLEFWGYRVVDCQQTTTHMLRFGAQEVSRACFLEELDRALRMPLRAGRWQIPDGFRPLRRATLPDENQ

SEQ ID NO: 36579 - DNA, 708 bp, Methylococcus capsulatus
  CDS (1)..(708): transl_table=11
atgctgactctcatcgaccccaacgacgaacggcaggcgttccctcctcccgatgccgccctgaaggagccgaacggtcttcttgcagtcggtggttcgttgagcgttgctcgtctggaacgggcttaccggcgcggaatatttccctggtatggcgagggcgatccgatcttgtggtggtcgcccgatccccggctggtgctgtttccggaaaagctgcggatttcgcggagtctgcggaaaacgttacgccggcggctatttcgattcagcttcgatcgggctttcagggcggtgatcacggcttgtgccgagcggcgtgaaaaatcggaagggacttggctgactgcagacatgcagtcggcgtaccttgctttccatcatgccggttttgcgcattctttcgaggcctggcaggacggcgccctggtgggggggctgtacggtgtggcgatggggcggatattttacggagagtcgatgttccaccgggtgacggatgcctcgaaggcggcgttggcgtttgcagtggggtgcttgtcacattggggttaccggatgatcgattgtcaggtctatagttcccatctcgtcagtctgggagcatccaccattccacgcagcgaatttcaggccttggtgtccgaatattcggaaacgtccgttgaccctgaggcatggaaacatgcgccgggagactttctttga

SEQ ID NO: 36580 - protein, 235 aa, Methylococcus capsulatus
MLTLIDPNDERQAFPPPDAALKEPNGLLAVGGSLSVARLERAYRRGIFPWYGEGDPILWWSPDPRLVLFPEKLRISRSLRKTLRRRLFRFSFDRAFRAVITACAERREKSEGTWLTADMQSAYLAFHHAGFAHSFEAWQDGALVGGLYGVAMGRIFYGESMFHRVTDASKAALAFAVGCLSHWGYRMIDCQVYSSHLVSLGASTIPRSEFQALVSEYSETSVDPEAWKHAPGDFL

SEQ ID NO: 36581 - DNA, 711 bp, Nitrosomonas europaea
  CDS (1)..(711): transl_table=11
atgattcgtacactctattccgatacgccttttcccccgctggaacaggcactgatcgaacccaatggtctgctggctgcgggcggagatctgtcaccagaacgcctgatctccgcttaccgccagggaatctttccctggttcaatccaggggaaatcatcctgtggtggagtccagatccaagaatggtactgtttccccgagaattaaaaatttcacgttcactgcacaaaaccctgaagaagaatgactaccagatccgcacggacagcgccttcaccgaagtcatgcaagcctgtgccgcgccgcgtgaggaccaggcaggtacatggatacacgaggaaatgatcgcggcttacaccgcgctgcatcagatgggggtggcacactcggtcgaaacctggatagagggcgaactggccggtggactatacggcgtagccattggcagggctttttttggagaatcgatgttttcccgagcgaccgatgcatccaagattgcactggttcatctggccagacaactggaaaattggggctatggcctgatcgactgccagatgaaaactgcacatttgatgtcgatgggtgcacgggaaatcccaagatcacaattctccaaacggctgaatcaactgaacgctctacccggccaaaacagaaaatggtatttcgactttacctatcccgggcgatcggagcagtga

SEQ ID NO: 36582 - protein, 236 aa, Nitrosomonas europaea
MIRTLYSDTPFPPLEQALIEPNGLLAAGGDLSPERLISAYRQGIFPWFNPGEIILWWSPDPRMVLFPRELKISRSLHKTLKKNDYQIRTDSAFTEVMQACAAPREDQAGTWIHEEMIAAYTALHQMGVAHSVETWIEGELAGGLYGVAIGRAFFGESMFSRATDASKIALVHLARQLENWGYGLIDCQMKTAHLMSMGAREIPRSQFSKRLNQLNALPGQNRKWYFDFTYPGRSEQ

SEQ ID NO: 36583 - DNA, 792 bp, Novosphingobium aromaticivorans
  CDS (1)..(792): transl_table=11
atgtcgcgcatcgaaccccacgccatcccgccggagcttctgctcaaggcctatcgcgcaggcatcttcccgatggccgacagccgcgacgacccggaggtgttctgggtcgagccaaagatgcgcgcaattctgccgctcgaaggcttccatctgtcccggtcgcttgcccggaccctgcgccgcggcaagttcaccgtgacctgcaatgccgcgttcgaggcggtcatcgatgcctgcgccgcgccgcgccccggtgccgaggaaagctggatcagcgcccgcatccgcgaaagctacattggcctgcacgaacatggccacgcccattcgatcgaatgctggcacaacgggcgactggtcggcggactatacggcgtaggcttcgcgcgggttttctgcggcgaatcgatgttcagccgcgaaccggacgcgtcgaaggtggcgcttgcatggcttgtcgcttcactgcgcaaggtcggtgccgaactgctcgactgccagttcaccaccccgcatctcgcttcactgggcgcggtggaaatcccgcaatcgcagtaccttcaacttctgtcgaaggcgcagcgaccctattcgtcgggcgagcttgcggcagcgcgggcgctggccgatgccgtcggcgacgggctaggcattggcggcgccggcgtcgtcaagggcgatgccgcggcgctcgggctgccggcgggttttgccgcgctgcgggccgaaggcgccggctcttcctcgccggggaacgtcatcgcgcagtccttgacccacacgtcatag

SEQ ID NO: 36584 - protein, 263 aa, Novosphingobium aromaticivorans
MSRIEPHAIPPELLLKAYRAGIFPMADSRDDPEVFWVEPKMRAILPLEGFHLSRSLARTLRRGKFTVTCNAAFEAVIDACAAPRPGAEESWISARIRESYIGLHEHGHAHSIECWHNGRLVGGLYGVGFARVFCGESMFSREPDASKVALAWLVASLRKVGAELLDCQFTTPHLASLGAVEIPQSQYLQLLSKAQRPYSSGELAAARALADAVGDGLGIGGAGVVKGDAAALGLPAGFAALRAEGAGSSSPGNVIAQSLTHTS

SEQ ID NO: 36585 - DNA, 714 bp, Photobacterium profundum
  CDS (1)..(714): transl_table=11
atggcaatttacctaccggaacttgatccggaaaatactcttttcccgaaacctgaaaccgcacttgatgaacccaatggcttacttgcttttggaggcgatcttcagcctgcacgtttgcttgcggcttaccgccaaggtatttttccttggtactctaatggtgagcctattttatggtggagccctgccccacgagccatctttttgcctaacgaatttaagcccagtaagagcttacgaaagttctatcgtaaatcaggatatcaaatcacactgaataatgcctgtcatgacgttattcgccaatgtgcaaattgtcgaagccctgaagaaacatggatcaccgaagatatgatccaagcttatcaaacgatgcacaatcttggacattgccattcggtagaagtttggcatcaagataaactcgttggcggattttatggtttacaaatcggttcagtgttttgtggtgaatcaatgttttcattagccgataacgcatcaaaaattgcgctatggtttttttgccgccatttttcaaatcaaggtggcaccctcattgattgccaagtgatgaacaatcatttggagtcacttggcgcactagaaattccacgagcaccgtttatgcaacagcttcatcagcaaagagctgccataattaaaccaaatagttttgttcctcaaacgctcaaaatacccattgaataa

SEQ ID NO: 36586 - protein, 237 aa, Photobacterium profundum
MAIYLPELDPENTLFPKPETALDEPNGLLAFGGDLQPARLLAAYRQGIFPWYSNGEPILWWSPAPRAIFLPNEFKPSKSLRKFYRKSGYQITLNNACHDVIRQCANCRSPEETWITEDMIQAYQTMHNLGHCHSVEVWHQDKLVGGFYGLQIGSVFCGESMFSLADNASKIALWFFCRHFSNQGGTLIDCQVMNNHLESLGALEIPRAPFMQQLHQQRAAIIKPNSFVPQTLKIPIE

SEQ ID NO: 36587 - DNA, 681 bp, Pseudomonas aeruginosa
  CDS (1)..(681): transl_table=11
atgctgacctggctttcccgcaccgacttcgactttccacccctcgacaaggccctgcaggagcccaacgggctgctcgcggccggcggcgacctcaatccgcaacgcctggtcgcagcctatcgccacggctgcttcccctggtaccaggatggccagccgatcctctggtggtcgcccgacccgcgcaccgtcctgttccccgacgaactgcacgtttcccgcagcctggccaagtgcctgcgccagcaacgcttcgaagtcactttcaaccgtgacttccgggcggtgatccaggcttgtgccgcgccgcgtaactacgccgacggcacctggatcaccacgccgatgcaactggcctaccaggagctgcacctgcgcggcatcgcccactccgtggaagtctggcaggagcgacaactggtcggcggcctctacggcctggccatgggcaggctgttcttcggcgaatcgatgttcagccgcgccgacaacgcttccaaggtcggcttcgtcacgctggtccgccatctgcgcgacgccggcttcgtcctcatcgactgccagatgccgacccgccacctgcacagcctgggcgcccgcgccatcagccggggggaattcgccgactacctgcaacgctatcgcgaccagcctcctaccggcgacctggatttttag

SEQ ID NO: 36588 - protein, 226 aa, Pseudomonas aeruginosa
MLTWLSRTDFDFPPLDKALQEPNGLLAAGGDLNPQRLVAAYRHGCFPWYQDGQPILWWSPDPRTVLFPDELHVSRSLAKCLRQQRFEVTFNRDFRAVIQACAAPRNYADGTWITTPMQLAYQELHLRGIAHSVEVWQERQLVGGLYGLAMGRLFFGESMFSRADNASKVGFVTLVRHLRDAGFVLIDCQMPTRHLHSLGARAISRGEFADYLQRYRDQPPTGDLDF

SEQ ID NO: 36589 - DNA, 681 bp, Pseudomonas fluorescens
  CDS (1)..(681): transl_table=11
atgctgacttggttacaacgcaattcactgactttcccgccactggaaaaggccatgcgcgatcccaacggactgctggcggccggaggcgacctgtccgccgatcgcttgatccaggcctatcgccatggctgctttccatggttttccgaaggccagccgattctctggtggtcgccggatccgcgcaccgtgctttttcccgacgaactgcacgtctcgcgcagcctcggcaaactgatgcgtaaacaacgctatcgagtgaccttcgatcaggatttcgacgccgtgatccgcgcttgcgccgctccccgggaatacgccgacggcacctggatcaccgaagcgatgcaggacgcctatatcgaattgcatcgacgcggctttgcccattcggtggaagtctgggatgagggcgaactggtcggcggcctgtacggcctggcgatggggcaactgttcttcggcgagtcgatgttcagccgcgcggacaatgcctccaagtacggctttgccacactggtgcaacatctgagagaagccgggttcgtcctgatcgactgccagatgccaaccgaccacctgcacagcctcggcgcccgggccatttcacggcagacattcgccgactatctggcccgacacctcgatcaacccaatcatgcgacctgggtttgctga

SEQ ID NO: 36590 - protein, 226 aa, Pseudomonas fluorescens
MLTWLQRNSLTFPPLEKAMRDPNGLLAAGGDLSADRLIQAYRHGCFPWFSEGQPILWWSPDPRTVLFPDELHVSRSLGKLMRKQRYRVTFDQDFDAVIRACAAPREYADGTWITEAMQDAYIELHRRGFAHSVEVWDEGELVGGLYGLAMGQLFFGESMFSRADNASKYGFATLVQHLREAGFVLIDCQMPTDHLHSLGARAISRQTFADYLARHLDQPNHATWVC

SEQ ID NO: 36591 - DNA, 681 bp, Pseudomonas putida
  CDS (1)..(681): transl_table=11
atgctcacctggctgacccgcgactcgctgaccttcccgcccctggaaaaggcgctgcacgaccccaacggcctactggccgccggcggcgacctgagccccgagcgcctggtgcaggcgtatcgccatggctgctttccgtggtaccaggacggccaaccgatcctgtggtggtcacccgacccgcgcacggtgttgttgcctgaccagttgcatgtgtcacgctcgctggccaagctgatgcgccaaggccgctaccaggtcagcttcgacaccgacttcccggccgtgatcgccgcctgcgccgcgcctcgcgactacgctgacggcacctggatcaccgacaccatgcgcaacgcctactgcgaactgcaccgccgtggcatcgcccattcggtcgaagttcgccaggacggcgaactggtcgggggcctgtacggtctggccatgggccagctgttctttggcgaatcgatgttcagccgcgccgacaacgcctccaaggtcggtttcgtgaccttggtcaaccacctgcgagacgccggcttcgtgcttatcgactgccagatgccgaccaaccacctgcacagcctgggcgcccacgccatcagccgtgccgagttcgccagctacctggcacgccaccttgaccagcccaacagcgcttcatgggttgcctag

SEQ ID NO: 36592 - protein, 226 aa, Pseudomonas putida
MLTWLTRDSLTFPPLEKALHDPNGLLAAGGDLSPERLVQAYRHGCFPWYQDGQPILWWSPDPRTVLLPDQLHVSRSLAKLMRQGRYQVSFDTDFPAVIAACAAPRDYADGTWITDTMRNAYCELHRRGIAHSVEVRQDGELVGGLYGLAMGQLFFGESMFSRADNASKVGFVTLVNHLRDAGFVLIDCQMPTNHLHSLGAHAISRAEFASYLARHLDQPNSASWVA

SEQ ID NO: 36593 - DNA, 750 bp, Ralstonia metallidurans
  CDS (1)..(750): transl_table=11
atgatcacctggctcgacccgcaggacccgtttccaccggtcgagcgcgcgctcggaccagcaagtgacgcgccgggactccttgcggccagccgcgatctttcaccgcagcgcctgcttctagcctatcgacaaggcatctttccctggtactcggaaggccagcccgttctatggtggagcaccgacccgcgtatggtgctggccccgcatcggctgaagatttcggtgtccctgcggaagaccctgcgtcgcatcctgcgggaccccgactgggaaatccgcgtcgatgacgatttcgtcgccgtgatgcaggcttgcgcaatgaccccacgcgatggccagctcggcacttggatcacggacgacatcgtcgcagcgtacggcagcctgcatcgcctcggactcgcgcactctgtcgagacctggtatcgcggcgaacgcgttggcggcctctacggcgtggccctggggcgcatgttctacggcgagtcgatgttcgcccaccgcacggatgcgtcgaagatcgcccttgcggcgctatgcggattcctcgaacgccacggcgtaaccatgatcgactgccagcaggagaccgatcacctcgcctcgctcggcgccgaaccaatccctcgcgagcagttcattgcacacgttcgccagacggctgccgaagccaatatctctccctggcgttttgacaaatctgaactgacgcgctggacatcacaggcaagcaccgaactctga

SEQ ID NO: 36594 - protein, 249 aa, Ralstonia metallidurans
MITWLDPQDPFPPVERALGPASDAPGLLAASRDLSPQRLLLAYRQGIFPWYSEGQPVLWWSTDPRMVLAPHRLKISVSLRKTLRRILRDPDWEIRVDDDFVAVMQACAMTPRDGQLGTWITDDIVAAYGSLHRLGLAHSVETWYRGERVGGLYGVALGRMFYGESMFAHRTDASKIALAALCGFLERHGVTMIDCQQETDHLASLGAEPIPREQFIAHVRQTAAEANISPWRFDKSELTRWTSQASTEL

SEQ ID NO: 36595 - DNA, 618 bp, Rhizobium loti
  CDS (1)..(618): transl_table=11
atgacccgcccttacgcgcctggctatcgcatccctaccgaccttctgctcaaggcctacgcttcgggcgtcttcccgatggccgaaagcgccagcgacccagaagtgttctgggtgcggccggagacgcgcggcatcatcccgctcgacgggttccacacgcccaaaagcctgcggaagacgatccgcaaaagcctgttcgacatccgtttcgacttcgatttcgaggcgacgatcgacggctgtgccgaaaagcgcgaggagcggcgctcgacctggatcaacgcgccgatccgcgaggcctatgtccagttgcaccgaatgggccattgccattcggtcgaggcctggcgcgaggaccagttggtcggcggcctctatggcgtgtcgcttggacgggttttcttcggcgaaagcatgttttccaaggagacggatgcgtcgaaaatctgcctcgtgcatcttgtcgagcgcttgaaggcacgtggcttcgctctgcttgatacgcaattcaccacagagcacctcaagcgcttcggcgctgtcgacgtcccgcgcggcaagtatgagaagatgttggccgaagcactgaagggcgaggctatcttttttccgtag

SEQ ID NO: 36596 - protein, 205 aa, Rhizobium loti
MTRPYAPGYRIPTDLLLKAYASGVFPMAESASDPEVFWVRPETRGIIPLDGFHTPKSLRKTIRKSLFDIRFDFDFEATIDGCAEKREERRSTWINAPIREAYVQLHRMGHCHSVEAWREDQLVGGLYGVSLGRVFFGESMFSKETDASKICLVHLVERLKARGFALLDTQFTTEHLKRFGAVDVPRGKYEKMLAEALKGEAIFFP

SEQ ID NO: 36597 - DNA, 615 bp, Rhizobium meliloti
  CDS (1)..(615): transl_table=11
ttgaaggagacgcgcagcaaacaaccggatatcacgccggacatgttgttgcgcgcctactcgatcggtctcttccccatggccgactcggccgacgatccggaacttttctgggtcgagcccgagatccgcggcatcattccgctggaccggtttcacgtctcgcgcagcctcgccaaagcgatccgcaggcgccccttcgacattcgcttcgatacggccttcgctgaagtcatggaggggtgcgcgcagcccgcaccggacaggccgacgacctggatcaacgacacgatccgctccctctatgcggccctgcacaatatgggccatgcgcacagcgtcgaggcctgggagggagatgcgctcgtcggcggcctctacggcgtttcactcggcgcagcctttttcggcgagagcatgttctcgcgccgcaccggcgcatccaagatctgcctcgtccatctggtcgagcgattgaggtcgaaggggtttcagctcctcgacacgcagttcacgaccgaacacctgaagtccttcggcgcagtcgacgtgccgaaggctcagtacgaagttctgctcgcgaaagcgatcgcctcgccaaatctcgaattttga

SEQ ID NO: 36598 - protein, 204 aa, Rhizobium meliloti
MKETRSKQPDITPDMLLRAYSIGLFPMADSADDPELFWVEPEIRGIIPLDRFHVSRSLAKAIRRRPFDIRFDTAFAEVMEGCAQPAPDRPTTWINDTIRSLYAALHNMGHAHSVEAWEGDALVGGLYGVSLGAAFFGESMFSRRTGASKICLVHLVERLRSKGFQLLDTQFTTEHLKSFGAVDVPKAQYEVLLAKAIASPNLEF

SEQ ID NO: 36599 - DNA, 645 bp, Rhodobacter sphaeroides
  CDS (1)..(645): transl_table=11
atgaagccgcccgcgctgacgccccgcctgctcctgcgggcctatgcgctcggcatcttcccgatggccgaatcccgcgacgatcccgagatccactggatcgacccgcggcaccgcggcatcttcccgctcgatgggttccacatctcgcgcagcctcgcccgccgcatccgccggatggactggcgcgtgagcgtggatgaggatttcgccgccaccgtcgaggcctgcgcggaccgcgaggagacctggatcaaccccaccatcttccgcctctatgtcgagctccatgcgctcggacacgcccattcgctcgaggtgcgcgagggcgagacgctggtgggcggcgtctacggggtgacgctgggccgggccttcttcggcgagagcatgttctcgcaccgcaccgatgcctcgaaggtggcgctggccttcctgatcgaccggctgcgggcgggcggcttcacgctcttcgacacgcagttcctgacgccgcacctcgcctcgctgggggccatcgagatccggcgctcggactatcaccagaggctcaccgaggcgctcgagggcaacgcgagcttcacccccgagggctactgggccgatcccgcctcagtggtgcagcgcaacagccagacatcgtag

SEQ ID NO: 36600 - protein, 214 aa, Rhodobacter sphaeroides
MKPPALTPRLLLRAYALGIFPMAESRDDPEIHWIDPRHRGIFPLDGFHISRSLARRIRRMDWRVSVDEDFAATVEACADREETWINPTIFRLYVELHALGHAHSLEVREGETLVGGVYGVTLGRAFFGESMFSHRTDASKVALAFLIDRLRAGGFTLFDTQFLTPHLASLGAIEIRRSDYHQRLTEALEGNASFTPEGYWADPASVVQRNSQTS

SEQ ID NO: 36601 - DNA, 732 bp, Saccharophagus degradans
  CDS (1)..(732): transl_table=11
atgcctgaattagtttggctcaacccgcacgataccgtcttccctcccaccactagcgcattagaagacccaaatggtctacttgcagtgggaggagatctctcccccgcccggctaatagctgcctataaaaaaggcatcttcccatggttcgacgactcccaacctattctgtggtggagcccagacccgcgcatggtgttgctaccgcaaaatttacaccttggtaaaacacttaaaaaactcgccaaaaaacaagcattcaaaattaccatagacacgcattttagcgatgtgatgcagggctgcgcccagccgcgtgccgatcaagatggcacttggataaccacagatatggaaaacgcgtatctagagctacacaagctcggctacgcccacagtatagaagcgtggcaagatggtgagctcgtcggaggcctgtacggtatcgccatcaatcgcgttttttatggcgaatctatgtttagcaaagtgtctggcgcatccaaaatagcgttcgccaaccttgcaactcaactggcgagctggggcttttatgccatcgattgccaagttgccaccgaatacctcgcctcgtttggggcagcagaaatgcctcgtgtagaatttgagcaaatattacaacaatcactgcaaagtcagccccccaagtgccaaatagaggggtggcaaaatagttggaatatgccagactatggccaactcttttag

SEQ ID NO: 36602 - protein, 243 aa, Saccharophagus degradans
MPELVWLNPHDTVFPPTTSALEDPNGLLAVGGDLSPARLIAAYKKGIFPWFDDSQPILWWSPDPRMVLLPQNLHLGKTLKKLAKKQAFKITIDTHFSDVMQGCAQPRADQDGTWITTDMENAYLELHKLGYAHSIEAWQDGELVGGLYGIAINRVFYGESMFSKVSGASKIAFANLATQLASWGFYAIDCQVATEYLASFGAAEMPRVEFEQILQQSLQSQPPKCQIEGWQNSWNMPDYGQLF

SEQ ID NO: 36603 - DNA, 705 bp, Salmonella paratyphi
  CDS (1)..(705): transl_table=11
atgcgtctggttcagctttcccgacattctatcgccttcccttcgccggaaggcgctttacgcgagcctaacggtttactggcgctgggcggcgatctcagccctgcccggttgttaatggcctaccagcacgggattttcccgtggttttcgccgggcgacccgattctgtggtggtcgcccgatccgcgcgccgtgctgtggcctgaaaagtttcacctcagccgcagcatgaagcgctttcacaacgcatccccgtaccgcgtgacgctcaattacgctttcgatcgggtcattgatggatgcgccaatcaccgtgacgaaggcacctggataacgcgtggtattgaggaagcctatcgccgattacatgaattgggccacgcgcactccattgaagtgtggcgcgatcaggaactggtcggcgggatgtatggcgtctcgcagggggcgctgttttgcggcgaatcgatgtttagccgccaggagaatgcctctaaaaccgcactgctggttttttgcgctgaatttatccgtcacggcggtaaacttattgattgtcaggtacttaatagtcataccgcctcgctcggcgcaattgaaattccacgtcgtgactacctcgatcacctcgcgggtttacgccaacagccgctggcctcccgtttttgggtgccgcggacattatttttgccccgaaagtga

SEQ ID NO: 36604 - protein, 234 aa, Salmonella paratyphi
MRLVQLSRHSIAFPSPEGALREPNGLLALGGDLSPARLLMAYQHGIFPWFSPGDPILWWSPDPRAVLWPEKFHLSRSMKRFHNASPYRVTLNYAFDRVIDGCANHRDEGTWITRGIEEAYRRLHELGHAHSIEVWRDQELVGGMYGVSQGALFCGESMFSRQENASKTALLVFCAEFIRHGGKLIDCQVLNSHTASLGAIEIPRRDYLDHLAGLRQQPLASRFWVPRTLFLPRK

SEQ ID NO: 36605 - DNA, 633 bp, Silicibacter pomeroyi
  CDS (1)..(633): transl_table=11
atgagcctgccgcccgaaatcctgctgcatggctattccatcggcatctttccgatggccgaacatcgcaacgacccggacgtgttctgggtcgatccgatccggcgcggcgtctttcccctgaacgggtttcacctgtcacgcagcctggcccggcgcatgcggcggggcggctaccaggtcagcatcgaccgtgatttcgcaggcgttctggatggttgcgccgaccgggccgagacctggatcaaccccgagatccgcgccagctatctggcgctgcaccacctgggccatgcccattcgctggaagtctggcaggccgggcagctgatcggcggcgtctatggcgtggtgctgggcgcggccttttttggggaaagcatgttctcgcgccgcaccgatgcgtcaaagatcgcgctggcgcatctggtcgaccggctgcgccagaccgggttcgccctgtttgacacccagttcctgactgcgcatctggcctcgctgggcgcggtggaaatcccccgcgccgaataccggcgccagctggagcgcgcgctgaacggggcggcggatttcgcggccgtgatcgagcagagccctcagggcgtcatacagcggatcacccagacgtcatag

SEQ ID NO: 36606 - protein, 210 aa, Silicibacter pomeroyi
MSLPPEILLHGYSIGIFPMAEHRNDPDVFWVDPIRRGVFPLNGFHLSRSLARRMRRGGYQVSIDRDFAGVLDGCADRAETWINPEIRASYLALHHLGHAHSLEVWQAGQLIGGVYGVVLGAAFFGESMFSRRTDASKIALAHLVDRLRQTGFALFDTQFLTAHLASLGAVEIPRAEYRRQLERALNGAADFAAVIEQSPQGVIQRITQTS

SEQ ID NO: 36607 - DNA, 687 bp, Thiobacillus denitrificans
  CDS (1)..(687): transl_table=11
atgaaggagcccttcacgaacgcgtcgtatttcccgcccgtggagaccgcgctggtcgacccgaacgggctgctggcgatcggcggagacctctcgcaagagcgactgctcgacgcctatcgccacggcatctttccctggttcaacccgcgcgagccgatccagtggtggagccccgatccgcgcatggtgctgccgcccgccgagatccgcgtcacccgctcgctcgccaagcggctgcgcaacgccggtttcgaactgcgtgtcgacagcgcgttcatcgaggtgatgcgcgcctgcggggcgccgcgcgaaggcgcgtgggggacctggatctcggcgccgatgatcgccgcctacggtcgcctgttcgacgcgggctacgcgcattcgatcgagacctggcgcgacggccggctcgtcggcgggctctacggcgtcgcgatcggccgcatgttctacggcgagtcgatgttcagccgcgagcccgatgcgtcgaaagtcgcgctggtccggctcgcgaggcagctcgagcgctggggatttggcctgatcgactgccagatggaaacgccgcacctcgccagcatgggcgcgcgtccgattccgcgcgccgacttcacagcgcggctggccgaattggtaaacttgccgcatctgcccgggccctggacgtttgacagctga

SEQ ID NO: 36608 - protein, 228 aa, Thiobacillus denitrificans
MKEPFTNASYFPPVETALVDPNGLLAIGGDLSQERLLDAYRHGIFPWFNPREPIQWWSPDPRMVLPPAEIRVTRSLAKRLRNAGFELRVDSAFIEVMRACGAPREGAWGTWISAPMIAAYGRLFDAGYAHSIETWRDGRLVGGLYGVAIGRMFYGESMFSREPDASKVALVRLARQLERWGFGLIDCQMETPHLASMGARPIPRADFTARLAELVNLPHLPGPWTFDS

SEQ ID NO: 36609 - DNA, 711 bp, Vibrio parahaemolyticus
  CDS (1)..(711): transl_table=11
atggcaatctatttaactgaactcgattcaacgttcaacttcccatccccttacgaagctctgtcagatcccaatggtctgttggcttttggcggagacttagatccacatagaattttgagtggctactaccaaggtattttcccttggtatggtccaggagaacccattttatggtggagtccttcgccacgtgcggtgtttgatcctttaacgtttaagccatcaaaaagtcttaaaaagtttcagcgcaagcatcaatataaagtcactataaatcaagcgactgagcacgtcattcaactttgctcgtcgacacggccagcagatgaaacatggctgaatgaagagatgcaagccgcttatattcagctatccaacctagggcattgccactcagtagaagtatggcatgacaacacgcttgttggcggtttatacggcattagcgtgggtcaacttttttgtggcgagtccatgttcagtttgaaagacaacgcatcaaaaatcgcattgtggtatttgtgcacgcatttggcgtcaaagcatggtcaattaatagattgtcaggtgatgaacccgcacttggcatccctcggcgcatttgaacttgaccgagacgagttcatacaaaagctactatctttaagagaaaagcaaacggcttctgacacctttacgccccaagttttgcaggattcagaatcatga

SEQ ID NO: 36610 - protein, 236 aa, Vibrio parahaemolyticus
MAIYLTELDSTFNFPSPYEALSDPNGLLAFGGDLDPHRILSGYYQGIFPWYGPGEPILWWSPSPRAVFDPLTFKPSKSLKKFQRKHQYKVTINQATEHVIQLCSSTRPADETWLNEEMQAAYIQLSNLGHCHSVEVWHDNTLVGGLYGISVGQLFCGESMFSLKDNASKIALWYLCTHLASKHGQLIDCQVMNPHLASLGAFELDRDEFIQKLLSLREKQTASDTFTPQVLQDSES

SEQ ID NO: 36611 - DNA, 681 bp, Wolinella succinogenes
  CDS (1)..(681): transl_table=11
atgagcggggaatttccttccgctttcctctttcccgatccagcgctagccgataaggaggggctcctctgttttggaggtgacctagagccatccaccttgctggcggcctactcacaaggaatctttccatggtttaatgcgggagatccgattctgtggtggtcgccccatccccgattcctcctctttccttctgagctccaattctctaggcgtacccaaaagcgcttagagcaatgcgcctttgaagtgcgcgcggatgagcgctttaaagaggtgattggcggatgtcaaaaagcggtgcggaagaatcaggagggaacttggattttgcccaaaatcgtgaaagcttatgagcacctttttgaggagggctacgcgcacagccttgaggtttacaaagagggggagctcgtgggagggctctatggagtgagcctaggggcagccttttttggagaatcgatgttttcgcgccaagatcatgcctcaaaggcggccattagggagctttgtcgtttgggggtggagcgaggctggaagatgattgattgccagattcactctgagcatttagaacgatggggggcgagagcagtggatcgagagaggtttttagtccttcttaaagaggcgcttaaagagaagacatggaggggaagatggagcttaaattag

SEQ ID NO: 36612 - protein, 226 aa, Wolinella succinogenes
MSGEFPSAFLFPDPALADKEGLLCFGGDLEPSTLLAAYSQGIFPWFNAGDPILWWSPHPRFLLFPSELQFSRRTQKRLEQCAFEVRADERFKEVIGGCQKAVRKNQEGTWILPKIVKAYEHLFEEGYAHSLEVYKEGELVGGLYGVSLGAAFFGESMFSRQDHASKAAIRELCRLGVERGWKMIDCQIHSEHLERWGARAVDRERFLVLLKEALKEKTWRGRWSLN

SEQ ID NO: 36613 - DNA, 711 bp, Yersinia pestis
  CDS (1)..(711): transl_table=11
atgcgcgtcacacagctctcatcacagtcatttatttttccctcacctgagctggctctgcgcgaaccaaacggtttattggcactagggggggatctaactgctcctcgcctactggcggcctaccagcggggtatttttccctggtttaaccctggggagatgattttatggtggtcaccagatccccgagccgtattattcccagaagatttacacatcagccggagtatgcggcgctttattcgtcattgcccttatcgttttaccctcaatcacgcttttgctgatgtgattagcgcctgtgccacagaacgtgatgaagggacatggattggccgtgatgtacaacaagcttactgccagttgcacgctttgggacatgcccattcactggaagtttggttggaaaatgagctggttggtggtttgtatggtgttgctgttggcgcggtattttgcggcgagtcgatgttcagtagggcggataacgcttcaaaaagtgcattaatggttttttgtcatcattttacccaacatggtggagaactgattgactgtcaggtcctcaacgctcacactgcgtcgctgggtgcggttgagatcccacgcaacttttttttgcagcagttgagtcaactccagtttagtccactaccggctgaatgctggttaccgcaatcgttgaatttttcatccgcgatgcagtaa

SEQ ID NO: 36614 - protein, 236 aa, Yersinia pestis
MRVTQLSSQSFIFPSPELALREPNGLLALGGDLTAPRLLAAYQRGIFPWFNPGEMILWWSPDPRAVLFPEDLHISRSMRRFIRHCPYRFTLNHAFADVISACATERDEGTWIGRDVQQAYCQLHALGHAHSLEVWLENELVGGLYGVAVGAVFCGESMFSRADNASKSALMVFCHHFTQHGGELIDCQVLNAHTASLGAVEIPRNFFLQQLSQLQFSPLPAECWLPQSLNFSSAMQ

SEQ ID NO: 36615 - DNA, 807 bp, Zymomonas mobilis
  CDS (1)..(807): transl_table=11
atgacaaatatgatcgatcctcatcttttgcttagtgcttatgcaaccggcattttcccaatgtcggatagtcgggaaacagatgaagtttattgggttgagcccaaaaaacgcggaatattgccccccgatcattttcatttatcgcgttctttggctaagattattcgctctgatcgttttttagtaaccgcagaccgcgattttgaagcagttattgacctttgcgccgaaccgacagaagatcgccccgacagctggattaatccccctatccgtgcagcttattgccagctccataatttaggttatgcccattctatcgaatgttggctggataaccgtttggttggcggcctttacggagtcaatctaggctatgccttttttggggaaagcatgttcagtcgggtcagcaatgcatcaaaagtagcgttggcttggctggtagccagattgaaagtcggcaatttcagcttgcttgattgccaatttattaccgatcatctcgcctctatgggggcaatagaaatcacaagagaagactatctaaagcgcctcaaatctgccgtttccagttattttacagataaagaaaccggcaactggaataccctcgatcgcctttctccactcctacacaacaaacacagcaagacaaaagaaaatcaattcgctgatgcagatttaccctttacggaaggcatagctttagagactgatgggactgcgccaggtgaagcttccttctctttagcatgtcctaatggtgcgcgcattgtgcaacttttaggccagatatcataa

SEQ ID NO: 36616 - protein, 268 aa, Zymomonas mobilis
MTNMIDPHLLLSAYATGIFPMSDSRETDEVYWVEPKKRGILPPDHFHLSRSLAKIIRSDRFLVTADRDFEAVIDLCAEPTEDRPDSWINPPIRAAYCQLHNLGYAHSIECWLDNRLVGGLYGVNLGYAFFGESMFSRVSNASKVALAWLVARLKVGNFSLLDCQFITDHLASMGAIEITREDYLKRLKSAVSSYFTDKETGNWNTLDRLSPLLHNKHSKTKENQFADADLPFTEGIALETDGTAPGEASFSLACPNGARIVQLLGQIS

SEQ ID NO: 36617 - DNA, 21 bp, Artificial sequence
  primer
atgcgcctggttcagctttct

SEQ ID NO: 36618 - DNA, 27 bp, Artificial sequence
  primer
ttattcttgtggtgaaaacaagcatcg

SEQ ID NO: 36619 - protein, 205 aa, Artificial sequence
  consensus sequence
  Variant (2)..(5): Xaa in position 2 to 5 is any amino acid
  Variant (7)..(8): Xaa in position 7 to 8 is any amino acid
  Variant (11)..(12): Xaa in position 11 to 12 is any amino acid
  Variant (14)..(14): Xaa in position 14 is any amino acid
  Variant (17)..(25): Xaa in position 17 to 25 is any amino acid
  Variant (26)..(28): Xaa in position 26 to 28 is any or no amino acid
  Variant (30)..(31): Xaa in position 30 to 31 is any amino acid
  Variant (33)..(34): Xaa in position 33 to 34 is any amino acid
  Variant (36)..(47): Xaa in position 36 to 47 is any amino acid
  Variant (48)..(50): Xaa in position 48 to 50 is any or no amino acid
  Variant (53)..(66): Xaa in position 53 to 66 is any amino acid
  Variant (67)..(76): Xaa in position 67 to 76 is any or no amino acid
  Variant (78)..(79): Xaa in position 78 to 79 is any amino acid
  Variant (81)..(83): Xaa in position 81 to 83 is any amino acid
  Variant (86)..(89): Xaa in position 86 to 89 is any amino acid
  Variant (90)..(94): Xaa in position 90 to 94 is any or no amino acid
  Variant (98)..(104): Xaa in position 98 to 104 is any amino acid
  Variant (106)..(107): Xaa in position 106 to 107 is any amino acid
  Variant (110)..(111): Xaa in position 110 to 111 is any amino acid
  Variant (113)..(113): Xaa in position 113 is any amino acid
  Variant (117)..(117): Xaa in position 117 is any amino acid
  Variant (119)..(119): Xaa in position 119 is any amino acid
  Variant (121)..(124): Xaa in position 121 to 124 is any amino acid
  Variant (125)..(129): Xaa in position 125 to 129 is any or no amino acid
  Variant (131)..(131): Xaa in position 131 is any amino acid
  Variant (134)..(134): Xaa in position 134 is any amino acid
  Variant (137)..(139): Xaa in position 137 to 139 is any amino acid
  Variant (141)..(142): Xaa in position 141 to 142 is any amino acid
  Variant (143)..(144): Xaa in position 143 to 144 is any or no amino acid
  Variant (146)..(146): Xaa in position 146 is any amino acid
  Variant (152)..(156): Xaa in position 152 to 156 is any amino acid
  Variant (160)..(160): Xaa in position 160 is any amino acid
  Variant (162)..(177): Xaa in position 162 to 177 is any amino acid
  Variant (178)..(179): Xaa in position 178 to 179 is any or no amino acid
  Variant (181)..(181): Xaa in position 181 is any amino acid
  Variant (183)..(186): Xaa in position 183 to 186 is any amino acid
  Variant (189)..(191): Xaa in position 189 to 191 is any amino acid
  Variant (194)..(197): Xaa in position 194 to 197 is any amino acid
  Variant (199)..(200): Xaa in position 199 to 200 is any amino acid
  Variant (201)..(204): Xaa in position 201 to 204 is any or no amino acid
LXXXXLXXAYXXGXFPXXXXXXXXXXXXWXXPXXRXXXXXXXXXXXXXXXSLXXXXXXXXXXXXXXXXXXXXXXXXFXXVXXXCAXXXXXXXXXTWIXXXXXXXYXXLHXXGXAHSXEXWXXXXXXXXXLXGGXYGXXXGXXXXFXGESMFXXXXXASKXAXXXXXXXXXXXXXXXXXXDXQXXXXHLXXXGAXXXXRXXXXXXL

SEQ ID NO: 36620 - protein, 15 aa, Artificial sequence
  protein pattern
  Variant (2)..(2): Xaa in position 2 is any amino acid
  Variant (8)..(11): Xaa in position 8 to 11 is any amino acid
  Variant (12)..(12): Xaa in position 12 is Asp, Gly or Asn
FXGESMFXXXXXASK

SEQ ID NO: 36621 - protein, 23 aa, Artificial sequence
  protein pattern
  Variant (2)..(2): Xaa in position 2 is Ile or Leu
  Variant (3)..(5): Xaa in position 3 to 5 is any amino acid
  Variant (6)..(6): Xaa in position 6 is Phe, Ile, Met or Val
  Variant (7)..(9): Xaa in position 7 to 9 is any amino acid
  Variant (11)..(12): Xaa in position 11 to 12 is any amino acid
  Variant (15)..(16): Xaa in position 15 to 16 is any amino acid
  Variant (18)..(18): Xaa in position 18 is any amino acid
  Variant (19)..(19): Xaa in position 19 is Ala or Cys
  Variant (21)..(21): Xaa in position 21 is Ala or Ser
  Variant (22)..(22): Xaa in position 22 is any amino acid
WXXXXXXXXYXXLHXXGXXHXXE

SEQ ID NO: 36622 - protein, 11 aa, Artificial sequence
  protein pattern
  Variant (2)..(3): Xaa in position 2 to 3 is any amino acid
  Variant (6)..(7): Xaa in position 6 to 7 is any amino acid
  Variant (9)..(9): Xaa in position 9 is Ile, Leu or Val
LXXAYXXGXFP

SEQ ID NO: 36623 - DNA, 2055 bp, Escherichia coli
  CDS (1)..(2055): transl_table=11
atggaactgaaagcgacaacgcttggaaaacgtctggcacagcacccttacgatcgggcggtgatcctcaatgccgggattaaagtctccggcgatcgccacgaataccttattcctttcaatcaattactggcgattcactgtaagcgcggtctggtatggggcgagctggaatttgtactgccggacgaaaaagtggtgcgtctgcacggcaccgaatggggcgagacgcagcgtttttaccatcatcttgatgctcactggcggcggtggagtggcgagatgagcgaaattgcgtctggtgttttacgccagcaactggatttgattgccacgcgcactggggaaaataaatggctgacgcgtgagcaaacctctggcgtgcagcaacaaatccgccaggctttgtcggcgttgccgttgccggttaaccgactggaagaattcgataactgccgtgaggcgtggcgtaaatgtcaggcctggttgaaagatattgaaagcgctcggttgcagcataaccaggcgtataccgaagccatgcttaccgagtatgcggattttttccgccaggtcgagtcttcaccgctgaatccggcgcaggcccgggcagtcgttaatggcgagcattctctgttagtgctggcaggtgcaggaagcggaaaaacgtcggtgctggtggcccgtgcaggctggttgctggcgcgtggtgaagcgtcccctgagcaaattttattgctggcgtttggtcgcaaagccgctgaagagatggacgagcggattcgcgaacggctacataccgaagacattaccgcacgcacgtttcatgcgctggcgctgcatattattcagcagggcagcaaaaaagttccgatagtcagcaaactggaaaatgataccgctgcccgtcatgaactctttattgctgagtggcgcaagcaatgcagcgaaaagaaagcgcaggcgaagggctggcggcaatggctgacggaagaaatgcagtggtcagtgccagaaggtaacttctgggatgatgaaaaattacagcgtcgccttgcctctcgcctcgatcgctgggtaagtctgatgcggatgcacggtggtgcacaggcagaaatgattgccagtgcacccgaagagattcgcgatctgttcagtaaacgtatcaagttgatggccccgttattaaaagcctggaaaggtgcgctgaaggcagaaaacgctgtcgatttttcgggccttattcatcaggcgattgtgattctggagaaaggtcgctttatcagcccgtggaagcatattctggttgatgaatttcaggatatctcgccgcagcgggcagcgttgttagcggcattacgcaagcaaaacagtcagacgacgttgttcgctgttggtgatgactggcaggcgatttaccgattcagcggtgcgcaaatgtcgctcaccaccgctttccatgaaaactttggtgaaggcgaacgctgtgatttagacacgacttaccgttttaacagtcgtatcggtgaggtggcaaaccggtttattcagcagaacccaggccagctgaaaaagccgctaaacagcttaaccaatggagacaaaaaagccgtcacgttattggatgagagtcaacttgacgctttgctggataagctctctggttatgccaaaccggaagagcgcattctgatcctggcgcgttaccatcacatgaggcctgccagcctggaaaaagcggcaacacgctggccgaagttgcaaatcgactttatgaccattcatgccagcaaagggcaacaggcggattacgtcatcatcgttggcttgcaggagggaagtgatggttttccggctgcggcgcgggagtcgattatggaagaggcgctactgccaccggttgaggatttcccggacgctgaagaacggcggttaatgtacgtggcgctgacccgggcacgccatcgggtatgggcactgtttaacaaagagaatccctctccctttgtggaaatactgaaaaatctggatgtgccggtggcgagaaaaccgtaa

SEQ ID NO: 36624 - protein, 684 aa, Escherichia coli
MELKATTLGKRLAQHPYDRAVILNAGIKVSGDRHEYLIPFNQLLAIHCKRGLVWGELEFVLPDEKVVRLHGTEWGETQRFYHHLDAHWRRWSGEMSEIASGVLRQQLDLIATRTGENKWLTREQTSGVQQQIRQALSALPLPVNRLEEFDNCREAWRKCQAWLKDIESARLQHNQAYTEAMLTEYADFFRQVESSPLNPAQARAVVNGEHSLLVLAGAGSGKTSVLVARAGWLLARGEASPEQILLLAFGRKAAEEMDERIRERLHTEDITARTFHALALHIIQQGSKKVPIVSKLENDTAARHELFIAEWRKQCSEKKAQAKGWRQWLTEEMQWSVPEGNFWDDEKLQRRLASRLDRWVSLMRMHGGAQAEMIASAPEEIRDLFSKRIKLMAPLLKAWKGALKAENAVDFSGLIHQAIVILEKGRFISPWKHILVDEFQDISPQRAALLAALRKQNSQTTLFAVGDDWQAIYRFSGAQMSLTTAFHENFGEGERCDLDTTYRFNSRIGEVANRFIQQNPGQLKKPLNSLTNGDKKAVTLLDESQLDALLDKLSGYAKPEERILILARYHHMRPASLEKAATRWPKLQIDFMTIHASKGQQADYVIIVGLQEGSDGFPAAARESIMEEALLPPVEDFPDAEERRLMYVALTRARHRVWALFNKENPSPFVEILKNLDVPVARKP

SEQ ID NO: 36625 - DNA, 2055 bp, Escherichia coli O157:H7 EDL933
  CDS (1)..(2055): transl_table=11
atggaactgaaagcgacaacgcttggaaaacgtctggcacagcacccttacgatcgggcggtgatcctcaatgccgggattaaagtctccggcgatcgccacgaataccttattcctttcaatcaattactggcgattcactgtaagcgcggtctggtatggggcgagctggaatttgtactgccggacgaaaaagtggtgcgtctgcacggtaccgaatggggcgagacgcagcgtttttaccatcatcttgatgctcactggcggcggtggagtggcgagatgagcgaaattgcgtctggtgttttacgccagcaactggatttgattgccacgcgcactggagaaaataaatggctgacgcgtgagcaaacctctggcgttcagcaacaaatccgccaggctttgtcggcgttgccgttgccggttaaccgactggaagaattcgataactgccgtgaggcgtggcgtaaatgtcaggcctggttgaaagatattgaaagcgctcggttgcagcataaccaggcgtataccgaagccatgcttaccgagtatgcggattttttccgccaggtcgagtcttcaccgctgaatccggcgcaggcccgggcagtcgttaatggcgagcattctctgttagtgctggcaggtgcaggaagcggaaaaacgtcggtgctggtggcccgtgcaggctggttgctggcgcgtggtgaagcgtcccctgagcaaattttattgctggcgtttggtcgcaaagccgctgaagagatggacgagcgtattcgcgaacggctacataccgaagacattaccgcacgcacgtttcatgcgctggcgctgcatattattcagcagggcagcaaaaaagttccgatagtcagcaaactggaaaatgataccgctgcccgtcatgaactctttattgctgagtggcgcaagcaatgcagcgaaaagaaagcgcaggcgaagggctggcggcaatggctgacggaagaaatgcagtggtcagtgccagaaggtaacttctgggatgatgaaaaattacagcgtcgtcttgcctcacgcctcgatcgttgggtaagtctgatgcggatgcacggtggtgcacaggcagaaatgattgccagtgcacccgaagagattcgcgatctgttcagtaaacgtatcaagttgatggccccgttattaaaagcctggaaaggtgcgctgaaggcagaaaacgctgtcgatttttcgggccttattcatcaggcgattgtgattctggagaaaggtcgctttatcagcccgtggaagcatattctggttgatgaatttcaggatatctcgccgcagcgggcagcgttgttagcggcattacgcaagcaaaacagtcagacgacgttgttcgccgttggtgatgactggcaggcgatttaccgattcagcggtgcgcaaatgtcgctcaccaccgctttccatgaaaactttggtgaaggcgaacgctgtgatttagacacgacttaccgttttaacagtcgtatcggtgaggtggcaaaccggtttattcagcagaacccaggccagctgaaaaagccgctaaacagcttaaccaatggagacaaaaaagccgtcacgttattggatgagagtcaacttgacgctttgctggataagctctctggttatgccaaaccggaagagcgcattctgatcctggcgcgttaccatcacatgaggcctgccagcctggaaaaagcggcaacacgctggccgaagttgcaaatcgactttatgaccattcatgccagcaaagggcaacaggcggattacgtcctcatcgttggcttgcaggagggaagtgatggttttccggctgcggcgcgggagtcgattatggaagaggcgctactgccaccggttgaggatttcccggacgctgaagaacggcggttaatgtacgtggcgctgacccgggcacgtcatcgggtatgggcactgtttaacaaagagaatccctctccctttgtggaaatactgaaaaatctggatgtgccggtggcgagaaaaccgtaa

SEQ ID NO: 36626 - protein, 684 aa, Escherichia coli O157:H7 EDL933
MELKATTLGKRLAQHPYDRAVILNAGIKVSGDRHEYLIPFNQLLAIHCKRGLVWGELEFVLPDEKVVRLHGTEWGETQRFYHHLDAHWRRWSGEMSEIASGVLRQQLDLIATRTGENKWLTREQTSGVQQQIRQALSALPLPVNRLEEFDNCREAWRKCQAWLKDIESARLQHNQAYTEAMLTEYADFFRQVESSPLNPAQARAVVNGEHSLLVLAGAGSGKTSVLVARAGWLLARGEASPEQILLLAFGRKAAEEMDERIRERLHTEDITARTFHALALHIIQQGSKKVPIVSKLENDTAARHELFIAEWRKQCSEKKAQAKGWRQWLTEEMQWSVPEGNFWDDEKLQRRLASRLDRWVSLMRMHGGAQAEMIASAPEEIRDLFSKRIKLMAPLLKAWKGALKAENAVDFSGLIHQAIVILEKGRFISPWKHILVDEFQDISPQRAALLAALRKQNSQTTLFAVGDDWQAIYRFSGAQMSLTTAFHENFGEGERCDLDTTYRFNSRIGEVANRFIQQNPGQLKKPLNSLTNGDKKAVTLLDESQLDALLDKLSGYAKPEERILILARYHHMRPASLEKAATRWPKLQIDFMTIHASKGQQADYVLIVGLQEGSDGFPAAARESIMEEALLPPVEDFPDAEERRLMYVALTRARHRVWALFNKENPSPFVEILKNLDVPVARKP

SEQ ID NO: 36627 - DNA, 1986 bp, Yersinia pestis CO92
  CDS (1)..(1986): transl_table=11
atggaacttaaagcgacatcttttggcaaacatctgtctcagcatccctataaccgggtccgcttgctgaatgcaggcatcgaagtctgcggtgataaacatcaatacctaatcccttttaaccaactggttagtattcagtgtaaacgaggtatcgtttggggcgagcttgaatttgagttgccgcagcagaaagttgtacggttgcacggtactgaatggcaggaaacacaacatttctatcattacttgctaggggtatggcagcaatggagtgaagaaatgagccaggtttgtgcggaggtgctgcataaacaggtggagtcaattaagcgaattgaacagcaggataaatggtttaaacgcagtgaattaggccagatacaagtcatgatccgcgaggcattcagtgccttaccaatgccagtggaacgcttagcggcgtttgaatcctgtcgagcagattatgaatgctgcctgcgttggttacagcaaggtcgtcacagtgttgaacgatgtaatcagcaatggacagcccgtatgttggaggagtatcaagattttttccaaaatgtagaaacttcgcccctgaatgcctcacaaagccgggcggtggttaacggtgaagattcagttttggtgttagccggcgcgggtagcggtaaaacatcggtgctggtggcgcgtgcgggctggttgctacgtcgtaatgaggcactacctgagcagattttattgctggcatttggtcgccaggcggccgatgaaatgaatagccgtattaaacaacgcttgggcgtggatagcatccaagctaaaacttttcatgctctggcattacatattatccagcaaggtagccgcaagacaccggttatcagcaagcttgagtctgatagccaggccagaagggcgttgttaattcaacattggcagcaacagtgtagcgagaagaaagcacaggacaaaaggttggctgcgaggctggcaagtcgccttgaacgttgggtagggttgatgcgtatgtacggtggcagtcaggctgaaatgattgagcaagcgaatgacgaggtgcgtgacctgtttcaaaagcgtatccgtttaatggcaccgttgctaaaagcctggaaaacggcattgaaagatgagggtgccgtcgatttttctgggttgattcatcaggcggttaacttgctggagaaagggcgctttgtcagcccatggaagcatgttttggttgatgagttccaggatatctcaccacaaagggcgatgttactcgcggcgctgcgtaaacagaataagcaaacttgcctgtttgcggttggcgatgattggcaggctatttaccgcttcagtggtgctgaactttcgctgacaacggcttttagcgagcattttggtgaaggtgctgaatgtgcactggatacgacttaccgctttaatgatcggattggtgatattgcgaaccggtttattcagcaaaacccttatcaactgaagaaaccacttaatagcttgagtaagggtaataaaaagtcggtcatgattttacccgatgagcagttggaggccctattagataaattaagcggctttgttaaggacggcgaacgtatcctaatattggcgcgttaccatcatttacgccccgaagttttacaaaaagcggcgacgcggtggccaaagttgactatcgattttatgaccatccatgccagcaaagggcagcaggctgattatgtcattatcgttggcttacatgagggtaatgatgggttcccagccgcggcgcgggaatctgtactggaagatgtgttgctacctcctcccgaagatttccctgatgctgaagagcggcgtttgctttatgtcgcaataacgcgtgctaagcaccaagtgtggttactacaagatacggcacggccttctatttttgtctctcaactcagtgaattaggtgccctggtacaacgtaagccctag

SEQ ID NO: 36628 - protein, 661 aa, Yersinia pestis CO92
MELKATSFGKHLSQHPYNRVRLLNAGIEVCGDKHQYLIPFNQLVSIQCKRGIVWGELEFELPQQKVVRLHGTEWQETQHFYHYLLGVWQQWSEEMSQVCAEVLHKQVESIKRIEQQDKWFKRSELGQIQVMIREAFSALPMPVERLAAFESCRADYECCLRWLQQGRHSVERCNQQWTARMLEEYQDFFQNVETSPLNASQSRAVVNGEDSVLVLAGAGSGKTSVLVARAGWLLRRNEALPEQILLLAFGRQAADEMNSRIKQRLGVDSIQAKTFHALALHIIQQGSRKTPVISKLESDSQARRALLIQHWQQQCSEKKAQDKRLAARLASRLERWVGLMRMYGGSQAEMIEQANDEVRDLFQKRIRLMAPLLKAWKTALKDEGAVDFSGLIHQAVNLLEKGRFVSPWKHVLVDEFQDISPQRAMLLAALRKQNKQTCLFAVGDDWQAIYRFSGAELSLTTAFSEHFGEGAECALDTTYRFNDRIGDIANRFIQQNPYQLKKPLNSLSKGNKKSVMILPDEQLEALLDKLSGFVKDGERILILARYHHLRPEVLQKAATRWPKLTIDFMTIHASKGQQADYVIIVGLHEGNDGFPAAARESVLEDVLLPPPEDFPDAEERRLLYVAITRAKHQVWLLQDTARPSIFVSQLSELGALVQRKP

SEQ ID NO: 36629 - DNA, 2055 bp, Salmonella typhimurium LT2
  CDS (1)..(2055): transl_table=11
atggaactgaaagcaacttctcttggaaaacgtctggcgcaacacccgtatgatcgtgccgagatcctcaacgctggggtgaaagtgtctggcgacaggcatgaatatcttattccattcaatcagttattggcgattcactgtaagcgtgggctggtatggggcgagctggagtttgtcctgccggaggataaagtcgtgcgtttgcacggtaccgagtggtcggaaacccagcaattccatcgctatctggacgcgcactggcgtcgctggagccaggagatgagtgatgtcgccgcgcaggcattacaggagcaatgggcgcgtattagtgagcgaacgggcggaaaccaatggcttacccgtgaacgcgttcgggggctggaacacgaaattcgccagacgtttgccgccttgccgctgccggtctcacgtctggaggagtttgctcactgtcgcgagatatggcgtaagtgtctggcatggttacaggatagcgagggtagtcggcagcagcataatcaggcgtatgctgatgccatgctggaagcgcatgccgacttttttacgcagatagaatcctctccgcttaatccttcccaggccagggcggtggttaacggcgaatcatcgttactggtactggcgggcgcgggaagcggtaagacctcggtgctggtggcgcgcgcgggttggctgttggcgcgcggacaagccgatgcggggcaaattcttttactggcgtttggtcgcaaggcggcagaagagatggatgagcgtatccgcgagcgcttacatacggaagagattactgcccgtacgttccattcgctggcgctgtatattattcagcaaggcagtaaaaaagcgccggttgtcagtaagctggaaagtgacgccaccgcgcggcatcagctatttctgcgcacctggcgtcagcagtgtagcgagaaaaaagcgcaggccaaaggctggcgtcagtggctggaagaggagatgcagtgggtagtgccggaaggtaatttctgggacgatgagacattgcagcggcgtctggcccctcgcctggatcgttgggtcagtttgatgcgtatgcacggcggcgcgcaggcagaaatgatcgctggcgcgccagaggagtgccgcgagctgtttggcaaacgcattaagctgatggcgccgctgctaaaggcctggaaaagcgcgttgaaagcggaaaatgccgttgatttctccgggctgatccatcaggcaatggtgatcctcgaaaaagggcgttttatcagcccgtggaagcatattctggtcgatgaatttcaggatatttccccgcagcgggcggcgctgttagaggcgctgcgcaagcagaatagccagactacgctgtttgccgttggcgatgactggcaggcgatttaccgttttagcggggcgcagctctccttaacgacggcgtttcatcagacgttcggcgagggcgagcattgccacctggacaccacgtaccgctttaacagtcggattggcgatattgccaatcgctttgtacagcagaatccgcaccagcttaaaaaaccgttaaatagtctgaccccaggcgataaaaaagcggtgacgttattggatgaaagccagttggacgcgttactggataaattatccggctatgcgaaggaagatgaacgtatcctggtgctggcgcgctatcaccatctgaaacccgcgagtctacaaaaagcggcgactcgctggccgaagttacagatagacttcatgactatccatgccagcaaaggccaacaggccgattacgtgattcttgtcggattgcaggagggtaacgacggtttccccgccccggcgcgagaatccattatggaaagtgcgcttcttcctcaggttgaggattttccggacgctgaagagcggcgtttgttatatgtggcgttgacgcgcgcgcgtgcgcgggtctggctgctttttaataaagataatccctcgcgctttgtggaggcgcttaaacagctggatgtgccggtggcgaggaagccctaa

SEQ ID NO: 36630 - protein, 684 aa, Salmonella typhimurium LT2
MELKATSLGKRLAQHPYDRAEILNAGVKVSGDRHEYLIPFNQLLAIHCKRGLVWGELEFVLPEDKVVRLHGTEWSETQQFHRYLDAHWRRWSQEMSDVAAQALQEQWARISERTGGNQWLTRERVRGLEHEIRQTFAALPLPVSRLEEFAHCREIWRKCLAWLQDSEGSRQQHNQAYADAMLEAHADFFTQIESSPLNPSQARAVVNGESSLLVLAGAGSGKTSVLVARAGWLLARGQADAGQILLLAFGRKAAEEMDERIRERLHTEEITARTFHSLALYIIQQGSKKAPVVSKLESDATARHQLFLRTWRQQCSEKKAQAKGWRQWLEEEMQWVVPEGNFWDDETLQRRLAPRLDRWVSLMRMHGGAQAEMIAGAPEECRELFGKRIKLMAPLLKAWKSALKAENAVDFSGLIHQAMVILEKGRFISPWKHILVDEFQDISPQRAALLEALRKQNSQTTLFAVGDDWQAIYRFSGAQLSLTTAFHQTFGEGEHCHLDTTYRFNSRIGDIANRFVQQNPHQLKKPLNSLTPGDKKAVTLLDESQLDALLDKLSGYAKEDERILVLARYHHLKPASLQKAATRWPKLQIDFMTIHASKGQQADYVILVGLQEGNDGFPAPARESIMESALLPQVEDFPDAEERRLLYVALTRARARVWLLFNKDNPSRFVEALKQLDVPVARKP

SEQ ID NO: 36631 - DNA, 2055 bp, Shigella flexneri 2a str. 301
  CDS (1)..(2055): transl_table=11
atggaactgaaagcgacaacgcttggaaaacgtctggcacagcacccttacgatcgggcggtgatcctcaatgccgggattaaagtctccggcgatcgccacgaataccttattcctttcaatcaattactggcgattcactgtaagcgcggtctggtatggggcgagctggaatttgtactgccggacgaaaaagtggtgcgtctgcacggcacagaatggggcgagacgcagcgtttttaccatcatcttgatgctcactggcggcggtggagtggcgagatgagcgaaattgcgtctggtgttttacgccagcaactggatttgattgccacgcgcactggagaaaataaatggctgacgcgtgagcaaacctctggcgttcagcaacaaatccgccaggctttgtcggcgttgccgttgccggttaaccgactggaagaattcgataactgccgtgaggcgtggcgtaaatgtcaggcttggttgaaagatattgaaagcgctcggttgcagcataaccaggcgtataccgaagccatgcttaccgagtatgcggattttttccgccaggtcgagtcttcaccgctgaatccggcgcaggcccgggcagtcgttaatggcgagcattctctgttagtgctggctggtgcaggaagcggaaaaacgtcggtgctggtggcccgtgcaggctggttgctggcgcgtggtgaagcgtcccctgagcaaattttattgctggcgtttggtcgcaaagccgctgaagagatggacgagcggattcgcgaacggctacataccgaagacattaccgcacgcacgtttcatgcgttggcgctgcatattattcagcagggcagcaaaaaagttccgatagtcagcaaactggaaaatgataccgctgcccgtcatgaactctttattgctgagtggcgcaagcaatgcagcgaaaagaaagcgcaggcgaagggctggcggcaatggctgacggaagaaatgcagtggtcagtgccagaaggtaacttctgggatgatgaaaaattacagcgtcgccttgcctctcgcctcgatcgctgggtaagtctgatgcggatgcacggtggtgcacaggcagaaatgattgccagtgcacccgaagagattcgcgatctgttcagtaaacgtatcaagttgatggccccgttattaaaagcctggaaaggtgcgctgaaggcagaaaacgctgtcgatttttcgggccttattcatcaggcgattgtgattctggagaaaggccgctttatcagcccgtggaagcatattctggttgatgaatttcaggatatctcgccgcagcgcgcagcgttgttagcggcattacgcaagcaaaacagtcagacgacgttgttcgccgttggtgatgactggcaggcgatttaccgattcagcggtgcgcaaatgtcgctcaccaccgctttccatgaaaactttggtgaaggcgatcgctgtgatttagacacgacttaccgttttaacagtcgtatcggtgaggtggcaaaccggtttattcagcagaacccaggccagctgaaaaagccgctaaacagcttaaccaatggagacaaaaaagccgtcacgttattggatgagagtcaacttgacgctttgctggataagctctctggttatgccaaaccggaagagcgcattctgatcctggcgcgttaccatcacatgaggcctgccagcctggaaaaagcggcaacacgctggccgaagttgcaaatcgactttatgaccattcatgccagcaaagggcaacaggcggattacgtcatcatcgttggcttgcaggaggggagtggtggttttccggctgcggcgcgggagtcgattatggaagaggcgctactgccaccggttgaggatttcccggacgctgaagaacggcgtttaatgtacgtggcgctgacccgggcacgccatcgggtatgggcactgtttaacaaagagaatccctctccctttgtggaaatactgaaaaatctggatgtgccggtggcgagaaaaccgtaa

SEQ ID NO: 36632 - protein, 684 aa, Shigella flexneri 2a str. 301
MELKATTLGKRLAQHPYDRAVILNAGIKVSGDRHEYLIPFNQLLAIHCKRGLVWGELEFVLPDEKVVRLHGTEWGETQRFYHHLDAHWRRWSGEMSEIASGVLRQQLDLIATRTGENKWLTREQTSGVQQQIRQALSALPLPVNRLEEFDNCREAWRKCQAWLKDIESARLQHNQAYTEAMLTEYADFFRQVESSPLNPAQARAVVNGEHSLLVLAGAGSGKTSVLVARAGWLLARGEASPEQILLLAFGRKAAEEMDERIRERLHTEDITARTFHALALHIIQQGSKKVPIVSKLENDTAARHELFIAEWRKQCSEKKAQAKGWRQWLTEEMQWSVPEGNFWDDEKLQRRLASRLDRWVSLMRMHGGAQAEMIASAPEEIRDLFSKRIKLMAPLLKAWKGALKAENAVDFSGLIHQAIVILEKGRFISPWKHILVDEFQDISPQRAALLAALRKQNSQTTLFAVGDDWQAIYRFSGAQMSLTTAFHENFGEGDRCDLDTTYRFNSRIGEVANRFIQQNPGQLKKPLNSLTNGDKKAVTLLDESQLDALLDKLSGYAKPEERILILARYHHMRPASLEKAATRWPKLQIDFMTIHASKGQQADYVIIVGLQEGSGGFPAAARESIMEEALLPPVEDFPDAEERRLMYVALTRARHRVWALFNKENPSPFVEILKNLDVPVARKP

SEQ ID NO: 36633 - DNA, 2070 bp, Vibrio parahaemolyticus RIMD 2210633
  CDS (1)..(2070): transl_table=11
atgcagcttactgccaccagcaaagcacagttttttattcaaaatgagtattatcatgtcgaaataaaagagaacagtgttttattaagctcaattggcagtgaagagcatattcctttcaccgtctggaacggtaaagtcaacgtgaaacgcggcctgttttggagctcgcttcagttcttcgctcacgagcaagatggcaagcaacaaagttggttagtacaaggtttaccttggcctcaatgtcgtaagtttgcgttagaagctgtgcgtcaatatcaagattggcacaacactcagtgccgaaaactggcggagtaccttcctaaatgggaagaagagttgtaccagctcaaacaccttcctgcctatctttctcattctcaagttatggcgtgggtagagaaactcaatcaagaactcgcagaaatcaagaccagcctagacgaagctaaaatgcgcatgcctaatcgcatgggtgaaattgagccttggctggttgacacctctcatacgctgggagagcgcaatcacgaatggctggagaacgaacgtcctaattgggaagtcttgttcaaccgcattgaatcgtctccgctgaacttgtcgcaacaatacgcagtgttgctcaatgatgatcacaacctcgttttggctggggcaggctcgggtaaaaccagcgtattgactgcaagagtggcttacttacttcaaagccatcaagctcaagcggaagaacttttgatgcttgcgtttggccgagatgccgcgaaagaaatgaaagagcgtttggttgataaagtcggtttggcggcagaaggcgtaagagtcaatacctttcatcaactcggcttgtacattcttaatcaagtcgagcagcagcctgtcgaaattagccctcttgcattagacgataaccaacgcacggcttggtgtgtcgactggttgaaaaagcactggatgacaccaacaaatttcaaacgttggcaaaagcatttagataaatggcctattgcttacctgaaaggtgatgatgagctgggtagccattcggaaaacccgaagctgattgcttggttggattctcaattgtcgcatttagctgctgttggtttaacaaaaaagcaagtgcaagagaagttggtggatcaccaagactatacgcgcctcaatagcgaattagcattgtgttggccgtgtttttctgcatggcaaaaaatgctcaaagagagcaatcaagtcgatttcccaaccatgataagtcgagcaacggattacgtgaataaagggaagttcgtatcgccttggcgttttgttatggtcgatgagtatcaagatatctctccagatcgtttggcgttgatcgaagcgttatgtgaatcaacagagaagcagcctggcgcaaccttgtttgccgtgggcgatgactggcaagcgatttaccagtttgcgggcgcagatgtggacttgattactgggtttaaagagcgattcgctcactctacggtacatcacctagacacgacctatcgtttcaataatcaaattggcgatgtggcgaatacgttcgtgcaacaaaacccatcacaattaccgaagacgctcaacagccacaaacaacgcaagcaaaagagcgtgcacacagcgccaagcaaccaagttgagaaaatcctcgatcaattgaatcaacaagcgaaacaaactaagtctgtattgttgcttggccgtaaccattaccataaacccgatttgtatgatgactggttaagacgattcccgaatctcgatattcgttttatgacttgtcatgcgagtaaaggtcgagaagccgattttgtgattattttggctgtggatgaagggcagttcccagcgaagaagaagcagattcacatcgacggtgcgttgaccgagtccaaagacaaattcccgtatgccgaagagcgccgactgttctatgtcgcagttacgcgtgcaaaagagaaagtgtggatcacgcatacgggcgcgggttctgcatttgtgcaagaactcgtaagtggcgactacccaatcgttacctcacgctaa

SEQ ID NO: 36634 - protein, 689 aa, Vibrio parahaemolyticus RIMD 2210633
MQLTATSKAQFFIQNEYYHVEIKENSVLLSSIGSEEHIPFTVWNGKVNVKRGLFWSSLQFFAHEQDGKQQSWLVQGLPWPQCRKFALEAVRQYQDWHNTQCRKLAEYLPKWEEELYQLKHLPAYLSHSQVMAWVEKLNQELAEIKTSLDEAKMRMPNRMGEIEPWLVDTSHTLGERNHEWLENERPNWEVLFNRIESSPLNLSQQYAVLLNDDHNLVLAGAGSGKTSVLTARVAYLLQSHQAQAEELLMLAFGRDAAKEMKERLVDKVGLAAEGVRVNTFHQLGLYILNQVEQQPVEISPLALDDNQRTAWCVDWLKKHWMTPTNFKRWQKHLDKWPIAYLKGDDELGSHSENPKLIAWLDSQLSHLAAVGLTKKQVQEKLVDHQDYTRLNSELALCWPCFSAWQKMLKESNQVDFPTMISRATDYVNKGKFVSPWRFVMVDEYQDISPDRLALIEALCESTEKQPGATLFAVGDDWQAIYQFAGADVDLITGFKERFAHSTVHHLDTTYRFNNQIGDVANTFVQQNPSQLPKTLNSHKQRKQKSVHTAPSNQVEKILDQLNQQAKQTKSVLLLGRNHYHKPDLYDDWLRRFPNLDIRFMTCHASKGREADFVIILAVDEGQFPAKKKQIHIDGALTESKDKFPYAEERRLFYVAVTRAKEKVWITHTGAGSAFVQELVSGDYPIVTSR

SEQ ID NO: 36635 - DNA, 2055 bp, Salmonella enterica subsp. enterica serovar Typhi Ty2
  CDS (1)..(2055): transl_table=11
atggaactgaaagcaacttctcttggaaaacgtctggcgcaacacccgtatgatcgtgccgtgatcctcaatgctggggtgaaagtgtctggcgacaggcatgaatatcttattccattcaatcagttattggcgattcactgtaagcgtgggctggtatggggcgagctggagtttgtcctcccggaggataaagtcgtgcgtttgcacggtaccgagtggtcggaaacccagcaattccatcgctatctggacgcgcactggcgtcgctggagccaggagatgagtgatgtcgccgcgcaggcattacaggagcaatgggcgcgtattagtgagcgaacgggcggaaaccaatggcttacccgtgaacacgttcgtgggctggaacacgaaattcgccagacgtttgccgccttaccgctgccggtctcacgtctggaggagtttgctcactgtcgcgagatatggcgtaagtgtctggcatggttacaggatagcgagggaagtcggcagcagcataatcaggcgtatgctgatgccatgctggaagcgcatgccgacttttttacgcagatagaatcttctccgcttaatccttcccaggccagggcggtggttaacggcgaatcatcgttactggtactggcgggcgcgggaagcggtaagacctcggtgctggtggcgcgcgcgggttggctgttggcgcgcgggcaagccgatgcggggcaaattcttttactggcgtttggtcgcaaggcggcagaagagatggatgagcgtatccgcgagcgcttacatacggaagagattactgcccgtacgttccattcgctggcgctgtatattattcagcaaggcagtaaaaaagcgccggttgtcagtaagctggaaagtgacgccaccgcgcggcatcagctatttctgcacacctggcgtcagcagtgtagcgagaaaaaagcgcaggccaaaggctggcgtcagtggctggaagaggagatgcagtgggtagtgccggaaggtaatttctgggacgatgagacattgcagcggcgtctggcccctcgcctggatcgttgggtcagtttgatgcgtatgcacggcggcgcgcaggcagaaatgatcgctggcgcgccagaggagtgccgcgagctgtttggcaaacgcattaagttgatggcgccgctgctgaaggcctggaaaagcgcattgaaagcggaaaatgccgttgatttctccgggctgatccatcaggcaatggtgatcctcgaaaaagggcgttttattagcccgtggaagcatattctggtcgatgaatttcaggatatttccccgcaacgggcggcgctgttagaggcgctacgcaagcagaatagccagactacgctgtttgccgttggcgatgactggcaggcgatttaccgttttagcggggcgcagctctccttaacgacggcgtttcatcagacgttcggcgagggcgagcattgtcacctggacaccacgtaccgttttaacagtcggattggcgatattgccaatcgctttgtacagcagaatccgcaccaacttaaaaaaccgttaaatagtctgaccccaggcgataaaaaagcggttacgttattggatgaaagccagttggacgcgttactggataaattatccggctatgcgaaggaggatgaacgtatcctggtgctggcgcgctatcaccatctgaaacccgcgagtctacaaaaagcggcgactcgctggccgaagttacagatagatttcatgactatccatgccagcaaaggccaacaggccgattacgtgattcttgtcggattgcaggagggtaacgacggtttccccgccccggcgcgagaatccattatggaaagtgcgctttttcctcaggttgaggattttccggacgctgaagagcggcgtttgttatatgtggcgttgacgcgcgcgcgtgcgcgggtctggctgcttttcaataaagataatccctcgcgctttgtggaggcgcttaaacagctggatgtgccggtggcgaggaagccctaa

SEQ ID NO: 36636 - protein, 684 aa, Salmonella enterica subsp. enterica serovar Typhi Ty2
MELKATSLGKRLAQHPYDRAVILNAGVKVSGDRHEYLIPFNQLLAIHCKRGLVWGELEFVLPEDKVVRLHGTEWSETQQFHRYLDAHWRRWSQEMSDVAAQALQEQWARISERTGGNQWLTREHVRGLEHEIRQTFAALPLPVSRLEEFAHCREIWRKCLAWLQDSEGSRQQHNQAYADAMLEAHADFFTQIESSPLNPSQARAVVNGESSLLVLAGAGSGKTSVLVARAGWLLARGQADAGQILLLAFGRKAAEEMDERIRERLHTEEITARTFHSLALYIIQQGSKKAPVVSKLESDATARHQLFLHTWRQQCSEKKAQAKGWRQWLEEEMQWVVPEGNFWDDETLQRRLAPRLDRWVSLMRMHGGAQAEMIAGAPEECRELFGKRIKLMAPLLKAWKSALKAENAVDFSGLIHQAMVILEKGRFISPWKHILVDEFQDISPQRAALLEALRKQNSQTTLFAVGDDWQAIYRFSGAQLSLTTAFHQTFGEGEHCHLDTTYRFNSRIGDIANRFVQQNPHQLKKPLNSLTPGDKKAVTLLDESQLDALLDKLSGYAKEDERILVLARYHHLKPASLQKAATRWPKLQIDFMTIHASKGQQADYVILVGLQEGNDGFPAPARESIMESALFPQVEDFPDAEERRLLYVALTRARARVWLLFNKDNPSRFVEALKQLDVPVARKP

SEQ ID NO: 36637 - DNA, 2055 bp, Photorhabdus luminescens subsp. laumondii TTO1
  CDS (1)..(2055): transl_table=11
atggaacttaaagcaacacaaattggccaatgccttgctcagcatccttataatcgggtgcgcttgctgaatgcgggtattgaagtcagtggtgaaaagcatcaatacctgatcccatttaaccagttaattaatattcagtgtaaacggggtatcatctggggtgagttagagtttgaactatccgatggacaagcggttcgccttcatggtactgaatggcagcaaactcagcgtttttaccattatctgcttggtgaatggcagaaatggagccaggaaatgagtgatattagtgcgaatgtactgacagctcaggttagtgaaatcaacagaattggacaacagaatcgttggttgaaaaaagctgatttactccaattacaacaacaaattcaagcaacatttcaggctttaccgttgccattacagcgtctggaacaatttgatcattgccgggatgggtatcaaatttgtttgcgttggcttgagaatggcgaaaagtgtgttgaaaaaatcaatctgcaatggacagaacgtatgttggagcaacactgtgacttttttcagcggatagaagcatctcctttaaaccgttctcagagtctggctgttattaatggtgaaaattcagttctggttcttgctggcgcgggtagtggaaaaacatcggtgttagtagcgagagcgggttggttattacttctccaacaggcgattcctgaacagatattattgttagcctttagtcatcaagccgtcaatgagatgaatgagaggattcagagtcgtcttggtgtgaatgatattaaagtaaaaacgtttcatactttggcgttgcatatcattcagcaagggagtaataaagcgccaaaaatcagcgtattggaaacagatggacaaaaaagaaaagactttctgattaaacactggcaacaacaatgtagcgagaagaaagcacaggccaaaggttggcgggaatggctgacagatgagttgaaatgggaagtgccggaaggtgaattttggcacgatgaacagcttgctaaccgcctgtcaaatcggcttgagtgctggctggggttgatgcgtatgcatggtggtagtcagaaagcaatgatagagcaagttcaggaagagtatctggatcggtttcaaaaatgtattcgcttgatggagcctttattaaaggcgtggaaatctgaattgaaaacagaaggtgctgttgattactcagggttaatccatcaggcagtgaatattctggataaagggcggtttatcagcccgtggaagcatattttggtcgatgagtttcaggatatttcaccattatgggccaaattgctcactgcaatgcgaacccaaaatagccaaagctgtctatttgccgtaggggatgactggcaggcaatttatcgttttagtggcgcggaacggatgttgactagcgcatttgctaattactttggcaaaggtgctgaatgtgtactggatatctcttatcggcttaatgataggattagtaagattactaacgcgtttgtgcaacaaaatccaaatcagttaaggaaatcactaaatggtttgactaaaggtaataaaaaatcaattgttatcctgccagaagaccagcttgaacctttgttaaataaaatgagtggctatgtcactgagcaagaaacgattttattgctggcgcgttatcactatttgaaacctgaattactgaaaaaagcagcaactcgctggcctaaattgaaaatagaatttatgactatccatgcttctaaaggacagcaagcggattatgtgattattcttggtctgcatcaggggcaagatggttttcctgcaccagcaagggaatctgtgatggagtgggttttattgccacagccggaagatttttcggatgcggaggagcgtcgtcttttgtatgttgcattaacacgggcgaagaagcaggtgtggttgatgcaagacaagaataatccatcggtgtttgtacgtcagttagagcagttaagtgtgcctgttcaacgtaaaccttaa

SEQ ID NO: 36638 - protein, 684 aa, Photorhabdus luminescens subsp. laumondii TTO1
MELKATQIGQCLAQHPYNRVRLLNAGIEVSGEKHQYLIPFNQLINIQCKRGIIWGELEFELSDGQAVRLHGTEWQQTQRFYHYLLGEWQKWSQEMSDISANVLTAQVSEINRIGQQNRWLKKADLLQLQQQIQATFQALPLPLQRLEQFDHCRDGYQICLRWLENGEKCVEKINLQWTERMLEQHCDFFQRIEASPLNRSQSLAVINGENSVLVLAGAGSGKTSVLVARAGWLLLLQQAIPEQILLLAFSHQAVNEMNERIQSRLGVNDIKVKTFHTLALHIIQQGSNKAPKISVLETDGQKRKDFLIKHWQQQCSEKKAQAKGWREWLTDELKWEVPEGEFWHDEQLANRLSNRLECWLGLMRMHGGSQKAMIEQVQEEYLDRFQKCIRLMEPLLKAWKSELKTEGAVDYSGLIHQAVNILDKGRFISPWKHILVDEFQDISPLWAKLLTAMRTQNSQSCLFAVGDDWQAIYRFSGAERMLTSAFANYFGKGAECVLDISYRLNDRISKITNAFVQQNPNQLRKSLNGLTKGNKKSIVILPEDQLEPLLNKMSGYVTEQETILLLARYHYLKPELLKKAATRWPKLKIEFMTIHASKGQQADYVIILGLHQGQDGFPAPARESVMEWVLLPQPEDFSDAEERRLLYVALTRAKKQVWLMQDKNNPSVFVRQLEQLSVPVQRKP

SEQ ID NO: 36639 - DNA, 2058 bp, Erwinia carotovora subsp. atroseptica SCRI1043
  CDS (1)..(2058): transl_table=11
atggaactgaaatctacctcgttaggtaaacatctggcccagcatccttacaatcgggtgcggttactgaatgccggtgtcgaagtgagtggcgataagcatgaatacctgatcccctttaatcagttgctgagtattcactgcaaaagagggctggtgtggggtgagctggagtttgaattgccggctggaaaagtggtgcgtttgcatggcacggagtggcaggaaacgcaggctttttaccgccatcttctcaaatcctggcttgactggagcgaggagatgagtctgatcagcgctgaggttttacagcgtcagacggacagtattcaaacactgacgcagcaggataaatggtgtaaccgtcaggctctgtcaacattgcagagtgctatccgtgattcgctagcggcgctgcctctgccggtttcccgattagaaaccttcgataactgctgtgataattaccagcactgcttacgctggcttgagcagggcgacgaaatgcgcactgcggcgaatcaggcatggatggatcgcacgctggcggcagagcagcctttctttgaaacggtagagagttcgccattaaacatgtcgcagagtaaagccgtgattaatggtgaagagggtgtactggtgctggcgggtgcaggcagtgggaaaacctccgtgctggtggcccgagcagcgtggttaatgcatcgacaagaggccacgcccgatcagattttgctgctggcatttggtcgtaaagcagccgaagagatgaatgagcgcatccatgagcggctccacacggatgaaattcaggctaagacgtttcatgctttagcattgcacatcattcagcaggctagtcgtaaagctccgatgataagccagctagaaagtgatgcaaaacagcgtcgcgaactgctgatttctcactggcaacagcaatgtgctgagaaaaaaacgcaggctaacggatggcgacgctggttaactgaagagctggagtgggatgtgccagaaggtgatttctggaacgatccgaagctggcgagtcggctggcagggcgacttgagcgctggttagggttgatgcgtatgcacggtggcagccaaagtgaaatggttgaacaagcaccagaatccattcagacggagtttcagcaacgtattcgcctgatggccccgttgttaaaagcttggaaaaaagcgcttaaagacgaaaacgcggtcgacttctccggccttatccatcaggcggtgaatttgctggataaagggcgttttgtgagtccctggaaacatattctagtggatgaatttcaggatatctcgccacagcgtgcaagtttgttagcggcactgcgtcgacaaaatagccgtacctgcctttttgccgtgggagatgactggcaggcaatttaccgttttagcggcgctgagctggcgttgacgacggcgtttgaacagcattttggcgtaggtgagcagtgcgcgttggatacaacttatcgctttaatgagcgtattggtgaaattgctaacacgttcatacaacagaatccgtaccagttaaagaaaccgctgaatagcctgagcaaaggggataaaaaagcggtaaccattcttccacaggatcagcttgagccacttctggataaactgagcggctttgttaaggatgatgagcgcattctcgtgcttgcccgttatcaccatttgcgcccagcgattttagaaaaggcagcaaccaaatggccgaatttgcagattgatttcatgacagtgcatgccagtaaagggcagcaggcggaatacgtcattattgtgggtatgcacgaggggaaagatggcttcccggctccggcacgagagtctgtgattgaagcggtgctgttacctgaacctgaggatttccccgatgcagaagaacgtcgcttattgtatgtggcgttgacgagggcgaaacatcgcgtctggttgctacaggacgtgacaaacccgtcggtgtttgttgaacatcttcatcgtttaggcgtcccgacacagcgtaagccaggatag

SEQ ID NO: 36640 - protein, 685 aa, Erwinia carotovora subsp. atroseptica SCRI1043
MELKSTSLGKHLAQHPYNRVRLLNAGVEVSGDKHEYLIPFNQLLSIHCKRGLVWGELEFELPAGKVVRLHGTEWQETQAFYRHLLKSWLDWSEEMSLISAEVLQRQTDSIQTLTQQDKWCNRQALSTLQSAIRDSLAALPLPVSRLETFDNCCDNYQHCLRWLEQGDEMRTAANQAWMDRTLAAEQPFFETVESSPLNMSQSKAVINGEEGVLVLAGAGSGKTSVLVARAAWLMHRQEATPDQILLLAFGRKAAEEMNERIHERLHTDEIQAKTFHALALHIIQQASRKAPMISQLESDAKQRRELLISHWQQQCAEKKTQANGWRRWLTEELEWDVPEGDFWNDPKLASRLAGRLERWLGLMRMHGGSQSEMVEQAPESIQTEFQQRIRLMAPLLKAWKKALKDENAVDFSGLIHQAVNLLDKGRFVSPWKHILVDEFQDISPQRASLLAALRRQNSRTCLFAVGDDWQAIYRFSGAELALTTAFEQHFGVGEQCALDTTYRFNERIGEIANTFIQQNPYQLKKPLNSLSKGDKKAVTILPQDQLEPLLDKLSGFVKDDERILVLARYHHLRPAILEKAATKWPNLQIDFMTVHASKGQQAEYVIIVGMHEGKDGFPAPARESVIEAVLLPEPEDFPDAEERRLLYVALTRAKHRVWLLQDVTNPSVFVEHLHRLGVPTQRKPG

SEQ ID NO: 36641 - DNA, 2055 bp, Yersinia pseudotuberculosis IP 32953
  CDS (1)..(2055): transl_table=11
atggaacttaaagcgacatcttttggcaaacatctgtctcagcatccctataaccgggtccgcttgctgaatgcaggcatcgaagtctgcggtgataaacatcaatacctaatcccttttaaccaactggttagtattcagtgtaaacgaggtatcgtttggggcgagcttgaatttgagttgccgcagcagaaagttgtacggttgcacggtactgaatggcaggaaacacaacatttctatcattacttgctaggggtatggcagcaatggagtgaagaaatgagccaggtttgtgcggaggtgctacataaacaggtggagtcaattaagcgaattgaacagcaggataaatggtttaaacgcagtgaattaggccagatacaagtcatgatccgcgaggcattcagtgccttaccaatgccagtggaacgcttagcggcgtttgaatcctgtcgagcagattatgaatgctgcctgcgttggttacagcaaggtcgtcacagtgttgaacgatgtaatcagcaatggacagcccgtatgttggaggagtatcaagattttttccaaaatgtagaaacttcgccccttaatgcctcacaaagccgggcggtggttaacggtgaagattcagttttggtgttagccggcgcgggtagcggtaaaacatcggtgctggtggcgcgtgcgggctggttgctacgtcgtaatgaggcactacctgagcagattttattgctggcatttggtcgccaggcggccgatgaaatgaatagccgtattaaacaacgcttgggcgtggatagcatccaagctaaaacttttcatgctctggcattacatattatccagcaaggtagccgcaagacaccggttatcagcaagcttgagtctgatagccaggccagaagggcgttgttaattcaacattggcagcaacagtgtagcgagaagaaagcacaggccaaagggtggcgagagtggctaactgatgagttggaatgggacgttgctgacggcgatttctggcaggacaaaaggttggctgcgaggctggcaagtcgccttgaacgttgggtagggttgatgcgtatgcacggtggcagtcaggctgaaatgattgagcaagcgaatgacgaggtgcgtgacctgtttcaaaagcgtatccgtttaatggcaccgttgctaaaagcctggaaaacggcattgaaagatgagggtgccgtcgatttttctgggttgattcatcaggcggttaacttgctggagaaagggcgctttgtcagcccatggaagcatgttttggttgatgagttccaggatatctcaccacaaagggcgatgttactcgcggcgctgcgtaaacagaataagcaaacttgcctgtttgcggttggcgatgattggcaggctatttaccgcttcagtggtgctgaactttcgctgacaacggcttttagcgagcattttggtgaaggtgctgaatgtgcactggatacgacttaccgctttaatgatcggattggtgatattgcgaaccggtttattcagcaaaacccttatcaactgaagaaaccacttaatagcttgagtaagggtaataaaaagtcggtcatgattttacccgatgagcagttggaggccctattagataaattaagcggctttgttaaggacggcgaacgtatcctaatattggcgcgttaccatcatttacgccccgaagttttacaaaaagcggcgacgcggtggccaaagttgactatcgattttatgaccatccatgccagcaaagggcagcaggctgattatgtcattatcgttggcttacatgagggtaatgatgggttcccagccgcggcgcgggaatctgtactggaagatgtgttgctacctcctcccgaagatttccctgatgctgaagagcggcgtttgctttatgtcgcaataacgcgtgctaagcaccaagtgtggttactacaagatacggcacggccttctatttttgtctctcaactcagtgaattaggtgccctggtacaacgtaagccctag

SEQ ID NO: 36642 - protein, 684 aa, Yersinia pseudotuberculosis IP 32953
MELKATSFGKHLSQHPYNRVRLLNAGIEVCGDKHQYLIPFNQLVSIQCKRGIVWGELEFELPQQKVVRLHGTEWQETQHFYHYLLGVWQQWSEEMSQVCAEVLHKQVESIKRIEQQDKWFKRSELGQIQVMIREAFSALPMPVERLAAFESCRADYECCLRWLQQGRHSVERCNQQWTARMLEEYQDFFQNVETSPLNASQSRAVVNGEDSVLVLAGAGSGKTSVLVARAGWLLRRNEALPEQILLLAFGRQAADEMNSRIKQRLGVDSIQAKTFHALALHIIQQGSRKTPVISKLESDSQARRALLIQHWQQQCSEKKAQAKGWREWLTDELEWDVADGDFWQDKRLAARLASRLERWVGLMRMHGGSQAEMIEQANDEVRDLFQKRIRLMAPLLKAWKTALKDEGAVDFSGLIHQAVNLLEKGRFVSPWKHVLVDEFQDISPQRAMLLAALRKQNKQTCLFAVGDDWQAIYRFSGAELSLTTAFSEHFGEGAECALDTTYRFNDRIGDIANRFIQQNPYQLKKPLNSLSKGNKKSVMILPDEQLEALLDKLSGFVKDGERILILARYHHLRPEVLQKAATRWPKLTIDFMTIHASKGQQADYVIIVGLHEGNDGFPAAARESVLEDVLLPPPEDFPDAEERRLLYVAITRAKHQVWLLQDTARPSIFVSQLSELGALVQRKP

SEQ ID NO: 36643 - DNA, 2124 bp, Pseudoalteromonas tunicata D2
  CDS (1)..(2124): transl_table=11
atgcttgcagtcagtacagagcctaaaataaccagtcatcagcttgtcagtttgttgcaaaaaaataatcgggttatcacttacaacagcatgacagtgacaatcttacaaggcaaccaatcgcaaacgattgcatggtgtgacatcattaagcctataactcttaaaaccagttggtttggagggcgtttaactttagtaacagcagcacaaacctttagttttaaatggttacgatatgactcagagcaaacacatcagcaagctttgctagactgttggattaatattcatcagataaagttaaacacatcgcttagagatattacgcaacaactgacaaaacggtattttaaaagcagcgaaaaaccatctttagaacataaaattagccagttagcgagtacttggcttgggctcgctgacaagatgactctgtcgcaagacattgttgcaagcattaaacagcttgatacgctttaccctctggatgagcagaaaactcgtcaatttcgagcctattttgtccaaaatgagcttactcgatacaaattgttttttgacaagcaaaacagccatcctatgacacctaaacaacgccaagcatgtgtaataaatgatgataataatctggttttagcgggtgctggcagtggtaaaacaagtgtgatggttgggcgggttggttatttattacaaagcggtcttgcaaaaccttcccaaatattaatgctcgcttatggtaaagatgccgcacaagaaatggatctacgacttaaaaattctttgcaacgtcatgatattaaatgcgcgacatttcatagcttagcacttagtatcatcaaccaagtgcaaggggttatgccaaacattagtgtttttgcaaccgatgcagctacaagaaaatcatggttaacagaacagtttcattatttaattaatcgacaattaagttataaaaaacaggtaatagatttacttaaccaagtaaatatggaggctaaaaagagtttttctcacaaaaccactattgaccaattgctgagtcacagcgattttgtaaatttacaaacccatgtactgggcttatttgatctgatccgctcagctgcgagcgcgctttctggcgtacctcagtattttgatgataaatgcacacaagctaccctcgagcattatttcatgctggtaaaacctttaatagatgcttatcagagcaaactgcatcaacaacaggcagttgattttgatgatatgatttttcaagcgcacaacatgatacacacaggtaaatttaaagcaccttggttgcatattctagttgacgaatttcaagatatttcagagcctagggcacagttactaaaagcgctcagagacaatactcacggtagtgttttgtttgcagttggagatgattggcaatcaatttatcgttttagcggctcaaatcatcattttattacacaattccagcgttattttggtgcaagttgtacggttaatctagaccaaacatttcgctttaataataaaatagctgaagtagcgaatcgatttgttatgcaaaatcctgctcagatgaaaaaagaacttaactctaaagtaattcaatcgcatagttccgtcaccatcatcacagattttaatactgaaaagcaaaatgctaacgtacaagccattattgatgcgctgagctttattgataaaacacagaaagcaagtgtgtatatattagcgcgttttagtttcttgctaccaaacgcagcgcaaatgggtctgttaacacaacgttttaaacaccttataattgaaagttatactgtgcacagtagtaaaggaaaagaagctgattatgtgatactggtaggcctgagtgaagggaaatacggttttccggctaaacaaaatcacaacctgatctttgatgcctttttaccaccacaagatgattatttgtttgccgaagaacggcgtttattttacgttgcgcttactcgagccaaaaaacatgtgtatttaattataccaagctctgggatcagtgaatttgtacttgaattaatcaacaatcaatatgatatcgctcttgataaacaggcgatcagcctagcgcacacctag

SEQ ID NO: 36644 - protein, 707 aa, Pseudoalteromonas tunicata D2
MLAVSTEPKITSHQLVSLLQKNNRVITYNSMTVTILQGNQSQTIAWCDIIKPITLKTSWFGGRLTLVTAAQTFSFKWLRYDSEQTHQQALLDCWINIHQIKLNTSLRDITQQLTKRYFKSSEKPSLEHKISQLASTWLGLADKMTLSQDIVASIKQLDTLYPLDEQKTRQFRAYFVQNELTRYKLFFDKQNSHPMTPKQRQACVINDDNNLVLAGAGSGKTSVMVGRVGYLLQSGLAKPSQILMLAYGKDAAQEMDLRLKNSLQRHDIKCATFHSLALSIINQVQGVMPNISVFATDAATRKSWLTEQFHYLINRQLSYKKQVIDLLNQVNMEAKKSFSHKTTIDQLLSHSDFVNLQTHVLGLFDLIRSAASALSGVPQYFDDKCTQATLEHYFMLVKPLIDAYQSKLHQQQAVDFDDMIFQAHNMIHTGKFKAPWLHILVDEFQDISEPRAQLLKALRDNTHGSVLFAVGDDWQSIYRFSGSNHHFITQFQRYFGASCTVNLDQTFRFNNKIAEVANRFVMQNPAQMKKELNSKVIQSHSSVTIITDFNTEKQNANVQAIIDALSFIDKTQKASVYILARFSFLLPNAAQMGLLTQRFKHLIIESYTVHSSKGKEADYVILVGLSEGKYGFPAKQNHNLIFDAFLPPQDDYLFAEERRLFYVALTRAKKHVYLIIPSSGISEFVLELINNQYDIALDKQAISLAHT

SEQ ID NO: 36645 - DNA, 2082 bp, Photobacterium sp. SKA34
  CDS (1)..(2082): transl_table=11
atgcaattaaatgccagttggttagcacaatggttagtgcagggtgattattacagtatcgctttagatgacaattcattggttttagatagccaagttggctcagaagtgatctcgtttgacgattgggatggctcaattgaaatacatcgcggtgtgttatggggagcgttagagctaacctcttctgatcagcaatattgctggactattcatggtttgccttggagcgaatgtaagccgtttgccgcttttcttatccgcacttatcaagattgggcaagaaatcgcgttgataaattagacgctgttttacctgaaatcttacagcgtattggcaaattttcatcacagccgggctatttacgtggctctgagcatgaatcgttacatacttttcttcatcaatcgcttgctgatacagatttaacaccagagttagcggcatcattccgtcctcgtagctttgaaaaaatttcgccttggctagaagaacatcaagattgggttgaagaacacaataagacttggattaaacagcaatctgaaaaatggggctcatggtttgatagctttgagcgttcagcattaaatgactctcaacgagaagctgcgttaatcaaccaagatcataacctagtacttgccggtgcaggtacgggtaaaaccagtgttttggtggctcgtgcaggctacttaattgcgagtcagcaggctgtacctgaagatattttgatgttggcctttggccgaaaagcggcagaagaaatgtcggagcgtatgggtgagaaagtcagcgatcgcgttaaagtggctaccttccatagcttaggttcgcaaatcatcgcagaagttgaaaaagaaaagcctaatgtagcaggtgtcgctattgatgcacgtgttcgttcagcatggattgctcgtatgttgattgaacaatggaataaatcatcgtcagcgagcaaatggcaacgtcaccttacgcaatggcgagttccgggttttagcaaagaaaacacgatggaacaacaggctgaaaatgagcaattgcaagcttgggtttggcgccatattgaattattaggtcaatcgatattgtcgaaagaagcgctaatagaagaaattcaaaataacaagaacccagcgatgcgtccgcgtatgaagagtgagttagagttattatggccttgctatcaagcttatcagcagtacttaaaattaaagaaacaaattgactttaacagcatgattgatgtggcaactcaatatgttaaagaaggtaagttcttgtcaccttggcgttttattatggtggacgaataccaagatatttcgccacaacgtttagcgctcattgaagcgttatgcggtcagaaaatagaagctaagtcgaccccaaccttatttgccgttggtgatgattggcaggctatttaccgttttgcgggagctgatgtaaacttaacgactgactttgaaggacgttttggttcatctcatatcactgagctatcaacgacgtatcgctttaatagcatgattggcgaagtggcaaatttgtttattcaacaaaacccaagccaaattaaaaagcagttaaccagctttacgaaacaaagtaagaaagcggtaactttgcttgatagtgatttaatgctgcaagatttaacccgtttagccaaactttatgataataaagaaacgagcgtgatgatcttgggtcgtaacaataagcagaaaccagcaaagtttgaagactggaaagcacagtggccacaacttaacttggtatacatgacatgccacgcgagtaaagggcgtgaagctgattatgtatttattgttgatgttaacaaaggtattttcccgtctccagatcgtgaaacaggtttagctgctgtgatgcaaccacgtactgaaaactatactgatgctgaagaacgccgtttgttctatgttgcgttaacacgtgcgcgtaaacatgtatgggtatgtgctggctcacataatacatcttcttttatcaatgagttaatcgaagataaataccctgtaaataataagattaaacgcattaagtaa

SEQ ID NO: 36646 - protein, 693 aa, Photobacterium sp. SKA34
MQLNASWLAQWLVQGDYYSIALDDNSLVLDSQVGSEVISFDDWDGSIEIHRGVLWGALELTSSDQQYCWTIHGLPWSECKPFAAFLIRTYQDWARNRVDKLDAVLPEILQRIGKFSSQPGYLRGSEHESLHTFLHQSLADTDLTPELAASFRPRSFEKISPWLEEHQDWVEEHNKTWIKQQSEKWGSWFDSFERSALNDSQREAALINQDHNLVLAGAGTGKTSVLVARAGYLIASQQAVPEDILMLAFGRKAAEEMSERMGEKVSDRVKVATFHSLGSQIIAEVEKEKPNVAGVAIDARVRSAWIARMLIEQWNKSSSASKWQRHLTQWRVPGFSKENTMEQQAENEQLQAWVWRHIELLGQSILSKEALIEEIQNNKNPAMRPRMKSELELLWPCYQAYQQYLKLKKQIDFNSMIDVATQYVKEGKFLSPWRFIMVDEYQDISPQRLALIEALCGQKIEAKSTPTLFAVGDDWQAIYRFAGADVNLTTDFEGRFGSSHITELSTTYRFNSMIGEVANLFIQQNPSQIKKQLTSFTKQSKKAVTLLDSDLMLQDLTRLAKLYDNKETSVMILGRNNKQKPAKFEDWKAQWPQLNLVYMTCHASKGREADYVFIVDVNKGIFPSPDRETGLAAVMQPRTENYTDAEERRLFYVALTRARKHVWVCAGSHNTSSFINELIEDKYPVNNKIKRIK

SEQ ID NO: 36647 - DNA, 2070 bp, Vibrio sp. Ex25
  CDS (1)..(2070): transl_table=11
atgcagctcactgccactagcaaagcacagttttttattcaaaatgagtaccatcacgtcgaaataaaagagaacagtgttttattaagctcaataggcagtgaagaacatattccttttacgatctggaatggcaaagttagcgtaaagcgtgggttgttatggagctctttgcagttttttgctcatgagcacgaaggcaaacaacaaagctggctagtacaagggctaccgtggccacaatgccgtaagtttgctcttgaagctgttcgtcagtatcaagaatggcacaatactcagtgccgaaaactggctgagtatctacctaagtgggaagaagagctctacaaacttaagcatcttcctgcctatctatcgcactctcaagtggtctcctgggtggaaagtcttaaccaagagttaagcgaaatgaaaaccactctagaagaagccaaaatgcggatgccgaatcgcatggcggaaatcgaaccttggcttattgatacgtctgcgacgcttggtgagcgtaatcgtgattggcttgaggaagaacgtccgaattgggaagtgctgtttaatcgcatagaatcttcgcctttaaacttatcccagcaatatgcggtgttgctcaacgatgatcacaacttagtccttgctggcgcaggctctggcaaaaccagtgttttaacggctcgagttgcatacttgttgcaaagccaccaggctcaagcagaagagttgcttatgctggctttcggtcgtgatgccgcgactgaaatgaaagagcgtttagtggataaagtaggcatggccgcagacggtgtgcgtgtgaatacgttccatcaactaggcttatatatacttaatcaagttgagcaacagcctgttgagatcagtccgttggcgttagatgacaaccagcgaacggcatggtgtgtagattggctgaaaaagcattggatgacgcctactaactttaaacgttggcaaaaacatttagacaaatggccgattgcctatttaaaaggggacgatgagttaggaagtcactcagaaaacccaaaactgatcgcgtggctagactctcagttgtctcacttagctgcggtagggctaaccaaaaagcaagtgcaagaaaagttggtaaatcaccaagactatactcgtttaaacagcgaacttgccttgtgttggccatgttttacggcgtggcagaaaatgcttaaagaaagcaatcaagtggatttccctaccatgatcagtcgtgcgacagattatgtaaataaagggaaatttgtatccccatggcgcttcattatggtcgatgagtaccaagatatctctccagaccgtttagcactgattgaagcactgtgtgaatccacacagaaacaagcgggtgcgacgttgtttgcggttggtgatgactggcaggccatctatcagtttgctggtgcggacgtcgatcttatcactgggtttaaagagcgctttgctcactctaccgttcatcatctagatacgacttatcgtttcaacaatcagattggtgatgtggcaaacacttttgttcagcaaaacccatcgcaattgccgaaaacactaaatagccacaagcaacgtaagcagaagagtgtgcataccgcaccgagtaaccaagttgaaaagatcttggatcaattgaatcaacaagccaagcaaaccaagtcagtcttattgttaggacgtaatcattatcataagcccgacttgtatgacgattggttgcgacgttttcctaatctcgatattcgttttatgacttgccatgcgagtaaagggcgagaggctgattttgtcattattctttctgtggatgaggggcaattccctgcgaagaagaagcaaattcacattgatggcgcattgaccgagtctaaagacaaattccctcacgcagaagagcgcaggctgttttacgtggcgattacgcgtgcgaaagagaaagtttggattacgcacactggcgctgggtccgcatttgttcaagagctcgtcaatggtgattatccgatcatcacttcgcgttga

SEQ ID NO: 36648 - protein, 689 aa, Vibrio sp. Ex25
MQLTATSKAQFFIQNEYHHVEIKENSVLLSSIGSEEHIPFTIWNGKVSVKRGLLWSSLQFFAHEHEGKQQSWLVQGLPWPQCRKFALEAVRQYQEWHNTQCRKLAEYLPKWEEELYKLKHLPAYLSHSQVVSWVESLNQELSEMKTTLEEAKMRMPNRMAEIEPWLIDTSATLGERNRDWLEEERPNWEVLFNRIESSPLNLSQQYAVLLNDDHNLVLAGAGSGKTSVLTARVAYLLQSHQAQAEELLMLAFGRDAATEMKERLVDKVGMAADGVRVNTFHQLGLYILNQVEQQPVEISPLALDDNQRTAWCVDWLKKHWMTPTNFKRWQKHLDKWPIAYLKGDDELGSHSENPKLIAWLDSQLSHLAAVGLTKKQVQEKLVNHQDYTRLNSELALCWPCFTAWQKMLKESNQVDFPTMISRATDYVNKGKFVSPWRFIMVDEYQDISPDRLALIEALCESTQKQAGATLFAVGDDWQAIYQFAGADVDLITGFKERFAHSTVHHLDTTYRFNNQIGDVANTFVQQNPSQLPKTLNSHKQRKQKSVHTAPSNQVEKILDQLNQQAKQTKSVLLLGRNHYHKPDLYDDWLRRFPNLDIRFMTCHASKGREADFVIILSVDEGQFPAKKKQIHIDGALTESKDKFPHAEERRLFYVAITRAKEKVWITHTGAGSAFVQELVNGDYPIITSR

SEQ ID NO: 36649 - DNA, 2148 bp, Escherichia coli B
  CDS (1)..(2148): transl_table=11
atgggcggcaattgtaacgtttttttgggctggagcacgttttctctgacggttacactgataagaaataatttcgtgtggatctacagagtcatggaactgaaagcgacaacgcttggaaaacgtctggcacagcacccttacgatcgggcggtgatcctcaatgccgggattaaagtctccggcgatcgccacgaataccttattcctttcaatcaattactggcgattcactgtaagcgcggtctggtatggggcgagctggaatttgtactgccggacgaaaaagtggtgcgtctgcacggcaccgaatggggcgagacgcagcgtttttaccatcatcttgatgctcactggcggcggtggagtggcgagatgagcgaaattgcgtctggtgttttacgccagcaactggatttgattgccacgcgcactggagaaaataaatggctgacgcgtgagcaaacctctggcgttcagcaacaaatccgccaggctttgtcggcgttgccgttgccggttaaccgactggaagaattcgataactgccgtgaggcgtggcgtaaatgtcaggcctggttgaaagatattgaaagcgctcggttgcagcataaccaggcgtataccgaagccatgcttaccgagtatgcggattttttccgccaggtcgagtcttcaccgctgaatccggcgcaggcccgggcagtcgttaatggcgagcattctctgttagtgctggcaggtgcaggaagcggaaaaacgtcggtgctggtggcccgtgcaggctggttgctggcgcgtggtgaagcgtcccctgagcaaattttattgctggcgtttggtcgcaaagccgctgaagagatggacgagcggattcgcgaacggctacataccgaagacattaccgcacgcacgtttcatgcgctggcgctgcatattattcagcagggcagcaaaaaagttccgatagtcagcaaactggaaaatgataccgctgcccgtcatgaactctttattgctgagtggcgcaagcaatgcagcgaaaagaaagcgcaggcgaagggctggcggcaatggctgacggaagaaatgcagtggtcagtgccagaaggtaacttctgggatgatgaaaaattacagcgtcgccttgcctctcgcctcgatcgctgggtaagtctgatgcggatgcacggtggtgcacaggcagaaatgattgccagtgcacccgaagagattcgcgatctgttcagtaaacgtatcaagttgatggccccgttattaaaagcctggaaaggtgcgctgaaggcacaaaacgctgtcgatttttcgggccttattcatcaggcgattgtgattctggagaaaggtcgctttatcagcccgtggaagcatattctggttgatgaatttcaggatatctcgccgcagcgggcagcgttgttagcggcattacgcaagcaaaacagtcagacgacgttgttcgctgttggtgatgactggcaggcgatttaccgattcagcggtgcgcaaatgtcgctcaccaccgctttccatgaaaactttggtgaaggcgaacgctgtgatttagacacgacttaccgttttaacagtcgtatcggtgaggtggcaaaccggtttattcagcagaacccaggccagctgaaaaagccgctaaacagcttaaccaatggagacaaaaaagccgtcacgttattggatgagagtcaacttgacgctttgctggataagctctctggttatgccaaaccggaagagcgcattctgatcctggcgcgttaccatcacatgaggcctgccagcctggaaaaagcggcaacacgctggccgaagttgcaaatcgactttatgaccattcatgccagcaaagggcaacaggcggattacgtcatcatcgttggcttgcaggagggaagtgatggttttccggctgcggcgcgggagtcgattatggaagaggcgctactgccaccggttgaggatttcccggacgctgaagaacggcggttaatgtacgtggcgctgacccgggcacgccatcgggtatgggcactgtttaacaaagagaatccctctctctttgtggaaatactgaaaaatctggatgtgccggtggcgagaaaaccgtaa

SEQ ID NO: 36650 - protein, 715 aa, Escherichia coli B
MGGNCNVFLGWSTFSLTVTLIRNNFVWIYRVMELKATTLGKRLAQHPYDRAVILNAGIKVSGDRHEYLIPFNQLLAIHCKRGLVWGELEFVLPDEKVVRLHGTEWGETQRFYHHLDAHWRRWSGEMSEIASGVLRQQLDLIATRTGENKWLTREQTSGVQQQIRQALSALPLPVNRLEEFDNCREAWRKCQAWLKDIESARLQHNQAYTEAMLTEYADFFRQVESSPLNPAQARAVVNGEHSLLVLAGAGSGKTSVLVARAGWLLARGEASPEQILLLAFGRKAAEEMDERIRERLHTEDITARTFHALALHIIQQGSKKVPIVSKLENDTAARHELFIAEWRKQCSEKKAQAKGWRQWLTEEMQWSVPEGNFWDDEKLQRRLASRLDRWVSLMRMHGGAQAEMIASAPEEIRDLFSKRIKLMAPLLKAWKGALKAQNAVDFSGLIHQAIVILEKGRFISPWKHILVDEFQDISPQRAALLAALRKQNSQTTLFAVGDDWQAIYRFSGAQMSLTTAFHENFGEGERCDLDTTYRFNSRIGEVANRFIQQNPGQLKKPLNSLTNGDKKAVTLLDESQLDALLDKLSGYAKPEERILILARYHHMRPASLEKAATRWPKLQIDFMTIHASKGQQADYVIIVGLQEGSDGFPAAARESIMEEALLPPVEDFPDAEERRLMYVALTRARHRVWALFNKENPSLFVEILKNLDVPVARKP

SEQ ID NO: 36651 - DNA, 3372 bp, Oryza sativa subsp
  CDS (1)..(3372)
atggaacttaaagcgacatcgctggggaaacacctggctcagcacccttataaccgcgtgcggttgctgcacgccggcgttgaggtgagcggggaaaaacatgaatacctgatccccttcaatcaactgattcaggtcaggtgcaagcgtggcatcgtctggggcgagctggaatttgaattaccggacgaaaaagtagtgcggctgcacggcaccgaatggcaggaaacgcagcgtttttatcactttcttcagcaggcgtggcagcagtggagcgccgaaatgagcgacgtcagcgccggcgtgttgcaacagcaggtggcgcagattaagcgcattgagcaacaagataaatggttcaaaaagtctgagctgggcaagttgcagcagcaaattcgcgaggctttctccgcgctgccgatgccggtggcgcgcctggaggaattcgataactgccgggctgattatcatctgtgtttacaatggttgcagcagggggagcgcagcatcgagcaacgcaaccggcagtggaccgagcgcatgctggagcaacaccatgatttcttccagaccgtcgagagttcgccgctcaacgacgcccagagccgggcagtggtcaatggcgaggattccgtgctggtgttggccggcgccggcagcggcaaaacgtcggtgctggtggcgcgcgccggctggctgctgcgtcgtcaggaggctgagccgggtcaaatcttgctgttggcgttcggccgtcaggccgccggcgagatgaacgaccgcatcaaagaacgtttgggggatgtcggcattcaggccaagaccttccatgccttggcgctgcaaatcattcaacaaggcagccgcaaagcgccggccatcagccggttggaaaccgatgccaaagcgcgcaaagagctgctgatcacccattggcgccaacagtgcgcggagaagaaagcgcaggccaaggggtggcgtcaatggttgaccgaagagctggaatgggaagtgccggaaggcgacttctggcaggataagcgcctggcggatcgcctggcaagccggttggaacgctggttggggctgatgcgcatgcatggcggcagccaggcggaaatgatcgagcaggcggatgaagaaatccgcgatctgttttcaaaacgcatcaggctgatggcgccgctgctgaaagcctggaaaagcgccttgaaagaggaaggggcggtggacttctccggccttatccatcaggcggtcaacattctcgacaaggggcgcttcgtcagcccgtggaaacatattctggtcgacgagtttcaggatatctcaccgcagcgtgcgctcttgctggcggcattgcgccgacagaacaagcagacctgcctgtttgctgtaggggatgactggcaggcgatttatcgcttcagcggcgcagaactgacgttaaccacggccttcgccacgaacttcggcgaaggcgcgcagtgcgcactggataccacctatcgtttcaatgaacgtatcggcgaggtggccaaccggttcgtgcagcagaacccgcaccagctgaaaaaaccgctcaatagcctgagcaagggcaataaaaagtcggtgacgatcctgccgcacgagcagttggagccgctactggacaagctgagcggctacgccaagccggatgagcgcatcctggtgctggcgcgttaccaccatctgaaaccggaagcgctggcgaaagcggccacccgctggccaaagctggatctggagtttatgaccatccacgccagcaaggggcagcaggcggaatacgtcatcatcgccggtttgcatgaggcgcgtgacggcttccccgccgtggcgcgcgagtcggtgttggaagaggtgttactgccgcagccggaggactttccggatgctgaagagcgccgtctgctgtatgtcgcgttgactcgcgccaaacatcaggtatggctgttgcaggatcgtgaacgtccttcggtgttcgtcgaccacctgcgtgagcttggcgttccggtgcagaaaaaacccggtcgaacggttggtcgccaccggaatattccagacggtcgccagccgcagcagcgccttcacgtccggatcgtgcggaaccgcgttcagcggatcccagaagaagatcagcatgtctatcttgccttccgcaatcagtgcgccgacttgctgatcgcctcccattgggccgctcagcatgctggtgacgggaatgccgctggcacgctggatcaggttaccggtggtgccggtggcgtacaactggtgctgcgccagaatggtcttgtggctttcaacccattccagcagggcctgtttgcggtgatcgtgaaaaccatcgcgctggtgggcgccagcgataacccgtcgcggcccagctatggggtgatggcttatctgttgtcgcagggatatcaggtgatcccagtgagcccaaaactggcggggcagacgctgttggggcagccggtttatgccacgctggccgccatcccgcagccggtcgatatggtcgacgtttttcgcaattcggaggcagcctacggcgtggcgcaagaggcgatagcgatcggcgccaaggcgctgtggttgcagatcggcgtgattaatgaccaggcggcagtgctggcgcaacaggctgggctgcagttcatccagcgatggttgctcgggatgcgcttcctggggctcgccatccagctgcgcttccgccagataggtatgcaccggttggccttcctcgtcttccatcaccacgtggtaccaaggagcggaacgcagttcatcgttcgccgctatctcgtcagctttgggttgttccaaagagtattcagggtcgatatcgataacgacgcccaaataccccagcagtttatgcctaacctgttgtccgataccgaatttgctggcaatcatgatgacctcctgagaaacaatgccttgctcatatatgggggcaaggcagcgcatttcaagttacatcacccgacaagcgaagcctttcagatacagcccctcagggtacgtggcgatcaccgggtgatcggcagcctggcggaactgttctataaattgtacatcacgtccggcatctacagcggcgtcggccaaaattttctggaacagatcggtcggcatcagcccggagcaagagaagctgagcagaatgccgcccgggttcagcagctgcagcgccagcatattaatgtcttcgtagccacgacaggcgctggccagctggtttttgttctcgacgaacttcggcggatccatgatgatcagatcgaatttctcgccctgggcgcggtcccatatgaaattcgcacaaaattaacttga

SEQ ID NO: 36652 - protein, 1123 aa, Oryza sativa subsp
MELKATSLGKHLAQHPYNRVRLLHAGVEVSGEKHEYLIPFNQLIQVRCKRGIVWGELEFELPDEKVVRLHGTEWQETQRFYHFLQQAWQQWSAEMSDVSAGVLQQQVAQIKRIEQQDKWFKKSELGKLQQQIREAFSALPMPVARLEEFDNCRADYHLCLQWLQQGERSIEQRNRQWTERMLEQHHDFFQTVESSPLNDAQSRAVVNGEDSVLVLAGAGSGKTSVLVARAGWLLRRQEAEPGQILLLAFGRQAAGEMNDRIKERLGDVGIQAKTFHALALQIIQQGSRKAPAISRLETDAKARKELLITHWRQQCAEKKAQAKGWRQWLTEELEWEVPEGDFWQDKRLADRLASRLERWLGLMRMHGGSQAEMIEQADEEIRDLFSKRIRLMAPLLKAWKSALKEEGAVDFSGLIHQAVNILDKGRFVSPWKHILVDEFQDISPQRALLLAALRRQNKQTCLFAVGDDWQAIYRFSGAELTLTTAFATNFGEGAQCALDTTYRFNERIGEVANRFVQQNPHQLKKPLNSLSKGNKKSVTILPHEQLEPLLDKLSGYAKPDERILVLARYHHLKPEALAKAATRWPKLDLEFMTIHASKGQQAEYVIIAGLHEARDGFPAVARESVLEEVLLPQPEDFPDAEERRLLYVALTRAKHQVWLLQDRERPSVFVDHLRELGVPVQKKPGRTVGRHRNIPDGRQPQQRLHVRIVRNRVQRIPEEDQHVYLAFRNQCADLLIASHWAAQHAGDGNAAGTLDQVTGGAGGVQLVLRQNGLVAFNPFQQGLFAVIVKTIALVGASDNPSRPSYGVMAYLLSQGYQVIPVSPKLAGQTLLGQPVYATLAAIPQPVDMVDVFRNSEAAYGVAQEAIAIGAKALWLQIGVINDQAAVLAQQAGLQFIQRWLLGMRFLGLAIQLRFRQIGMHRLAFLVFHHHVVPRSGTQFIVRRYLVSFGLFQRVFRVDIDNDAQIPQQFMPNLLSDTEFAGNHDDLLRNNALLIYGGKAAHFKLHHPTSEAFQIQPLRVRGDHRVIGSLAELFYKLYITSGIYSGVGQNFLEQIGRHQPGAREAEQNAARVQQLQRQHINVFVATTGAGQLVFVLDELRRIHDDQIEFLALGAVPYEIRTKLT

SEQ ID NO: 36653 - DNA, 22 bp, Artificial sequence
  primer
atggaactgaaagcgacaacgc

SEQ ID NO: 36654 - DNA, 22 bp, Artificial sequence
  primer
ttacggttttctcgccaccggc

SEQ ID NO: 36655 - protein, 711 aa, Artificial sequence
  consensus sequence
  Variant (2)..(2): Xaa in position 2 is any amino acid
  Variant (4)..(4): Xaa in position 4 is any amino acid
  Variant (7)..(11): Xaa in position 7 to 11 is any amino acid
  Variant (13)..(13): Xaa in position 13 is any amino acid
  Variant (15)..(16): Xaa in position 15 to 16 is any amino acid
  Variant (18)..(37): Xaa in position 18 to 37 is any amino acid
  Variant (41)..(45): Xaa in position 41 to 45 is any amino acid
  Variant (46)..(46): Xaa in position 46 is any or no amino acid
  Variant (48)..(49): Xaa in position 48 to 49 is any amino acid
  Variant (53)..(54): Xaa in position 53 to 54 is any amino acid
  Variant (57)..(57): Xaa in position 57 is any amino acid
  Variant (61)..(66): Xaa in position 61 to 66 is any amino acid
  Variant (67)..(74): Xaa in position 67 to 74 is any or no amino acid
  Variant (77)..(78): Xaa in position 77 to 78 is any amino acid
  Variant (80)..(84): Xaa in position 80 to 84 is any amino acid
  Variant (86)..(88): Xaa in position 86 to 88 is any amino acid
  Variant (90)..(95): Xaa in position 90 to 95 is any amino acid
  Variant (97)..(107): Xaa in position 97 to 107 is any amino acid
  Variant (109)..(114): Xaa in position 109 to 114 is any amino acid
  Variant (116)..(131): Xaa in position 116 to 131 is any amino acid
  Variant (132)..(136): Xaa in position 132 to 136 is any or no amino acid
  Variant (138)..(153): Xaa in position 138 to 153 is any amino acid
  Variant (155)..(164): Xaa in position 155 to 164 is any amino acid
  Variant (165)..(166): Xaa in position 165 to 166 is any or no amino acid
  Variant (169)..(178): Xaa in position 169 to 178 is any amino acid
  Variant (180)..(186): Xaa in position 180 to 186 is any amino acid
  Variant (188)..(192): Xaa in position 188 to 192 is any amino acid
  Variant (195)..(197): Xaa in position 195 to 197 is any amino acid
  Variant (199)..(199): Xaa in position 199 is any amino acid
  Variant (204)..(205): Xaa in position 204 to 205 is any amino acid
  Variant (207)..(208): Xaa in position 207 to 208 is any amino acid
  Variant (211)..(217): Xaa in position 211 to 217 is any amino acid
  Variant (237)..(237): Xaa in position 237 is any amino acid
  Variant (240)..(243): Xaa in position 240 to 243 is any amino acid
  Variant (245)..(247): Xaa in position 245 to 247 is any amino acid
  Variant (251)..(251): Xaa in position 251 is any amino acid
  Variant (257)..(257): Xaa in position 257 is any amino acid
  Variant (260)..(260): Xaa in position 260 is any amino acid
  Variant (263)..(264): Xaa in position 263 to 264 is any amino acid
  Variant (266)..(269): Xaa in position 266 to 269 is any amino acid
  Variant (271)..(273): Xaa in position 271 to 273 is any amino acid
  Variant (274)..(276): Xaa in position 274 to 276 is any or no amino acid
  Variant (278)..(280): Xaa in position 278 to 280 is any amino acid
  Variant (284)..(284): Xaa in position 284 is any amino acid
  Variant (288)..(288): Xaa in position 288 is any amino acid
  Variant (291)..(291): Xaa in position 291 is any amino acid
  Variant (293)..(297): Xaa in position 293 to 297 is any amino acid
  Variant (299)..(300): Xaa in position 299 to 300 is any amino acid
  Variant (302)..(302): Xaa in position 302 is any amino acid
  Variant (304)..(305): Xaa in position 304 to 305 is any amino acid
  Variant (307)..(309): Xaa in position 307 to 309 is any amino acid
  Variant (311)..(320): Xaa in position 311 to 320 is any amino acid
  Variant (322)..(325): Xaa in position 322 to 325 is any amino acid
  Variant (326)..(328): Xaa in position 326 to 328 is any or no amino acid
  Variant (330)..(330): Xaa in position 330 is any amino acid
  Variant (332)..(337): Xaa in position 332 to 337 is any amino acid
  Variant (339)..(349): Xaa in position 339 to 349 is any amino acid
  Variant (351)..(353): Xaa in position 351 to 353 is any amino acid
  Variant (354)..(357): Xaa in position 354 to 357 is any or no amino acid
  Variant (359)..(361): Xaa in position 359 to 361 is any amino acid
  Variant (363)..(365): Xaa in position 363 to 365 is any amino acid
  Variant (367)..(371): Xaa in position 367 to 371 is any amino acid
  Variant (373)..(379): Xaa in position 373 to 379 is any amino acid
  Variant (381)..(397): Xaa in position 381 to 397 is any amino acid
  Variant (398)..(404): Xaa in position 398 to 404 is any or no amino acid
  Variant (406)..(407): Xaa in position 406 to 407 is any amino acid
  Variant (410)..(411): Xaa in position 410 to 411 is any amino acid
  Variant (414)..(416): Xaa in position 414 to 416 is any amino acid
  Variant (419)..(421): Xaa in position 419 to 421 is any amino acid
  Variant (426)..(428): Xaa in position 426 to 428 is any amino acid
  Variant (430)..(430): Xaa in position 430 is any amino acid
  Variant (433)..(437): Xaa in position 433 to 437 is any amino acid
  Variant (440)..(440): Xaa in position 440 is any amino acid
  Variant (442)..(442): Xaa in position 442 is any amino acid
  Variant (446)..(446): Xaa in position 446 is any amino acid
  Variant (459)..(459): Xaa in position 459 is any amino acid
  Variant (462)..(462): Xaa in position 462 is any amino acid
  Variant (465)..(465): Xaa in position 465 is any amino acid
  Variant (469)..(475): Xaa in position 469 to 475 is any amino acid
  Variant (476)..(479): Xaa in position 476 to 479 is any or no amino acid
  Variant (497)..(499): Xaa in position 497 to 499 is any amino acid
  Variant (503)..(503): Xaa in position 503 is any amino acid
  Variant (505)..(507): Xaa in position 505 to 507 is any amino acid
  Variant (510)..(515): Xaa in position 510 to 515 is any amino acid
  Variant (524)..(525): Xaa in position 524 to 525 is any amino acid
  Variant (528)..(529): Xaa in position 528 to 529 is any amino acid
  Variant (532)..(532): Xaa in position 532 is any amino acid
  Variant (534)..(534): Xaa in position 534 is any amino acid
  Variant (539)..(539): Xaa in position 539 is any amino acid
  Variant (544)..(544): Xaa in position 544 is any amino acid
  Variant (548)..(552): Xaa in position 548 to 552 is any amino acid
  Variant (555)..(555): Xaa in position 555 is any amino acid
  Variant (557)..(558): Xaa in position 557 to 558 is any amino acid
  Variant (560)..(562): Xaa in position 560 to 562 is any amino acid
  Variant (563)..(569): Xaa in position 563 to 569 is any or no amino acid
  Variant (571)..(574): Xaa in position 571 to 574 is any amino acid
  Variant (577)..(577): Xaa in position 577 is any amino acid
  Variant (580)..(582): Xaa in position 580 to 582 is any amino acid
  Variant (584)..(588): Xaa in position 584 to 588 is any amino acid
  Variant (589)..(589): Xaa in position 589 is any or no amino acid
  Variant (591)..(591): Xaa in position 591 is any amino acid
  Variant (595)..(595): Xaa in position 595 is any amino acid
  Variant (597)..(599): Xaa in position 597 to 599 is any amino acid
  Variant (601)..(608): Xaa in position 601 to 608 is any amino acid
  Variant (609)..(610): Xaa in position 609 to 610 is any or no amino acid
  Variant (614)..(614): Xaa in position 614 is any amino acid
  Variant (616)..(616): Xaa in position 616 is any amino acid
  Variant (618)..(618): Xaa in position 618 is any amino acid
  Variant (622)..(622): Xaa in position 622 is any amino acid
  Variant (628)..(629): Xaa in position 628 to 629 is any amino acid
  Variant (636)..(636): Xaa in position 636 is any amino acid
  Variant (638)..(639): Xaa in position 638 to 639 is any amino acid
  Variant (642)..(642): Xaa in position 642 is any amino acid
  Variant (643)..(643): Xaa in position 643 is any or no amino acid
  Variant (648)..(649): Xaa in position 648 to 649 is any amino acid
  Variant (652)..(657): Xaa in position 652 to 657 is any amino acid
  Variant (659)..(659): Xaa in position 659 is any amino acid
  Variant (661)..(662): Xaa in position 661 to 662 is any amino acid
  Variant (674)..(674): Xaa in position 674 is any amino acid
  Variant (678)..(678): Xaa in position 678 is any amino acid
  Variant (682)..(684): Xaa in position 682 to 684 is any amino acid
  Variant (687)..(693): Xaa in position 687 to 693 is any amino acid
  Variant (694)..(694): Xaa in position 694 is any or no amino acid
  Variant (696)..(696): Xaa in position 696 is any amino acid
  Variant (699)..(700): Xaa in position 699 to 700 is any amino acid
  Variant (702)..(706): Xaa in position 702 to 706 is any amino acid
  Variant (708)..(710): Xaa in position 708 to 710 is any amino acid
MXLXATXXXXXLXQXXYXXXXXXXXXXXXXXXXXXXXIPFXXXXXXIXXKRGXXWGXLEFXXXXXXXXXXXXXXHGXXWXXXXXFXXXLXXXXXXWXXXXXXXXXXXLXXXXXXIXXXXXXXXXXXXXXXXXXXXXIXXXXXXXXXXXXXXXXFXXXXXXXXXXXXWLXXXXXXXXXXNXXXXXXXLXXXXXFFXXXEXSPLNXXQXXAVXXXXXXXLVLAGAGSGKTSVLVARAGXLLXXXXAXXXQILXLAFGRXAAXEMXXRXXXXLXXXXXXIXXXTFHXLALXIIXQXXXXXPXXSXLXXDXXXRXXXXXXXXXXQXXXXXXXKXQXXXXXXWXXXXXXXXXXXGXXXXXXXLXXXLXXXLXXXXXLXXXXXXXQXXXXXXXXXXXXXXXXXXXXXXXXLXXPLXXAWXXXLKXXXAVDFXXXIXQAXXXXXKGXFXSPWXHILVDEFQDISPXRAXLLXALRXXXXXXXXXXXLFAVGDDWQAIYRFSGAXXXLTTXFXXXFGXXXXXXLDTTYRFNXXIGXXANXFXQQNPXQLKKXLNSXXXXXKKXVXXLXXXXXXXXXXQXXXXLDXLSXXXKXXXXXXLXLARXHXXXPXXXXXXXXXXRWPXLXIXFMTXHASKGXXADYVIIXGXXEGXXGFPAXXREXXXXXXLXPXXEDFPDAEERRLXYVAXTRAXXXVWXXXXXXXXSXFVXXLXXXXXPXXXK

SEQ ID NO: 36656 - protein, 59 aa, Artificial sequence
  protein pattern
  Variant (15)..(15): Xaa in position 15 is Ala or Ser
  Variant (18)..(18): Xaa in position 18 is Asp, Glu or Gln
  Variant (19)..(20): Xaa in position 19 to 20 is any amino acid
  Variant (23)..(23): Xaa in position 23 is Ser or Thr
  Variant (24)..(24): Xaa in position 24 is Ala or Asp
  Variant (26)..(26): Xaa in position 26 is any amino acid
  Variant (27)..(27): Xaa in position 27 is Glu, Gly, Asn, Gln or Thr
  Variant (28)..(28): Xaa in position 28 is any amino acid
  Variant (31)..(31): Xaa in position 31 is any amino acid
  Variant (32)..(32): Xaa in position 32 is Gly or Ser
  Variant (33)..(34): Xaa in position 33 to 34 is any amino acid
  Variant (35)..(35): Xaa in position 35 is Cys or Thr
  Variant (36)..(36): Xaa in position 36 is any amino acid
  Variant (38)..(38): Xaa in position 38 is Asp or Ser
  Variant (39)..(39): Xaa in position 39 is any amino acid
  Variant (40)..(40): Xaa in position 40 is Ser or Thr
  Variant (43)..(43): Xaa in position 43 is Phe or Leu
  Variant (45)..(45): Xaa in position 45 is Asp, Glu or Ser
  Variant (46)..(46): Xaa in position 46 is any amino acid
  Variant (48)..(48): Xaa in position 48 is Gly or Ser
  Variant (49)..(49): Xaa in position 49 is Asp, Glu or Lys
  Variant (50)..(50): Xaa in position 50 is Ile or Val
  Variant (51)..(51): Xaa in position 51 is Ala or Thr
  Variant (53)..(53): Xaa in position 53 is any amino acid
  Variant (55)..(55): Xaa in position 55 is Ile or Val
LFAVGDDWQAIYRFXGAXXXLTXXFXXXFGXXXXXXLXXXYRXNXXIXXXXNXFXQQNP

SEQ ID NO: 36657 - protein, 57 aa, Artificial sequence
  protein pattern
  Variant (2)..(4): Xaa in position 2 to 4 is any or no amino acid
  Variant (6)..(6): Xaa in position 6 is any amino acid
  Variant (7)..(7): Xaa in position 7 is Phe or Leu
  Variant (8)..(8): Xaa in position 8 is any amino acid
  Variant (11)..(13): Xaa in position 11 to 13 is any amino acid
  Variant (16)..(16): Xaa in position 16 is Ala, Asp or Glu
  Variant (17)..(17): Xaa in position 17 is Glu, Gln or Ser
  Variant (18)..(18): Xaa in position 18 is Gly or Asn
  Variant (19)..(19): Xaa in position 19 is Ala or Gln
  Variant (23)..(23): Xaa in position 23 is Pro or Ser
  Variant (24)..(24): Xaa in position 24 is Gly or Thr
  Variant (25)..(25): Xaa in position 25 is Leu or Met
  Variant (27)..(27): Xaa in position 27 is any amino acid
  Variant (28)..(28): Xaa in position 28 is Gln or Arg
  Variant (30)..(30): Xaa in position 30 is any amino acid
  Variant (31)..(31): Xaa in position 31 is Asp, Asn or Val
  Variant (32)..(32): Xaa in position 32 is any amino acid
  Variant (33)..(33): Xaa in position 33 is Leu or Val
  Variant (34)..(34): Xaa in position 34 is Asp, Glu or Asn
  Variant (37)..(37): Xaa in position 37 is Lys or Arg
  Variant (39)..(39): Xaa in position 39 is Ile or Val
  Variant (43)..(43): Xaa in position 43 is Lys or Arg
  Variant (44)..(44): Xaa in position 44 is Phe or His
  Variant (45)..(45): Xaa in position 45 is Ile or Val
  Variant (46)..(46): Xaa in position 46 is Leu or Met
  Variant (50)..(50): Xaa in position 50 is Phe or Tyr
  Variant (56)..(56): Xaa in position 56 is Asp or Gln
AXXXPXXXAWXXXLKXXXXVDFXXXIXXAXXXXXKGXFXSPWXXXXVDEXQDISPXR

SEQ ID NO: 36658 - protein, 62 aa, Artificial sequence
  protein pattern
  Variant (2)..(2): Xaa in position 2 is any amino acid
  Variant (3)..(3): Xaa in position 3 is Ala or Ser
  Variant (5)..(6): Xaa in position 5 to 6 is any or no amino acid
  Variant (8)..(9): Xaa in position 8 to 9 is any or no amino acid
  Variant (11)..(11): Xaa in position 11 is Ile, Leu or Val
  Variant (12)..(12): Xaa in position 12 is any amino acid
  Variant (13)..(13): Xaa in position 13 is Gly or Asn
  Variant (14)..(14): Xaa in position 14 is Asp or Glu
  Variant (15)..(17): Xaa in position 15 to 17 is any amino acid
  Variant (32)..(32): Xaa in position 32 is Thr or Val
  Variant (35)..(35): Xaa in position 35 is Ala or Val
  Variant (36)..(36): Xaa in position 36 is Ala or Gly
  Variant (37)..(37): Xaa in position 37 is Trp or Tyr
  Variant (40)..(42): Xaa in position 40 to 42 is any amino acid
  Variant (43)..(43): Xaa in position 43 is Glu or Gln
  Variant (45)..(45): Xaa in position 45 is any amino acid
  Variant (46)..(46): Xaa in position 46 is Ala or Pro
  Variant (47)..(47): Xaa in position 47 is Glu or Gly
  Variant (48)..(48): Xaa in position 48 is Glu or Gln
  Variant (49)..(49): Xaa in position 49 is Ile or Leu
  Variant (51)..(51): Xaa in position 51 is Leu or Met
  Variant (55)..(55): Xaa in position 55 is Gly or Ser
  Variant (56)..(56): Xaa in position 56 is His or Arg
  Variant (57)..(57): Xaa in position 57 is any amino acid
  Variant (59)..(59): Xaa in position 59 is Ala or Val
  Variant (60)..(60): Xaa in position 60 is any amino acid
NXXQXXAXXVXXXXXXXLVLAGAGSGKTSVLXARXXXLLXXXXAXXXXXLXLAFXXXAXXEM

SEQ ID NO: 36659 - protein, 36 aa, Artificial sequence
  protein pattern
  Variant (2)..(2): Xaa in position 2 is any or no amino acid
  Variant (4)..(4): Xaa in position 4 is any amino acid
  Variant (5)..(6): Xaa in position 5 to 6 is any or no amino acid
  Variant (9)..(9): Xaa in position 9 is any amino acid
  Variant (11)..(11): Xaa in position 11 is any amino acid
  Variant (12)..(12): Xaa in position 12 is Ile or Leu
  Variant (13)..(13): Xaa in position 13 is any amino acid
  Variant (14)..(14): Xaa in position 14 is Phe or Tyr
  Variant (17)..(17): Xaa in position 17 is any amino acid
  Variant (23)..(23): Xaa in position 23 is Gln or Arg
  Variant (24)..(24): Xaa in position 24 is Glu or Gln
  Variant (26)..(26): Xaa in position 26 is Asp or Glu
  Variant (29)..(29): Xaa in position 29 is Phe, Ile or Leu
  Variant (30)..(30): Xaa in position 30 is Ile or Leu
  Variant (31)..(31): Xaa in position 31 is Ala, Leu or Val
  Variant (32)..(32): Xaa in position 32 is Asp or Gly
  Variant (33)..(33): Xaa in position 33 is Leu, Met or Val
  Variant (34)..(35): Xaa in position 34 to 35 is any amino acid
  Variant (36)..(36): Xaa in position 36 is Ala or Gly
KXAXXXWPXLXXXXMTXHASKGXXAXYVXXXXXXXX

SEQ ID NO: 36660 - protein, 41 aa, Artificial sequence
  protein pattern
  Variant (3)..(3): Xaa in position 3 is Ser or Thr
  Variant (4)..(4): Xaa in position 4 is Gly, Ile or Val
  Variant (5)..(5): Xaa in position 5 is Ile, Leu or Met
  Variant (6)..(6): Xaa in position 6 is Ala or Glu
  Variant (7)..(7): Xaa in position 7 is any amino acid
  Variant (8)..(8): Xaa in position 8 is Ala or Val
  Variant (9)..(9): Xaa in position 9 is Leu or Met
  Variant (10)..(10): Xaa in position 10 is any amino acid
  Variant (12)..(12): Xaa in position 12 is any amino acid
  Variant (13)..(13): Xaa in position 13 is Pro, Thr or Val
  Variant (15)..(15): Xaa in position 15 is Asp or Asn
  Variant (16)..(16): Xaa in position 16 is Phe or Tyr
  Variant (17)..(17): Xaa in position 17 is Pro, Ser or Thr
  Variant (25)..(25): Xaa in position 25 is Phe, Leu or Met
  Variant (29)..(29): Xaa in position 29 is Ile or Leu
  Variant (33)..(33): Xaa in position 33 is Lys or Arg
  Variant (34)..(35): Xaa in position 34 to 35 is any amino acid
  Variant (38)..(38): Xaa in position 38 is Ala, Leu or Val
  Variant (39)..(40): Xaa in position 39 to 40 is any amino acid
  Variant (41)..(41): Xaa in position 41 is Asp, Gly or Asn
REXXXXXXXXPXXEXXXDAEERRLXYVAXTRAXXXVWXXXX

SEQ ID NO: 36661 - protein, 43 aa, Artificial sequence
  protein pattern
  Variant (2)..(2): Xaa in position 2 is Glu or Gln
  Variant (4)..(4): Xaa in position 4 is any amino acid
  Variant (5)..(5): Xaa in position 5 is Ala or Ser
  Variant (7)..(7): Xaa in position 7 is any amino acid
  Variant (8)..(9): Xaa in position 8 to 9 is any or no amino acid
  Variant (11)..(13): Xaa in position 11 to 13 is any amino acid
  Variant (14)..(15): Xaa in position 14 to 15 is any or no amino acid
  Variant (17)..(17): Xaa in position 17 is any amino acid
  Variant (18)..(18): Xaa in position 18 is Glu or Pro
  Variant (20)..(20): Xaa in position 20 is any amino acid
  Variant (21)..(21): Xaa in position 21 is His or Arg
  Variant (22)..(22): Xaa in position 22 is Ala or Val
  Variant (23)..(23): Xaa in position 23 is any amino acid
  Variant (24)..(24): Xaa in position 24 is Ile or Leu
  Variant (25)..(26): Xaa in position 25 to 26 is any amino acid
  Variant (27)..(27): Xaa in position 27 is Ala or Asn
  Variant (28)..(28): Xaa in position 28 is Gly or Ser
  Variant (29)..(29): Xaa in position 29 is Ile or Val
  Variant (30)..(30): Xaa in position 30 is any amino acid
  Variant (31)..(31): Xaa in position 31 is Leu or Val
  Variant (32)..(32): Xaa in position 32 is Cys or Ser
  Variant (33)..(33): Xaa in position 33 is Gly or Ser
  Variant (34)..(36): Xaa in position 34 to 36 is any amino acid
  Variant (37)..(37): Xaa in position 37 is Glu or Gln
  Variant (38)..(39): Xaa in position 38 to 39 is any amino acid
  Variant (43)..(43): Xaa in position 43 is Asn or Thr
MXLXXTXXXKXXXXXQXXYXXXXXXXXXXXXXXXXXXXXIPFX

SEQ ID NO: 36662 - protein, 35 aa, Artificial sequence
  protein pattern
  Variant (2)..(5): Xaa in position 2 to 5 is any amino acid
  Variant (8)..(8): Xaa in position 8 is Ala, Ser or Thr
  Variant (12)..(12): Xaa in position 12 is any amino acid
  Variant (15)..(15): Xaa in position 15 is Asn or Gln
  Variant (17)..(17): Xaa in position 17 is Ala, Gly or Val
  Variant (18)..(18): Xaa in position 18 is Gln or Ser
  Variant (19)..(21): Xaa in position 19 to 21 is any amino acid
  Variant (23)..(23): Xaa in position 23 is any amino acid
  Variant (24)..(24): Xaa in position 24 is Ile or Val
  Variant (26)..(26): Xaa in position 26 is any amino acid
  Variant (27)..(27): Xaa in position 27 is Phe or Leu
  Variant (28)..(28): Xaa in position 28 is Ala or Glu
  Variant (29)..(29): Xaa in position 29 is Asn, Ser or Thr
  Variant (31)..(31): Xaa in position 31 is Ala, Gly, Ser or Thr
  Variant (32)..(33): Xaa in position 32 to 33 is any amino acid
  Variant (35)..(35): Xaa in position 35 is His, Lys or Arg
IXXXXFHXLALXIIXQXXXXXPXXSXXXXDXXXRX

SEQ ID NO: 36663 - protein, 22 aa, Artificial sequence
  protein pattern
  Variant (3)..(3): Xaa in position 3 is any amino acid
  Variant (5)..(5): Xaa in position 5 is Pro or Thr
  Variant (9)..(13): Xaa in position 9 to 13 is any amino acid
  Variant (14)..(14): Xaa in position 14 is any or no amino acid
  Variant (16)..(16): Xaa in position 16 is any amino acid
  Variant (17)..(17): Xaa in position 17 is any or no amino acid
  Variant (19)..(20): Xaa in position 19 to 20 is any amino acid
  Variant (21)..(21): Xaa in position 21 is Ala or Leu
  Variant (22)..(22): Xaa in position 22 is Asp or Pro
QLXKXLNSXXXXXXKXXVXXXX

SEQ ID NO: 36664 - protein, 15 aa, Artificial sequence
  protein pattern
  Variant (3)..(3): Xaa in position 3 is any amino acid
  Variant (4)..(4): Xaa in position 4 is Glu or Pro
  Variant (6)..(6): Xaa in position 6 is Gly, Gln or Ser
  Variant (7)..(7): Xaa in position 7 is Glu or Gln
  Variant (8)..(8): Xaa in position 8 is Cys or Thr
  Variant (9)..(10): Xaa in position 9 to 10 is any amino acid
  Variant (12)..(13): Xaa in position 12 to 13 is any amino acid
  Variant (14)..(14): Xaa in position 14 is Phe, His or Tyr
HGXXWXXXXXFXXXL

SEQ ID NO: 36665 - protein, 19 aa, Artificial sequence
  protein pattern
  Variant (2)..(2): Xaa in position 2 is Asp, Glu, Pro or Gln
  Variant (3)..(3): Xaa in position 3 is Asp, Glu, Gly or Thr
  Variant (4)..(4): Xaa in position 4 is Glu or Lys
  Variant (5)..(5): Xaa in position 5 is Arg or Ser
  Variant (6)..(6): Xaa in position 6 is Ile or Val
  Variant (8)..(8): Xaa in position 8 is Ile, Leu or Val
  Variant (10)..(10): Xaa in position 10 is Ala or Gly
  Variant (12)..(13): Xaa in position 12 to 13 is any or no amino acid
  Variant (16)..(16): Xaa in position 16 is any amino acid
  Variant (17)..(18): Xaa in position 17 to 18 is any or no amino acid
KXXXXXLXLXRXXYHXXXP

SEQ ID NO: 36666 - protein, 11 aa, Artificial sequence
  protein pattern
  Variant (3)..(4): Xaa in position 3 to 4 is Ile, Leu or Val
  Variant (7)..(8): Xaa in position 7 to 8 is any or no amino acid
  Variant (11)..(11): Xaa in position 11 is Glu or Thr
RGXXWGXXELX

SEQ ID NO: 36667 - protein, 13 aa, Artificial sequence
  protein pattern
  Variant (2)..(2): Xaa in position 2 is Leu or Val
  Variant (3)..(3): Xaa in position 3 is Gly or Ser
  Variant (5)..(7): Xaa in position 5 to 7 is any or no amino acid
  Variant (9)..(9): Xaa in position 9 is any amino acid
  Variant (10)..(10): Xaa in position 10 is Leu or Met
  Variant (11)..(11): Xaa in position 11 is any amino acid
  Variant (12)..(12): Xaa in position 12 is Gly or Gln
  Variant (13)..(13): Xaa in position 13 is Asp or Gly
WXXLXXXMXXXXX

SEQ ID NO: 36668 - protein, 23 aa, Artificial sequence
  protein pattern
  Variant (2)..(2): Xaa in position 2 is any or no amino acid
  Variant (5)..(5): Xaa in position 5 is any amino acid
  Variant (6)..(6): Xaa in position 6 is Ile or Pro
  Variant (7)..(7): Xaa in position 7 is Leu or Val
  Variant (8)..(8): Xaa in position 8 is Ala, Glu, Asn, Gln or Ser
  Variant (10)..(10): Xaa in position 10 is Ile or Leu
  Variant (11)..(11): Xaa in position 11 is Ala, Glu or Gly
  Variant (12)..(12): Xaa in position 12 is any amino acid
  Variant (14)..(14): Xaa in position 14 is Ala, Asp, Glu or Ser
  Variant (15)..(17): Xaa in position 15 to 17 is any amino acid
  Variant (18)..(18): Xaa in position 18 is Ala, Asp, Glu or Gly
  Variant (19)..(22): Xaa in position 19 to 22 is any amino acid
  Variant (23)..(23): Xaa in position 23 is Cys or Ser
AXLPXXXXRXXXFXXXXXXXXXX

SEQ ID NO: 36669 - protein, 25 aa, Artificial sequence
  protein pattern
  Variant (2)..(2): Xaa in position 2 is any amino acid
  Variant (3)..(3): Xaa in position 3 is Ala, Gln or Thr
  Variant (4)..(4): Xaa in position 4 is Trp or Tyr
  Variant (5)..(9): Xaa in position 5 to 9 is any amino acid
  Variant (10)..(10): Xaa in position 10 is Ala, Glu or Thr
  Variant (11)..(13): Xaa in position 11 to 13 is any amino acid
  Variant (14)..(14): Xaa in position 14 is Asp, Pro or Ser
  Variant (15)..(15): Xaa in position 15 is Phe or Trp
  Variant (17)..(18): Xaa in position 17 to 18 is any amino acid
  Variant (19)..(19): Xaa in position 19 is Phe, Ile or Val
  Variant (21)..(21): Xaa in position 21 is any or no amino acid
  Variant (23)..(23): Xaa in position 23 is any amino acid
  Variant (24)..(24): Xaa in position 24 is any or no amino acid
NXXXXXXXXXXXXXXFXXXEXSXXL

SEQ ID NO: 36670 - DNA, 468 bp, Escherichia coli
  CDS (1)..(468): transl_table=11
atgtacattatggaactgacgactcgcactttacctgcgcggaaacatattgcgctggtggcacacgatcactgcaaacaaatgctgatgagctgggtggaacggcatcaaccgttactggaacaacacgtactgtatgcaacaggcactaccggtaacttaatttcccgcgcgaccggcatgaacgtcaacgcgatgttgagtggcccaatggggggtgaccagcaggttggcgcattgatctcagaagggaaaattgatgtattgattttcttctgggatccactaaatgccgtgccgcacgatcctgacgtgaaagccttgctgcgtctggcgacggtatggaacattccggtcgccaccaacgtggcaacggcagacttcataatccagtcgccgcatttcaacgacgcggtcgatattctgatccccgattatcagcgttatctcgcggaccgtctgaagtaa

SEQ ID NO: 36671 - protein, 155 aa, Escherichia coli
MYIMELTTRTLPARKHIALVAHDHCKQMLMSWVERHQPLLEQHVLYATGTTGNLISRATGMNVNAMLSGPMGGDQQVGALISEGKIDVLIFFWDPLNAVPHDPDVKALLRLATVWNIPVATNVATADFIIQSPHFNDAVDILIPDYQRYLADRLK

SEQ ID NO: 36672 - DNA, 501 bp, Thermotoga maritima MSB8
  CDS (1)..(501): transl_table=11
atgtctgacagaccaagaaggtacaagatatttatggacaaaaagaagaggatcgctctcatagcacatgacagaagaaagagagatcttcttgagtgggtgagcttcaatcttggaacgctctccaaacacgagctttacgctacaggtacaaccggcgctctccttcaggaaaaactcggtctcaaagtacaccgactgaaaagcggacccctcggtggagatcagcagatcggtgcaatgatcgccgaagggaagatagacgtgctcatattcttctgggatcctctggaacctcaggcacacgacgtggatgtgaaagcgctcatcaggatagccacagtgtacaacatccccgtcgccatcacaagatccacagcggacttcttgatctcctcaccgctcatgaacgatgtgtacgagaagattcagatagactacgaagaagaactggaaagaagaatcagaaaagtggtggaaggcgaggaggaagagacttag

SEQ ID NO: 36673 - protein, 166 aa, Thermotoga maritima MSB8
MSDRPRRYKIFMDKKKRIALIAHDRRKRDLLEWVSFNLGTLSKHELYATGTTGALLQEKLGLKVHRLKSGPLGGDQQIGAMIAEGKIDVLIFFWDPLEPQAHDVDVKALIRIATVYNIPVAITRSTADFLISSPLMNDVYEKIQIDYEEELERRIRKVVEGEEEET

SEQ ID NO: 36674 - DNA, 450 bp, Clostridium acetobutylicum ATCC 824
  CDS (1)..(450): transl_table=11
atggcacttataatgaatagtaaaaaaaagatagccttagttgcacatgacaatagaaaaaaagctttgattagctggtgtgaggcaaattcggaagttttaagtaatcacagcctttgtggtacaggcactactgcaaagcttataaaagaggcaacaggacttgaggtttttccatataaaagcggacctatggggggagatcaacaaataggagctgctatagtaaatgaagatatagattttatgatttttttctgggatccacttacagctcagccacatgatcctgatgtaaaggcacttcttaggatttctgtactttatgatattccaatagcaatgaatgaatctacagcagagtttttaattaagtcacctattatgaaggagcagcatgaaaggcacatcatagattattaccaaaaaattagaaaagacaatttttaa

SEQ ID NO: 36675 - protein, 149 aa, Clostridium acetobutylicum ATCC 824
MALIMNSKKKIALVAHDNRKKALISWCEANSEVLSNHSLCGTGTTAKLIKEATGLEVFPYKSGPMGGDQQIGAAIVNEDIDFMIFFWDPLTAQPHDPDVKALLRISVLYDIPIAMNESTAEFLIKSPIMKEQHERHIIDYYQKIRKDNF

SEQ ID NO: 36676 - DNA, 537 bp, Bacteroides thetaiotaomicron VPI-5482
  CDS (1)..(537): transl_table=11
atggaaacaattgttcgtagaattggacttgttgcacacgatgcaatgaaaaaagacatgatagagtgggttctctggaactcggaacgtctgataggacataaattctattgtacgggtacaaccggtacactaattaaaaaagcccttgaagaaaaacatcctgaaatcaaatgggatatcacaatcctgaaatctggtcctttaggaggtgaccagcaaattggttcgcggatcgtagaaggagaaatagactatctgttcttttttacagatccgatgacactacagccgcatgatacggatgtgaaagcattgaccagactggctggagttgaaaatattgttttctgctgtaaccgttcgactgcggaccacattattacgagtcccttattcactgacccaacttacgaacgtattcacccggattacaccaattacacgcagcgttttgaaaacaagggaatcatatctgaagcagtggagcaagtgaaaaagcggaggaataaaagtgagaataacatttctaaatga

SEQ ID NO: 36677 - protein, 178 aa, Bacteroides thetaiotaomicron VPI-5482
METIVRRIGLVAHDAMKKDMIEWVLWNSERLIGHKFYCTGTTGTLIKKALEEKHPEIKWDITILKSGPLGGDQQIGSRIVEGEIDYLFFFTDPMTLQPHDTDVKALTRLAGVENIVFCCNRSTADHIITSPLFTDPTYERIHPDYTNYTQRFENKGIISEAVEQVKKRRNKSENNISK

SEQ ID NO: 36678 - DNA, 525 bp, Bacteroides thetaiotaomicron VPI-5482
  CDS (1)..(525): transl_table=11
atggaaccaaaagtaaggagaggcatcgggctggtagcacatgatgccatgaaaaaagacctcatcgaatgggtgctgtggaactcggaactgttgatgggaaataaattctattgtacaggtactacaggtactctgattctggaagcactgaaggagaagcatcctgaagtggagtgggacttcacaattctgaaatccggtcctttgggaggtgaccagcagatgggatcgcgtattgtggacggtcagattgattatctattctttttcactgaccctatgactttgcagccacatgatacggatgttaaagcattaacccgactggccggtgttgagaacatcgttttctgttgtaaccgttctacggcggatcatatcatttccagccctctgtttatggatcccgattacgaacgtacccatccggactattccagttatacgaaacggttcgaaaacaaatccgtggtaacggaagctgtagaatcggtaaataaaagaaaaagaaagaagagatag

SEQ ID NO: 36679 - protein, 174 aa, Bacteroides thetaiotaomicron VPI-5482
MEPKVRRGIGLVAHDAMKKDLIEWVLWNSELLMGNKFYCTGTTGTLILEALKEKHPEVEWDFTILKSGPLGGDQQMGSRIVDGQIDYLFFFTDPMTLQPHDTDVKALTRLAGVENIVFCCNRSTADHIISSPLFMDPDYERTHPDYSSYTKRFENKSVVTEAVESVNKRKRKKR

SEQ ID NO: 36680 - DNA, 384 bp, Bdellovibrio bacteriovorus HD100
  CDS (1)..(384): transl_table=11
atgaaaaaacaaaagaaaaagacattggccttgattgctcacgacggaaagaaagctctgatggtttctttcgtgcgtgatcatctggagactttcaaaaacttcactttggtgggcaccggcaataccggccgcctgatccaggccgcgggattgaaagtcacacgcaggctttcgggaccattgggtggggacgcccagatcgctgccgaggttgcgactggcaagtgccaaggcgtgatctttttccgtgatccgctgggcatgcatccccatgacccggacatctcgatgctgatgcgaatctgtgacgttcataacgttcctttggcgaccaatccggcgacggctgaactgctgattacgggcctttcccacgactag

SEQ ID NO: 36681 - protein, 127 aa, Bdellovibrio bacteriovorus HD100
MKKQKKKTLALIAHDGKKALMVSFVRDHLETFKNFTLVGTGNTGRLIQAAGLKVTRRLSGPLGGDAQIAAEVATGKCQGVIFFRDPLGMHPHDPDISMLMRICDVHNVPLATNPATAELLITGLSHD

SEQ ID NO: 36682 - DNA, 387 bp, Thermus thermophilus HB27
  CDS (1)..(387): transl_table=11
atgcccatgaaggccctggccctcatcgcccacgacgccaagaaggacgagatggtggccttttgcctgcggcacaaggacgtcctggcccgctaccccctactcgccacggggaccacgggggcccgcatccaggaggccacgggcctcgccgtggagcgggtgctctccggtcccttgggcggggacctgcagatcggggcccgggtggccgagggaaaggtgttggcggtggtcttcctccaggaccccctgaccgccaagccccacgaaccggacgtccaggccctgatgcgggtctgcaacgtgcacggggtgcccctggccaccaacttggtggcggcggaggccctcatcgcctggatccgcaagggaaccccccaatag

SEQ ID NO: 36683 - protein, 128 aa, Thermus thermophilus HB27
MPMKALALIAHDAKKDEMVAFCLRHKDVLARYPLLATGTTGARIQEATGLAVERVLSGPLGGDLQIGARVAEGKVLAVVFLQDPLTAKPHEPDVQALMRVCNVHGVPLATNLVAAEALIAWIRKGTPQ

SEQ ID NO: 36684 - DNA, 414 bp, Bacillus licheniformis ATCC 14580
  CDS (1)..(414): transl_table=11
ttgaaaatcgccttaattgcccatgaccgaaaaaaacaggatatgattcagctgacgaccgcttataaagacattttaaaaaagcatgagctgtttgcgacaggaacgaccggtttaaaaatcactgaagcgacagggctgcccgtcgtgcgctttcaatcggggccgcttggcggtgaccagcagatcggcgctttgatcgcgaaaaatgacatcgatcttgtgatttttctgagagacccgctgacggcccagccgcacgaacctgacgtgtcagcgcttatccgcttgtctgacgtttatgccattccgctcgccaccaacatgggaactgcggaaatcttgatccgttctgtcgaggaaggcgcgtttgagttcagaaacattgtccacggcagggatcgcgatgcttga

SEQ ID NO: 36685 - protein, 137 aa, Bacillus licheniformis ATCC 14580
MKIALIAHDRKKQDMIQLTTAYKDILKKHELFATGTTGLKITEATGLPVVRFQSGPLGGDQQIGALIAKNDIDLVIFLRDPLTAQPHEPDVSALIRLSDVYAIPLATNMGTAEILIRSVEEGAFEFRNIVHGRDRDA

SEQ ID NO: 36686 - DNA, 507 bp, Mannheimia succiniciproducens MBEL55E
  CDS (1)..(507): transl_table=11
atgccattatcggctaaaaaaccgcgtatcttaatccaaggaggatatatggaaaccacatttcgtcatgttgccgcacaaaaacatattgctttggtcgcccatgatcattgcaaagaagatctgattaattggtgtcagaaaaatgtgcatcatctacaaaaccatcagctttatgcaacaggaactaccgggcatttaatcgaaaaagcgaccgaattaaaaatcaacagcttattaagcggaccgatgggtggcgatcagcaactgggcgcattaattgcggaaaataaaatcgacgtgatgattttcttttgggatccgatgaatgcggtgcctcatgacccggatgtgaaagccttattacgcattgccgcagtatggaacattccccatgctatgaatattgcaagcgccgatttattaattaattcgccattaataaaccgagaaatcgaactccgcattcccgattatcaaacttatctacaaaaacgcctgaaataa

SEQ ID NO: 36687 - protein, 168 aa, Mannheimia succiniciproducens MBEL55E
MPLSAKKPRILIQGGYMETTFRHVAAQKHIALVAHDHCKEDLINWCQKNVHHLQNHQLYATGTTGHLIEKATELKINSLLSGPMGGDQQLGALIAENKIDVMIFFWDPMNAVPHDPDVKALLRIAAVWNIPHAMNIASADLLINSPLINREIELRIPDYQTYLQKRLK

SEQ ID NO: 36688 - DNA, 390 bp, Silicibacter pomeroyi DSS-3
  CDS (1)..(390): transl_table=11
atgctgaaatctaagccaaaaaacatcgccctcatcgcacacgatctgaagaagcgatctttggccacctgggtattcaacaatcaaaccaagctgaagcgccacaacattctcgccacggctacgaccgggggcatcatacagaaacattgtccgcaattgcgtatccgggtgacaaaaagcggccctcttggcggggatcagcaaatcggagcgatgattgccgatgacggtatcgacctgctgatattcttcacggatccgctttccccacatccacatgacgtcgacgtgaaggcgttgagcagacttgccgtcgtctatgacgtgcccatggcctgcagcggagccacagcagacctgatcgcggcctctggctacctggattag

SEQ ID NO: 36689 - protein, 129 aa, Silicibacter pomeroyi DSS-3
MLKSKPKNIALIAHDLKKRSLATWVFNNQTKLKRHNILATATTGGIIQKHCPQLRIRVTKSGPLGGDQQIGAMIADDGIDLLIFFTDPLSPHPHDVDVKALSRLAVVYDVPMACSGATADLIAASGYLD

SEQ ID NO: 36690 - DNA, 435 bp, Dehalococcoides ethenogenes 195
  CDS (1)..(435): transl_table=11
atggaaagaataactttggctctggtagcccatgataacaagaagcaggaaatagtagacctggtaaagaagcacgaaaccgacttggcaggtcttaatctggtagccacccgcaccaccggtaagctcattcaggccagcactgatctgaatgtaaatttactccaaagcggccctctgggaggtgaccagcagattggtgccatggtagccagcggggtagtaacggctatcatattccttcgtgaccccctgaccgcccagccccatgaacctgacatttccgccctgatgcgcgtgtgtgacgtacataacgtacccttagctaccaacgtatctaccgctgaagctgttttgcaccttatattcgagcatccggaggaacttaaggagcacaggctgaagagccagcttttaaatagtttaaacagctga

SEQ ID NO: 36691 - protein, 144 aa, Dehalococcoides ethenogenes 195
MERITLALVAHDNKKQEIVDLVKKHETDLAGLNLVATRTTGKLIQASTDLNVNLLQSGPLGGDQQIGAMVASGVVTAIIFLRDPLTAQPHEPDISALMRVCDVHNVPLATNVSTAEAVLHLIFEHPEELKEHRLKSQLLNSLNS

SEQ ID NO: 36692 - DNA, 432 bp, Dehalococcoides ethenogenes 195
  CDS (1)..(432): transl_table=11
atggaagaacctaagattactctgggtcttattgcccacaataactgcaaaaaggacatggtacacctgattcaagcttatgcccacctgatgaaggggcatcaccttattgctactaaaagcaccggcgaacttatccggaaacataccgggctgccggttatactcaaggaaagcggccctgacggcggggaactgcagctgggagggtttgtggccagcggcataatcaaagccgtaatcttcctgcgtgacccgctgaaacgcaaaagccatgaaccggatgttaccgccctgatgcgggtatgcgatgcccataatatcccgctggctaccaaccgggctacggctgcctgtgtccttcatacagtacttttccaccccgacaaactggaggatatgccgcctaaagaaagcgacgacgacccttaa

SEQ ID NO: 36693 - protein, 143 aa, Dehalococcoides ethenogenes 195
MEEPKITLGLIAHNNCKKDMVHLIQAYAHLMKGHHLIATKSTGELIRKHTGLPVILKESGPDGGELQLGGFVASGIIKAVIFLRDPLKRKSHEPDVTALMRVCDAHNIPLATNRATAACVLHTVLFHPDKLEDMPPKESDDDP

SEQ ID NO: 36694 - DNA, 519 bp, Bacteroides fragilis NCTC 9343
  CDS (1)..(519): transl_table=11
atggaaaaactaattcgaagaatcgggctggtagcgcacgatgctatgaaaaaagacctgattgaatgggttctttggaactcggagttattgatgggacataagttttattgtacaggtaccaccggtacgctgatacaggaggcattgaaagagaaacatcccgatgtggagtgggattttactatcctgaaatccggtcctctgggcggcgaccagcagatgggatcgcgtattgtggatggagagatcgattatcttttcttctttaccgacccgatgactcttcagccgcacgatacggatgtgaaggcactgacccgtctggcaagtgtggaaaacatcgtcttttgttgcaaccgttccactgccgatcatattatttcaagtccgctcttccttgatccggactatgaacggacacatccggactactcgggctatacgaaacgtttcgagaataaaccggtggtgaccgaggcggtagaatcggtgaagaaaagaaagagaaagaaataa

SEQ ID NO: 36695 - protein, 172 aa, Bacteroides fragilis NCTC 9343
MEKLIRRIGLVAHDAMKKDLIEWVLWNSELLMGHKFYCTGTTGTLIQEALKEKHPDVEWDFTILKSGPLGGDQQMGSRIVDGEIDYLFFFTDPMTLQPHDTDVKALTRLASVENIVFCCNRSTADHIISSPLFLDPDYERTHPDYSGYTKRFENKPVVTEAVESVKKRKRKK

SEQ ID NO: 36696 - DNA, 465 bp, Pseudomonas fluorescens Pf-5
  CDS (1)..(465): transl_table=11
atgatcggtatcagtttcacccacaagaccatggccgcgcgcaagcgcatcgccctggtcgcccatgaccactgcaaggcgttcctgctggagtgggccgggcggcagaaggcgcgcctggccgagcacgagctggttgccaccggtaccaccggcctgttgctgagcaagcacttggggctgccggtggaaagcatgatcagcggccccctgggcggcgatcagcaactgggggcgcagattgccgagcaacgggtcgacctgctggtgttcttctgggaccccttcgaaccccagccccatgatccggacatcaaggccctgttgcgggtagcggcggtatggaacattccggtggcctgcaacgagtgcagcgccgactacctgctcagcagcccgctgatgaaccaggcccatgagcaccggattcccgactaccaggcctacctggccggccgaggataa

SEQ ID NO: 36697 - protein, 154 aa, Pseudomonas fluorescens Pf-5
MIGISFTHKTMAARKRIALVAHDHCKAFLLEWAGRQKARLAEHELVATGTTGLLLSKHLGLPVESMISGPLGGDQQLGAQIAEQRVDLLVFFWDPFEPQPHDPDIKALLRVAAVWNIPVACNECSADYLLSSPLMNQAHEHRIPDYQAYLAGRG

SEQ ID NO: 36698 - DNA, 393 bp, Ralstonia eutropha JMP134
  CDS (1)..(393): transl_table=11
ttgatgacccgcccacgtatcgccctgattgcacacgaccacaagaaagacgacatcgttgcctttgccacgcgtcaccgcgaattcctttcgcagtgcgaactgctcgcgaccggcaccaccggcggccggctgatcgatgaagtcaagctcgatgtgacccgcatgctgtcggggccgtggggcggcgacctgcagatcggcgcgcaactcgcggaagggcgcgtgcgtgccgtaatcttcctgcgcgatccgatgacgccgcagccgcacgaaccggacatcaatgcgctggtgcgcgcctgcgacgtgcacaacgtgccgtgcgcgaccaacgtggccacggccgacctgctgatcgccgagctgagccgcgtcgaagcgcagccctga

SEQ ID NO: 36699 - protein, 130 aa, Ralstonia eutropha JMP134
MMTRPRIALIAHDHKKDDIVAFATRHREFLSQCELLATGTTGGRLIDEVKLDVTRMLSGPWGGDLQIGAQLAEGRVRAVIFLRDPMTPQPHEPDINALVRACDVHNVPCATNVATADLLIAELSRVEAQP

SEQ ID NO: 36700 - DNA, 435 bp, Dehalococcoides sp. CBDB1
  CDS (1)..(435): transl_table=11
atggaaagaataactttagctctggtagcccatgataacaagaagcaggaaatggttgaactggtgaagaagcatgaaacagacttggcaagccttaatctggtagccacccgcaccaccggtaagctgattcaggcaagcacaagtctgaatgttaccctgttgcaaagcggccctctgggaggtgaccagcagattggtgccatggtagccagcggggtagtaaccgctatcatatttcttcgtgaccccctgaccgcccagccccatgaacctgatatctccgccctgatgcgcgtgtgtgacgtacataatgtacccttagctaccaacgtatctaccgctgaggctgtattgcaccttatattcgagcatccggaggaacttaaggagcataggctgaagagccagcttttaaatagtctgaatagctaa

SEQ ID NO: 36701 - protein, 144 aa, Dehalococcoides sp. CBDB1
MERITLALVAHDNKKQEMVELVKKHETDLASLNLVATRTTGKLIQASTSLNVTLLQSGPLGGDQQIGAMVASGVVTAIIFLRDPLTAQPHEPDISALMRVCDVHNVPLATNVSTAEAVLHLIFEHPEELKEHRLKSQLLNSLNS

SEQ ID NO: 36702 - DNA, 366 bp, Carboxydothermus hydrogenoformans Z-2901
  CDS (1)..(366): transl_table=11
ttgatgaaagttgctttaatagcccacgacgataaaaaggatgatcttcttgcttttgtaaaaactcaccgggagttttttgcccgccatgaactttttgccaccggaacgacagggaaaattatttcagaaaatacggggctgacggtccaccgttttttgtccgggccccttgggggagatcaacaaattggagctatggtagcggcgggagagattaaactggtaattttctttcgcgatcccttaacggctcaacctcatgagccggatataacagctcttttacgggtatgtgacgttcataatgtgccaattgccaccaactggagcagtgccgaattgtttttacgagccttaaattaa

SEQ ID NO: 36703 - protein, 121 aa, Carboxydothermus hydrogenoformans Z-2901
MMKVALIAHDDKKDDLLAFVKTHREFFARHELFATGTTGKIISENTGLTVHRFLSGPLGGDQQIGAMVAAGEIKLVIFFRDPLTAQPHEPDITALLRVCDVHNVPIATNWSSAELFLRALN

SEQ ID NO: 36704 - DNA, 393 bp, Burkholderia sp. 383
  CDS (1)..(393): transl_table=11
atgagcaaaccccgcatcgcattgattgcgcacgacgcgaagaaggacgagatcgtcgcgctcgcgggcgaattccgcgcgacgctcgcgcaatgccggctggtggcgaccggcacgacgggcggccgcatcgcggacgcgcacgggctcgaagtcgagcgcaagctgtcggggccgctcggcggcgatctgcagatcggtgcggaactggccgacggccgcatcgacatcgtcgtgttcctgcgcgacccgatgaccgcacagccgcacgaccccgacatcaccgcgctcgtgcgcgcatgcgacgtgcacgacgtgccggtcgcgaccaacgtcgccaccgcgcggatgctgctcgacgatctggcgcgcaacatgcaggacgtttgctag

SEQ ID NO: 36705 - protein, 130 aa, Burkholderia sp. 383
MSKPRIALIAHDAKKDEIVALAGEFRATLAQCRLVATGTTGGRIADAHGLEVERKLSGPLGGDLQIGAELADGRIDIVVFLRDPMTAQPHDPDITALVRACDVHDVPVATNVATARMLLDDLARNMQDVC

SEQ ID NO: 36706 - DNA, 444 bp, Desulfovibrio desulfuricans G20
  CDS (1)..(444): transl_table=11
atgaaaggccagcgtaacatcggcatggtggcgcatgacgaacgcaaagaagacctgctggactgggtgcagcacaacctgcaggctcttattccgcacaggatatttgccaccggcaccactggcgggctgttgcgtcagcgcttcggcgacctgaccataacccccatgaaaagcggcccgctgggcggagaccagcaactgggttccatgattgccgaaggcaggctggatatgcttttctttctcatcgaccccatggcacctcatcctcatgatgttgacatcaaagcactgctgcgactggcagtgctgtataacatccctgcagcctacaatcgctccacagcggacttccttattaccagcccgtttatgaccggagagtatattcctgaaataaaagattatactccgtacgtgaagcgtcttggcgctaaatag

SEQ ID NO: 36707 - protein, 147 aa, Desulfovibrio desulfuricans G20
MKGQRNIGMVAHDERKEDLLDWVQHNLQALIPHRIFATGTTGGLLRQRFGDLTITPMKSGPLGGDQQLGSMIAEGRLDMLFFLIDPMAPHPHDVDIKALLRLAVLYNIPAAYNRSTADFLITSPFMTGEYIPEIKDYTPYVKRLGAK

SEQ ID NO: 36708 - DNA, 468 bp, Rhodospirillum rubrum ATCC 11170
  CDS (1)..(468): transl_table=11
atgtcccacagccccgagacgccgccgcgcatgaccattggtctggtcgcccatgatggacagaagcgggccatgggccagtgggtggcggccaatgccaccgtgcttggccaccacgccctggtcgccaccggcaccaccgcccgggtgctcaaggaacagaacccgaccttcgatatcaccggcctgaaaagcggtccctttggcggcgaccagcaattgggcgcgttgatcgccgagggacatctggactgtttgattttcttcgtcgacccgatggagccccagccccatgacgtcgacgtcaaggcgctgatccgtctggcccaggtccacgagatcccggcggcctgcaaccgcgccaccgccgatctgatgatcaccagcccgctgtttggcgttctgcgcgccggcagcttccccccggccgaagaacgcttcgccgtctacgccaaccgcaaggtctag

SEQ ID NO: 36709 - protein, 155 aa, Rhodospirillum rubrum ATCC 11170
MSHSPETPPRMTIGLVAHDGQKRAMGQWVAANATVLGHHALVATGTTARVLKEQNPTFDITGLKSGPFGGDQQLGALIAEGHLDCLIFFVDPMEPQPHDVDVKALIRLAQVHEIPAACNRATADLMITSPLFGVLRAGSFPPAEERFAVYANRKV

SEQ ID NO: 36710 - DNA, 387 bp, Moorella thermoacetica ATCC 39073
  CDS (1)..(387): transl_table=11
atgcgtattgccctcattgcccacgaccgcaagaaggatgacctggttaattttgttgatgaacataaggagttatttgccggccatcgcctggtggctaccggtactaccgggaaaaggattatggagcgcaccggcctgaaggttcaccggcttatgtccggtcccctgggtggcgaccagcagatggggtccctggtggccaggggacgattggacctggttatcttcctgcgcgatcccctgacgccccagccccatgaaccggatatcaacgcccttctgcgcatctgtgacgttcataatgtaccggccgctaccaacctggccacagcggccatctttctgcggtacatgcaagaccatcccggcaaccgccaggcttaa

SEQ ID NO: 36711 - protein, 128 aa, Moorella thermoacetica ATCC 39073
MRIALIAHDRKKDDLVNFVDEHKELFAGHRLVATGTTGKRIMERTGLKVHRLMSGPLGGDQQMGSLVARGRLDLVIFLRDPLTPQPHEPDINALLRICDVHNVPAATNLATAAIFLRYMQDHPGNRQA

SEQ ID NO: 36712 - DNA, 393 bp, Burkholderia thailandensis E264
  CDS (1)..(393): transl_table=11
atgagcacaccccgcattgcgctgatcgcgcacgatgcgaagaaggacgaaatcgtcgcgctcgcgggcgcgtaccgcgcggcgctcgcgcaatgccggctcgtcgcgacgggcacgacgggcgggcggatcgcgcaggcgcacgggctcgatgtcgagcgcaagctgtcggggccgctcggcggcgacttgcagatcggcgcggagcttgccgacgggcgcgtcgacatcgtgatcttcctgcgcgatccgatgaccgcgcagccgcacgaccccgacatcaccgcgctcgtgcgcgcctgcgacgtgcacgacgtgccggtcgcgacgaacgtcgcgacggcgcgcgtgctgctcgacgatctggcgcgccggctgccggtgaaagcgtga

SEQ ID NO: 36713 - protein, 130 aa, Burkholderia thailandensis E264
MSTPRIALIAHDAKKDEIVALAGAYRAALAQCRLVATGTTGGRIAQAHGLDVERKLSGPLGGDLQIGAELADGRVDIVIFLRDPMTAQPHDPDITALVRACDVHDVPVATNVATARVLLDDLARRLPVKA

SEQ ID NO: 36714 - DNA, 465 bp, Saccharophagus degradans 2-40
  CDS (1)..(465): transl_table=11
ttgaaaagtcgcacaggcgcgctacccagccgaaaacaaatagcgctaatcgcgcatgacaacaaaaaacaagagctaagtgactgggtgtgcacccacaagaaggaactagaacagcacgaccttttcgcaactgggacaaccggctataagctagcagccgaaacaggcttaaaggttgaaaagtatattagcgggcccttgggtggcgaccagcaaataggagccaaaatatctaccggcgaaatagacgtgcttattttcttttgggacccgttcgagcctatgcctcacgaccccgatgtaaaggcgctattgcgcattgcagccgtatggaacatacccgtagcttgcaaccccgcgtcagcagactttgttatcacatcaccactcatcaaacagagctacgagaggcaaatccccgattacgaggcttatatcgccgaaagaaccaaaaagctctga

SEQ ID NO: 36715 - protein, 154 aa, Saccharophagus degradans 2-40
MKSRTGALPSRKQIALIAHDNKKQELSDWVCTHKKELEQHDLFATGTTGYKLAAETGLKVEKYISGPLGGDQQIGAKISTGEIDVLIFFWDPFEPMPHDPDVKALLRIAAVWNIPVACNPASADFVITSPLIKQSYERQIPDYEAYIAERTKKL

SEQ ID NO: 36716 - DNA, 390 bp, Burkholderia xenovorans LB400
  CDS (1)..(390): transl_table=11
atgaccacccgtatcgcgctgatcgcgcacgatcataaaaaggatgacatcgtcaaactggccggcgaatacgtcgacacgctcaggcgttgcgacatcgtggcaaccggcacgaccggcgggcgcattgccgacgcgcacggcctcgcggtcgagcggatgttgtccggcccgcatggcggcgacctgcagatcggcgcgcagctcgcggaagggcgggtggacatggtgatcttcctgcgcgacccgatgacgccgcagccgcacgaaccggacatcaacgccctcgtgcgcgcgtgcgacgtgcacaacattccgtgcgccaccaacatttcgacagcgcgaatggtgctcgactcgctgaccttgcgcctcacgcagcaggtctga

SEQ ID NO: 36717 - protein, 129 aa, Burkholderia xenovorans LB400
MTTRIALIAHDHKKDDIVKLAGEYVDTLRRCDIVATGTTGGRIADAHGLAVERMLSGPHGGDLQIGAQLAEGRVDMVIFLRDPMTPQPHEPDINALVRACDVHNIPCATNISTARMVLDSLTLRLTQQV

SEQ ID NO: 36718 - DNA, 423 bp, Ralstonia metallidurans CH34
  CDS (1)..(423): transl_table=11
atgcgcagcaagccacgcatcgcgctgatcgcgcacgatcgcaagaaggatgacatcgtcgcgttcgcgggtcgccatcgggacttcctggctcaatgcgacctgttggccaccggcaccaccggcggccggatcgctgccgaaacggggctgcctgtcgcgcggatgctgtccggcccgtggggcggtgacctgcagatcggcgcgcaactcgcggaaggccgcgtcaccgcggtggtcttcctgcgcgatccgatgacgccgcagccgcacgaaccggatatcaacgcgctggtgcgcgcgtgtgacgtgcacaacgtgccatgcgcgacgaaccttgccacggcggaactggtggtcgtggaactagcgcggatctgctttgaggaagatcaggcagccgccgacgacgcggcaccctga

SEQ ID NO: 36719 - protein, 140 aa, Ralstonia metallidurans CH34
MRSKPRIALIAHDRKKDDIVAFAGRHRDFLAQCDLLATGTTGGRIAAETGLPVARMLSGPWGGDLQIGAQLAEGRVTAVVFLRDPMTPQPHEPDINALVRACDVHNVPCATNLATAELVVVELARICFEEDQAAADDAAP

SEQ ID NO: 36720 - DNA, 471 bp, Acidobacteria bacterium Ellin345
  CDS (1)..(471): transl_table=11
atgtccgacacgcaatacacgtcgttgccgattccggcgcaaaaacgcatcgcgttggtcgcgcacgatcacaagaaacgggagctgctcgagtgggccactgctcatcgcgaactcctcgttcgacacgacctttacgccaccggtacaactggcggcgttcttgagaccctcggacttaagatccacaagttgctcagtggccccctcggtggtgaccagcagatcggtgcgaagatcgcgcaaaatgagatcgatttggttatcttcttctgggatccgctcgaagcgcagccgcacgatcccgacgtccgcgcgctgcttcgcatatcggcggtgtggaacattccggttgcctataaccgctcatcggcggacttcatgatctcttcgccgttcatgaccaccgaatatagccgtcaaattccggattacagcgactatcgccaccggctcaaaccgaacctatga

SEQ ID NO: 36721 - protein, 156 aa, Acidobacteria bacterium Ellin345
MSDTQYTSLPIPAQKRIALVAHDHKKRELLEWATAHRELLVRHDLYATGTTGGVLETLGLKIHKLLSGPLGGDQQIGAKIAQNEIDLVIFFWDPLEAQPHDPDVRALLRISAVWNIPVAYNRSSADFMISSPFMTTEYSRQIPDYSDYRHRLKPNL

SEQ ID NO: 36722 - DNA, 414 bp, Mesorhizobium sp. BNC1
  CDS (1)..(414): transl_table=11
atggcacgcaggcaggtagcgctgatcgcgcatgatcaaaagaaggacgatctggttgcgtttgcacacgatcaccaggcatggttcgcaaaatgcgacctggtcgctaccggaacaacgggcgggcggatcgccgaggcttgcccggatctccagataagacgcctgaagagcgggcctctgggcggagatcagcagatcggcgccctgatcgccgagcgggctatcgatcttctcatcttctttgttgatccgctgacgccgatgccgcatgacgtggatgtaaaggcacttatgcggcttgcaatcgtttacgacattccaatggcgttgaaccgggccacggccgaaaatattcttgccttggaagaggcggcaggcccggagccgatagttgagcaaggaggctcctag

SEQ ID NO: 36723 - protein, 137 aa, Mesorhizobium sp. BNC1
MARRQVALIAHDQKKDDLVAFAHDHQAWFAKCDLVATGTTGGRIAEACPDLQIRRLKSGPLGGDQQIGALIAERAIDLLIFFVDPLTPMPHDVDVKALMRLAIVYDIPMALNRATAENILALEEAAGPEPIVEQGGS

SEQ ID NO: 36724 - DNA, 360 bp, Clostridium perfringens ATCC 13124
  CDS (1)..(360): transl_table=11
atgaaaatagcattaatagcacatgataagaaaaaagaagaaatgatagagcttgcaaaagattttgaagataagttaagtaaacatatacttgttgcaacaggtactacaggacttaaagttatgcaaaatacatctttagacgttaaaagatgtaaaagtggcccactagggggagatcaagaaataggagcgatggtagcaaaccatgatgttgatatggtaattttcttaagagatccattaacagctcaacctcatgaaccagatattagtgcattacttagactttgtgatgtttacaaggttccactagctacaaatacagaaagcgctaagcttataatggctgatatttag

SEQ ID NO: 36725 - protein, 119 aa, Clostridium perfringens ATCC 13124
MKIALIAHDKKKEEMIELAKDFEDKLSKHILVATGTTGLKVMQNTSLDVKRCKSGPLGGDQEIGAMVANHDVDMVIFLRDPLTAQPHEPDISALLRLCDVYKVPLATNTESAKLIMADI

SEQ ID NO: 36726 - DNA, 381 bp, Rhizobium leguminosarum bv. viciae 3841
  CDS (1)..(381): transl_table=11
atggccggcggcaaatgccttgcgctgatcgcgcatgaccagaagaaggacgacatggcggcgttcgcccgcgccaaccgggacattctctcgcgctggaagatcgtcgcgacgggcacgaccggcgggcgggtgctcgatgccgctcccgatcttgacgtcgtcaggctgaaaagcgggccgctcggcggcgaccagcagatcggcgcgctgatttcgaccggcgaggtcgacgccctgatcttcttcgtcgaccccttgacgccgatgccgcacgatgtcgacgtgaaggcactgatgcggctggcgatcgtctacgatattccgatggcgctcaaccacgcgaccgctataaaacttcttcccacactcgaagcctga

SEQ ID NO: 36727 - protein, 126 aa, Rhizobium leguminosarum bv. viciae 3841
MAGGKCLALIAHDQKKDDMAAFARANRDILSRWKIVATGTTGGRVLDAAPDLDVVRLKSGPLGGDQQIGALISTGEVDALIFFVDPLTPMPHDVDVKALMRLAIVYDIPMALNHATAIKLLPTLEA

SEQ ID NO: 36728 - DNA, 459 bp, Haemophilus somnus 2336
  CDS (1)..(459): transl_table=11
atgcaaacaacctatcgcaaattggcaaaaaacaaaaaaattgctttggttgcacacgatcactgcaaacaagatttgatacaatggtgtcaaactaaccgcactttacttcaacctcatattctttatgcaacggggacaactggaaatttaattcatcaagaaacgaatttagaaatcaaaaatttacttagcggtcctatgggaggagatcaacagttgggtggcttaattgcagaagggaaaattgacttgctgatattcttttgggatccaatgaatgcagttcctcatgatcctgatgtcaaagccttaatgcgtattgcaactgtttggaacattcctgttgcgatgaatattgctactgctgattttttaattagttctcctgcattccaacaagaaactgaaattcgtattccggactatcaaggttacttaaaagagcggttaaaataa

SEQ ID NO: 36729 - protein, 152 aa, Haemophilus somnus 2336
MQTTYRKLAKNKKIALVAHDHCKQDLIQWCQTNRTLLQPHILYATGTTGNLIHQETNLEIKNLLSGPMGGDQQLGGLIAEGKIDLLIFFWDPMNAVPHDPDVKALMRIATVWNIPVAMNIATADFLISSPAFQQETEIRIPDYQGYLKERLK

SEQ ID NO: 36730 - DNA, 459 bp, Haemophilus influenzae R2846
  CDS (1)..(459): transl_table=11
atgcatacaaccacacgaaccctcactcaacacaaacgtattgcactagtggctcatgatagctgcaaaaaaaatttactgaattggacgcaaaaacacaaagaggctcttaagccacatatactttatgcaacaggtacgactggacatattttagaacgagaaacaggtttaagcattcaatctttattaagtggtccgatgggcggcgaccaacaacttggtggattaatcgcagaaaagaaaattgacatgatgatcttcttttgggatccaatgaatgccgcaccacacgatcctgatgtaaaagccctcatgcgtattgcaacagtgtggaatatccctgtcgctattaatcaaagttctgcagattttcttttaacttcagttttatttgaacaagatgtggaaattgacgtgctagattatgaagggtatttaaaagagcgtttagcttaa

SEQ ID NO: 36731 - protein, 152 aa, Haemophilus influenzae R2846
MHTTTRTLTQHKRIALVAHDSCKKNLLNWTQKHKEALKPHILYATGTTGHILERETGLSIQSLLSGPMGGDQQLGGLIAEKKIDMMIFFWDPMNAAPHDPDVKALMRIATVWNIPVAINQSSADFLLTSVLFEQDVEIDVLDYEGYLKERLA

SEQ ID NO: 36732 - DNA, 459 bp, Haemophilus influenzae R2866
  CDS (1)..(459): transl_table=11
atgcagacaacaactcgaaccctcactcaacacaaacgtattgcacttgtggctcacgacagttgtaaaaaaaatttactgaattggacgcaaaaacacaaagaggcactcaagtctcatatactttatgcaacaggtacaacagggcatattttagaacgagaaacaggtttaagcattcaatctttattaagtggcccaatgggcggcgatcagcaacttggtggattaatcgcagaaaagaaaatcgacatgatgatcttcttttgggatccaatgaatgccgccccacatgatcctgatgtgaaagcccttatgcgtattgcaacagtgtggaatatccctgtcgcgattaatcaaagctctgcagattttcttttaacttcagttttatttgaacaagatgttgaaattgaagtgccagattatgaggggtatttaaaagagcggttagcttaa

SEQ ID NO: 36733 - protein, 152 aa, Haemophilus influenzae R2866
MQTTTRTLTQHKRIALVAHDSCKKNLLNWTQKHKEALKSHILYATGTTGHILERETGLSIQSLLSGPMGGDQQLGGLIAEKKIDMMIFFWDPMNAAPHDPDVKALMRIATVWNIPVAINQSSADFLLTSVLFEQDVEIEVPDYEGYLKERLA

SEQ ID NO: 36734 - DNA, 435 bp, Exiguobacterium sibiricum 255-15
  CDS (1)..(435): transl_table=11
atgaatattgccttaattgcacacgatgagaaaaaagacgagatgatgatgtttacacgggcatatgaagcctactttgccaaaaataccttatatgccacgggtacgacagggcaacggatcatggaggcgaccgcattgacggtccaccgctgtaagtcgggaccgctcggcggcgatcaggaaatcggggcgatggttgcccgtggagaaattgatatcgtcatttttttgcgggacccactgaccgcccaaccccacgaaccggacgtatcggcgttaattcgtttgtgtgatgtttacgatttgccgcttgcgacaaatgtcggaaccgccgaaattttgataaacggattggaacagggagagtttcaatggcgggaaatcattcggaaacgtcatgaagaagaacagcggaaatttttaaccgattaa

SEQ ID NO: 36735 - protein, 144 aa, Exiguobacterium sibiricum 255-15
MNIALIAHDEKKDEMMMFTRAYEAYFAKNTLYATGTTGQRIMEATALTVHRCKSGPLGGDQEIGAMVARGEIDIVIFLRDPLTAQPHEPDVSALIRLCDVYDLPLATNVGTAEILINGLEQGEFQWREIIRKRHEEEQRKFLTD

SEQ ID NO: 36736 - DNA, 462 bp, Pseudoalteromonas tunicata D2
  CDS (1)..(462): transl_table=11
atgaagacaatacaacaggctttacctgcaaaaaaaaccattgccttggttgcccatgatggcaaaaaacacgccctggaactttggtgctcaaaacaccttaatatacttagtcaacatacactgtatggcacaggcacaaccggtcacttaatcgaaaagagaaccggccttcctgtgcataaactccttagcggcccgttagggggcgaccaacaacttggtgcgctcatagctgagcatgaaatccatttattgatatttttttgggatccgttggcctcgcaaccacatgatcctgatgtaaaagccttattacgattagccgcggtgtggaatattccagttgcgtgtaatgaatcaagtgctgatatgttactgtcatcaccccttatgaacagtcaaatgccccgtgaaatgcccgattaccaaggctatttagcgcagcgccttaccatataa

SEQ ID NO: 36737 - protein, 153 aa, Pseudoalteromonas tunicata D2
MKTIQQALPAKKTIALVAHDGKKHALELWCSKHLNILSQHTLYGTGTTGHLIEKRTGLPVHKLLSGPLGGDQQLGALIAEHEIHLLIFFWDPLASQPHDPDVKALLRLAAVWNIPVACNESSADMLLSSPLMNSQMPREMPDYQGYLAQRLTI

SEQ ID NO: 36738 - DNA, 459 bp, Photobacterium sp. SKA34
  CDS (1)..(459): transl_table=11
atgcacagaacaacccgcacaatggcatcgtctaaacatatcgccctcgttgcacacgataactgtaaagttgatctacttcgctgggttaaagaacataaagataaactgagatctcacgagctttacgcaacaggtaccacaggacatctcctctcaaaagaaataggcttaccgatcacttgcttaattagtggtccaatggggggagaccaacaattaggcgctctgatttcagaaggtaaaatcgatatgatgattttcttttgggacccactcaatgccgttcctcatgacccagatgtaaaagcgttactccgtatttcagcagtatggaacatccccgttgcgactaaccgtgcgagcgcaaacttcatgatcacctcaccacttctcgatcaagaagtaagtattgaagttcctgattacgatgcttacctagaagaacgtataaattag

SEQ ID NO: 36739 - protein, 152 aa, Photobacterium sp. SKA34
MHRTTRTMASSKHIALVAHDNCKVDLLRWVKEHKDKLRSHELYATGTTGHLLSKEIGLPITCLISGPMGGDQQLGALISEGKIDMMIFFWDPLNAVPHDPDVKALLRISAVWNIPVATNRASANFMITSPLLDQEVSIEVPDYDAYLEERIN

SEQ ID NO: 36740 - DNA, 456 bp, Vibrio sp. Ex25
  CDS (1)..(456): transl_table=11
atgcaaaaaaccattcgtaccatgccaacccacaaacatgtggctttggttgcccatgacaactgcaaacctgagctacttcgctgggtaaaagaaaacaaagaaaaactgcagagtcactttctttacgcgactggcacaaccggacacatgttgagcaaagaaactggactggcgattaagagcatgatcagtggcccaatgggcggtgaccaacaacttggcgcgctcatttcagaaggtaagatcgacgttctcgttttcttctgggatccgctaaacgccgtacctcacgacccagacgttaaagcgcttcttcgtattgctagcgtttggaatattcctgtggcaacgaaccgagccaccgctaagttcttgtttaactcccctcttcttgagcaagaagtggatattgaagtaccggattacgaagcgtatcttgctgaacgcatgtaa

SEQ ID NO: 36741 - protein, 151 aa, Vibrio sp. Ex25
MQKTIRTMPTHKHVALVAHDNCKPELLRWVKENKEKLQSHFLYATGTTGHMLSKETGLAIKSMISGPMGGDQQLGALISEGKIDVLVFFWDPLNAVPHDPDVKALLRIASVWNIPVATNRATAKFLFNSPLLEQEVDIEVPDYEAYLAERM

SEQ ID NO: 36742 - DNA, 465 bp, Alteromonadales bacterium TW-7
  CDS (1)..(465): transl_table=11
atggaacaaaaaacgcaatctctccctgcaaagaaaaatattgcccttgttgctcacgatggcaaaaaagccgcgctaaagctgtggtgcgacaaacataaaaatacacttagcaagcacaccttatacggcacaggtacaacggggcatttaattcaaaaaagtacagggcttgatgttgttcagcttttaagtggccctatgggtggcgaccaacaattgggcgcaaaaatagcagaacatgaaattcatgttttaatatttttttgggaccctttagcttctcagcctcatgaccctgatgtaaaagcattactgcgcttagcggcagtgtggaatattcctgtagcgtgtaacgaggtaagtgctgatatgctgttaagctctcctttaatggaaaacgagcttgagcgtaccttgccagattacgaaaaatacctcgcaacccgacaaataagtctttaa

SEQ ID NO: 36743 - protein, 154 aa, Alteromonadales bacterium TW-7
MEQKTQSLPAKKNIALVAHDGKKAALKLWCDKHKNTLSKHTLYGTGTTGHLIQKSTGLDVVQLLSGPMGGDQQLGAKIAEHEIHVLIFFWDPLASQPHDPDVKALLRLAAVWNIPVACNEVSADMLLSSPLMENELERTLPDYEKYLATRQISL

SEQ ID NO: 36744 - DNA, 465 bp, Pseudomonas chlororaphis
  CDS (1)..(465): transl_table=11
atgatcggtatcagcttcacccaggccagcatggcggcgcgcaagcgcatcgccctggtggcccacgaccactgcaagagtttcctcctggactgggccgagcggcagaaagacaagctcgccgagcacgctctgctggccactggcaccaccggccagctgctgcaccagcgcctgggcctgccggtggaaagcatgatcagcggccccctgggcggcgaccagcagctcggcgcgcgaatcgccgagcagcgggtggacatgctggtgttcttctgggaccccttcgaaccccagccccacgatccggacatcaaggccctgctacgggtcgcggcggtctggaacattcccgtggcctgcaacgaatgcagcgccgactacctgctcagcagcccgctgatggagcaggcgcacagctaccggattccggactacccggcgtacctctcagggcgtcgatga

SEQ ID NO: 36745 - protein, 154 aa, Pseudomonas chlororaphis
MIGISFTQASMAARKRIALVAHDHCKSFLLDWAERQKDKLAEHALLATGTTGQLLHQRLGLPVESMISGPLGGDQQLGARIAEQRVDMLVFFWDPFEPQPHDPDIKALLRVAAVWNIPVACNECSADYLLSSPLMEQAHSYRIPDYPAYLSGRR

SEQ ID NO: 36746 - DNA, 384 bp, Agrobacterium tumefaciens
  CDS (1)..(384): transl_table=11
atggaagggcaacgctgtatcgcgctcatcgctcacgacgagaaaaaggacgatatggcggatttcgcccgtcaccatcagaaggtgcttgccagtttcaggatcgtcgccaccggcaccaccggcgggcgtgtgcaggaagcctgcccggggcttgaggtcatccgcctcaaaagcggtcctcttggcggcgaccagcagatcggcgcgatgatcgccactggcgaagtggacatgctgatcttctttaccgatccgctgactgccatgccgcatgatgtcgatgtgaaggcgctgacgcgtcttgccacggtctacgacattcccatggcgctcaaccgcgccaccgcagaaaacctcatcgacttcaattccgccgactga

SEQ ID NO: 36747 - protein, 127 aa, Agrobacterium tumefaciens
MEGQRCIALIAHDEKKDDMADFARHHQKVLASFRIVATGTTGGRVQEACPGLEVIRLKSGPLGGDQQIGAMIATGEVDMLIFFTDPLTAMPHDVDVKALTRLATVYDIPMALNRATAENLIDFNSAD

SEQ ID NO: 36748 - DNA, 396 bp, Bacillus anthracis
  CDS (1)..(396): transl_table=11
atgaaaattgccttaatcgcacatgacaaaaagaaagaagacatggtttcgtttgcatacgcatataaaccaatttttgaacaacatgaattatttgcaacaggaacgacaggacttcgtattatggaagcgaccggcttagttgtaacaagatatcaatctggtcctcttggcggcgatcaagaaattggtgcaatgattgcaaaaaatgatttagacatggtaattttcttccgcgatccattaacagcacaaccgcatgaaccggatgtgaatgcattgcttcgtttatgtgatgtatatgcaattccacttgcaacgaatatggcaagtgctgaaatgttaatgcacgcattagagcgaggagatttagattaccgcaagttaagaaaatga

SEQ ID NO: 36749 - protein, 131 aa, Bacillus anthracis
MKIALIAHDKKKEDMVSFAYAYKPIFEQHELFATGTTGLRIMEATGLVVTRYQSGPLGGDQEIGAMIAKNDLDMVIFFRDPLTAQPHEPDVNALLRLCDVYAIPLATNMASAEMLMHALERGDLDYRKLRK

SEQ ID NO: 36750 - DNA, 417 bp, Bacillus halodurans
  CDS (1)..(417): transl_table=11
atgagaatcgccctaattgcccacgataagaaaaaagatgaaatggttcaatttacgattgcctataaagacgtattaaaagatcacgaattgtatgctacaggtacgacaggtatgagaatcatggaagccgcacaattaccggtgaaacgattcaaatcaggaccgttaggaggcgaccagcaaattggtgcccttgtagcagaaaataaatttgaccttattatctttttacgcgatcctttaactgcccagccacatgaaccggatgtgaccgcccttgttcgcctatgtgacgtacaacgagtccctcttgcgacgaatatagggacggccgagatcttaataaaagggctagcccggggtgattttacatggcgtgaacttgtccatgatgaggaggagccacgtgtctaa

SEQ ID NO: 36751 - protein, 138 aa, Bacillus halodurans
MRIALIAHDKKKDEMVQFTIAYKDVLKDHELYATGTTGMRIMEAAQLPVKRFKSGPLGGDQQIGALVAENKFDLIIFLRDPLTAQPHEPDVTALVRLCDVQRVPLATNIGTAEILIKGLARGDFTWRELVHDEEEPRV

SEQ ID NO: 36752 - DNA, 594 bp, Bacillus subtilis
  CDS (128)..(541): transl_table=11
acgccatgattcttataaccgtgcttctttcatgtcaggcgttaaactgtcagtcgaacaagtcatgaagattgatcagcttgtgtatggtttagaaaatatcattgattagacggggggataaacaatgaaaattgctttgatcgcgcatgacaagaaaaaacaggatatggttcaatttacgactgcctatcgggatattttaaagaatcatgatctatacgcaaccggaaccacagggttgaaaattcatgaggcgacaggtcttcaaattgaacgttttcaatccggccctttagggggagaccagcaaatcggtgcactgatcgctgccaatgcactcgatcttgtcatttttttgcgcgacccgctgaccgcgcagccgcatgaaccggatgtctcggcattaatccgtttatgtgatgtgtattccattccgctcgccacaaatatgggtactgcggaaattcttgtgcgcacacttgatgaaggtgttttcgaattccgtgaccttcttcggggagaagagccgaatgtataatgctgacgttcttgcttttggcgcccacagtgatgatgtcgagatcggaatgg

SEQ ID NO: 36753 - protein, 137 aa, Bacillus subtilis
MKIALIAHDKKKQDMVQFTTAYRDILKNHDLYATGTTGLKIHEATGLQIERFQSGPLGGDQQIGALIAANALDLVIFLRDPLTAQPHEPDVSALIRLCDVYSIPLATNMGTAEILVRTLDEGVFEFRDLLRGEEPNV

SEQ ID NO: 36754 - DNA, 381 bp, Borrelia garinii
  CDS (1)..(381): transl_table=11
atggaaaaaaaaatagcattaattgcacatgataaaaaaaaggatgatttggtaaattttgtaaaacaaaactatctcttcttatccaaattcaagcttattgcaacagggacaacagggtccagaatccagcaagctactgatcttacaattattaaatataaatcgggccctatggggggagatcagcaaattggagctgaagtagctgaagggaatgtcttagctatattcttctttagagatcccctaacaaatcagcctcacgaaccagatgtgtcagctcttattagactttgcgatgtacataatataccgcttgcaaccaacgtaaaaacagcagaaattttaataaaaggatttgagggtttgaatacttaa

SEQ ID NO: 36755 - protein, 126 aa, Borrelia garinii
MEKKIALIAHDKKKDDLVNFVKQNYLFLSKFKLIATGTTGSRIQQATDLTIIKYKSGPMGGDQQIGAEVAEGNVLAIFFFRDPLTNQPHEPDVSALIRLCDVHNIPLATNVKTAEILIKGFEGLNT

SEQ ID NO: 36756 - DNA, 378 bp, Brucella abortus
  CDS (1)..(378): transl_table=11
atgacccaacgcctgcgcatcgcactgattgcccatgaccagaaaaaggacgacatggttgcttttgcccgggctcatgagcaggcattgtcccgctatgatatcgtagcaacgggaacgacgggtgggctcattcaggatgcctgcccttcgctgaacattcaccgggtcaaaagcggtcctcttggcggcgaccagcagatcggcgcgatgattgcggaaggcacggtggaagtgctcatcttctttatcgatccgctctcgccgcttccccatgatgtggatgtgaaggccctgacgcgccttggcagcgtctacgatattccaatggcgttgaaccgcgcgaccgctgaaaagctggtcagggcgctggactga

SEQ ID NO: 36757 - protein, 125 aa, Brucella abortus
MTQRLRIALIAHDQKKDDMVAFARAHEQALSRYDIVATGTTGGLIQDACPSLNIHRVKSGPLGGDQQIGAMIAEGTVEVLIFFIDPLSPLPHDVDVKALTRLGSVYDIPMALNRATAEKLVRALD

SEQ ID NO: 36758 - DNA, 393 bp, Burkholderia mallei
  CDS (1)..(393): transl_table=11
atgagcacaccccgcattgcgctgattgcgcacgatgcgaagaaggacgacatcgtcgcgctcgcgggcgcgtaccgcgcgacgctcgcgcaatgccggctcgtcgcgacgggcacgacgggcgggcggatcgcgcaggcgcatgggctcgacgtcgagcgcaagctgtcagggccgctcggcggcgatttgcagatcggcgcggagctcgccgacgggcgcgtcgacatcgtgatcttcctgcgcgatccgatgaccgcgcagccacacgatccggatatcaccgcgctcgtgcgcgcgtgcgacgtgcacgacgtgccggtggccaccaacgtcgcgacggcgcgggtgctgctcgacgatctggcgcgccggctgaccgcgaacgcgtga

SEQ ID NO: 36759 - protein, 130 aa, Burkholderia mallei
MSTPRIALIAHDAKKDDIVALAGAYRATLAQCRLVATGTTGGRIAQAHGLDVERKLSGPLGGDLQIGAELADGRVDIVIFLRDPMTAQPHDPDITALVRACDVHDVPVATNVATARVLLDDLARRLTANA

SEQ ID NO: 36760 - DNA, 450 bp, Clostridium acetobutylicum; identical to SEQ ID NO: 36674
  CDS (13)..(450): transl_table=11

SEQ ID NO: 36761 - protein, 145 aa, Clostridium acetobutylicum
MNSKKKIALVAHDNRKKALISWCEANSEVLSNHSLCGTGTTAKLIKEATGLEVFPYKSGPMGGDQQIGAAIVNEDIDFMIFFWDPLTAQPHDPDVKALLRISVLYDIPIAMNESTAEFLIKSPIMKEQHERHIIDYYQKIRKDNF

SEQ ID NO: 36762 - DNA, 360 bp, Clostridium perfringens
  CDS (1)..(360): transl_table=11
atgaaaatagcattaatagcacatgataagaaaaaagaagaaatgatagagcttgcaaaagattttgaagataagttaagtaaacatatacttgttgcaacaggtactacaggacttaaaattatgcaaaatacatctttagaagttaaaagatgtaagagtggcccactagggggagatcaggagataggagcgatggtagcaaaccacgatgttgatatggtaattttcttaagagatccattaacagctcaacctcatgaaccagatattagtgcattacttagactttgtgatgtttacaaggttccactagctacaaatacagaaagcgctaagcttataatggctgatatttag

SEQ ID NO: 36763 - protein, 119 aa, Clostridium perfringens
MKIALIAHDKKKEEMIELAKDFEDKLSKHILVATGTTGLKIMQNTSLEVKRCKSGPLGGDQEIGAMVANHDVDMVIFLRDPLTAQPHEPDISALLRLCDVYKVPLATNTESAKLIMADI

SEQ ID NO: 36764 - DNA, 432 bp, Coxiella burnetii
  CDS (1)..(432): transl_table=11
atgaccgtcaaaaaaatcgccctcgtcgctcacgatcgaatgaaaaaggaattaatcgagtggattaaaaaacatcaaaacttgttaaagcaccatgagctctatgccactggctcaacaggacaggccatcgaaaaaacactaaacgtaacggtaactaaaatggaaagcggtccgctgggaggcgatcttcagctgggggccaaaattgttaacaaagaaatcgacattctaattttcttctgggaccccctcgaagcacagccccacgatcctgatgtacgcgctttgctacgcatcgctgtcgtgtggaaccttcccgttgcctgcaatgcatcaaccgccgattatttactaacttcgcctttatttgacagtgattatcaccctgaaactcccgattacgaagcctatcgcaatcggattatttag

SEQ ID NO: 36765 - protein, 143 aa, Coxiella burnetii
MTVKKIALVAHDRMKKELIEWIKKHQNLLKHHELYATGSTGQAIEKTLNVTVTKMESGPLGGDLQLGAKIVNKEIDILIFFWDPLEAQPHDPDVRALLRIAVVWNLPVACNASTADYLLTSPLFDSDYHPETPDYEAYRNRII

SEQ ID NO: 36766 - DNA, 459 bp, Escherichia coli O6
  CDS (1)..(459): transl_table=11
atggaactgacgactcgcactttaccttcgcggaaacatattgcgctggtggcacacgatcactgcaaacaaatgctgatgagctgggtggaacggcatcaaccgttactggaacaacacgtactgtatgcaacaggcactaccggtaacttaatttcccgcgcgaccggcatgaacgtcaacgcgatgttgagtggcccaatggggggtgaccagcaggttggcgcattgatctcagaagggaaaattgatgtattgattttcttctgggacccactaaatgccgtgccgcacgatcctgacgtgaaagccttgctgcgtctggcaacggtatggaacattccggtcgccaccaacgtggcaacggcagacttcattatccagtcaccgcattttaacgacgcggtcgatattctgatccccgattatcagcgttatctcgcagaccgtctgaagtaa

SEQ ID NO: 36767 - protein, 152 aa, Escherichia coli O6
MELTTRTLPSRKHIALVAHDHCKQMLMSWVERHQPLLEQHVLYATGTTGNLISRATGMNVNAMLSGPMGGDQQVGALISEGKIDVLIFFWDPLNAVPHDPDVKALLRLATVWNIPVATNVATADFIIQSPHFNDAVDILIPDYQRYLADRLK

SEQ ID NO: 36768 - DNA, 423 bp, Enterococcus faecalis
  CDS (1)..(423): transl_table=11
atgaaaatcgctttaatcgctcatgatcgtaaaaaaacattaatgatcaaactagcaaccgcttataaacatattttagaaaaacatgaattgtatgcaacgggaacgacaggcatgaaagtgatggaagcaactggcttacccgtgcattgctttaaatcggggccattaggtggggatcaacagattggcgcaatgatatcagaagacaacattgatttagttatttttttaagagatcctctttccgcgcaaccgcatgaaccagacgtgacggctttgattcgtctaagtgatgtctatgaaattcctttagcgaccaatattggcagtgctgaaattcttttgagaggtgtcgaggcggggtttgcggacttccgtgaggttatccatgaaggggatcgtcgaccgttagctttttag

SEQ ID NO: 36769 - protein, 140 aa, Enterococcus faecalis
MKIALIAHDRKKTLMIKLATAYKHILEKHELYATGTTGMKVMEATGLPVHCFKSGPLGGDQQIGAMISEDNIDLVIFLRDPLSAQPHEPDVTALIRLSDVYEIPLATNIGSAEILLRGVEAGFADFREVIHEGDRRPLAF

SEQ ID NO: 36770 - DNA, 435 bp, Geobacillus kaustophilus
  CDS (1)..(435): transl_table=11
atgaaaatcgcgttaattgcccatgaccaaaaaaaggaagagatggtcgcatttgcgaccgcctatgcgcctgtgcttgccaaccatgaattgtacgccaccggcacgaccggcttgcgcatccaggaggcgaccggtcttcccgttcatcgcttccaatcagggccgtacggaggcgaccaagaaatcggggcgatgatcgcccgcaatgaaatggatctggtcatttttttccgcgatccgctcaccgcccagccgcatgagccggacatcagcgcattgatgcggctttgcgacgtctatgccgtgccgttggcgacgaacatcggcacggccgagctgctcatccgcgcgttggagcgcggcgatttggcatggcgcagcattgtgcgcggccaaacaaaaggcggggaggaatcgaaaacagaaaggtga

SEQ ID NO: 36771 - protein, 144 aa, Geobacillus kaustophilus
MKIALIAHDQKKEEMVAFATAYAPVLANHELYATGTTGLRIQEATGLPVHRFQSGPYGGDQEIGAMIARNEMDLVIFFRDPLTAQPHEPDISALMRLCDVYAVPLATNIGTAELLIRALERGDLAWRSIVRGQTKGGEESKTER

SEQ ID NO: 36772 - DNA, 459 bp, Haemophilus influenzae
  CDS (1)..(459): transl_table=11
  misc_feature (273)..(273): w is a or t
atgcagacaacaactcgaaccctcactcaacacaaacgtattgcacttgtggctcacgatagttgtaaaaaaaatttactgaattggacgcaaaaacacaaagaggcacttaagcctcatatactttatgcaacaggtacaacagggcatattttagaacgagaaacaggtttaagcattcaatctttattaagtggcccgatgggcggcgatcaacaacttggtggattaatcgcagaaaagaaaatcgacatgatgatcttcttttgggawccaatgaatgctgcaccacatgaacctgatgtgaaagcccttatgcgtattgcaacagtgtggaatattcctgttgcgattaatcaaagctctgcagattttcttttaacttcagttttatttgaacaagatgtggaaattgacgtaccagattatgaagggtatttaaaagagcggttagcttaa

SEQ ID NO: 36773 - protein, 152 aa, Haemophilus influenzae
  misc_feature (91)..(91): The Xaa at location 91 stands for Asp, or Glu.
MQTTTRTLTQHKRIALVAHDSCKKNLLNWTQKHKEALKPHILYATGTTGHILERETGLSIQSLLSGPMGGDQQLGGLIAEKKIDMMIFFWXPMNAAPHEPDVKALMRIATVWNIPVAINQSSADFLLTSVLFEQDVEIDVPDYEGYLKERLA

SEQ ID NO: 36774 - DNA, 405 bp, Listeria innocua
  CDS (1)..(405): transl_table=11
atgcatatcgcattaatcgcgcacgatgaaaagaaggatttgatggttggatttgcaaccgcatataaacatttgctcgaaccgcatcagttgtacgcaacaggcacgactggtttgcggattattgaagcaactggcttaacggtgcatcgttttaaatctggtccgcttggtggcgatcaacaaattggtgcgcgcatttctgaaaataaaatggacttagttattttcttgcgtgacccgctgaccgctcagccacatgaaccagatgtaagcgcgctgatacgattatgcgatgtatacgaaattcctttagcaactaatattggaacagcagaaattttaattcgcggtttaggagctggctttctagattggcgagatttaagaagaaacgatgaataa

SEQ ID NO: 36775 - protein, 134 aa, Listeria innocua
MHIALIAHDEKKDLMVGFATAYKHLLEPHQLYATGTTGLRIIEATGLTVHRFKSGPLGGDQQIGARISENKMDLVIFLRDPLTAQPHEPDVSALIRLCDVYEIPLATNIGTAEILIRGLGAGFLDWRDLRRNDE

SEQ ID NO: 36776 - DNA, 405 bp, Listeria monocytogenes serotype 4b
  CDS (1)..(405): transl_table=11
atgcatatcgcattaatcgcgcacgatgaaaagaaagatttgatggttggatttgcaactgcatataaacatttgctcgaaccgcatcaattatatgcaaccgggacgacaggtttacgcattatcgaagcaactggcttaacggtacatcgttttaaatcaggcccgcttggtggcgatcaacaaattggtgcgcggatttcagaaaataaaatggacttagttattttcttgcgggatccactcactgcgcagcctcacgaaccagatgtgacggcgcttattcgattatgcgatgtatacgaaattcctttagcgacaaatattggcacagcagaaattttaattcgtggtttaggagctggtttcctagattggcgagacttaagacggaatgatgaataa

SEQ ID NO: 36777 - protein, 134 aa, Listeria monocytogenes serotype 4b
MHIALIAHDEKKDLMVGFATAYKHLLEPHQLYATGTTGLRIIEATGLTVHRFKSGPLGGDQQIGARISENKMDLVIFLRDPLTAQPHEPDVTALIRLCDVYEIPLATNIGTAEILIRGLGAGFLDWRDLRRNDE

SEQ ID NO: 36778 - DNA, 507 bp, Mannheimia succiniciproducens; identical to SEQ ID NO: 36686
  CDS (49)..(507): transl_table=11

SEQ ID NO: 36779 - protein, 152 aa, Mannheimia succiniciproducens
METTFRHVAAQKHIALVAHDHCKEDLINWCQKNVHHLQNHQLYATGTTGHLIEKATELKINSLLSGPMGGDQQLGALIAENKIDVMIFFWDPMNAVPHDPDVKALLRIAAVWNIPHAMNIASADLLINSPLINREIELRIPDYQTYLQKRLK

SEQ ID NO: 36780 - DNA, 423 bp, Oceanobacillus iheyensis
  CDS (1)..(423): transl_table=11
atgaatatagcattaatcgcacatgacgaaaagaaagaagacatgattcaatttacgactgcatatacccatgtgttgtcaaaacatagattatttgctaccggtactaccggcatgaaaatttcgaatgctacaggcttacaaattcaccgttttcaatccggtccacttggtggagatcaacaaattggagctatgattgcgaacggagagatggatatgattatctttttccgagatccactaactgctcaacctcatgaacctgacgtaagtgcattaatgcgtttatgtgatgttcatcagataccattagtaacgaatattgcaggtgcagagatctttattcatggccttagcagaggagatttgaaatggagagagataatcaaagagagacaagagaaagaagggacaccgtga

SEQ ID NO: 36781 - protein, 140 aa, Oceanobacillus iheyensis
MNIALIAHDEKKEDMIQFTTAYTHVLSKHRLFATGTTGMKISNATGLQIHRFQSGPLGGDQQIGAMIANGEMDMIIFFRDPLTAQPHEPDVSALMRLCDVHQIPLVTNIAGAEIFIHGLSRGDLKWREIIKERQEKEGTP

SEQ ID NO: 36782 - DNA, 459 bp, Pasteurella multocida
  CDS (1)..(459): transl_table=11
atgcagagtaccgcacgtaccttgtctgttaataaacatattgcactggttgcacatgaccactgtaaacaagatttgataaattggtgtaaaactcaccgcactttattagcacaacataccctttatgcgacaggaacaactggcaacctcattcaaaaagaagcaaatttgccgattaaaagtttactcagtggtccaatgggcggcgatcaacaattgggcggcttaattgcagaaaaacaaattgatgtattgattttcttttgggatccgatgaatgcagtcccccatgatcctgacgtcaaagcattaatgcgaatcgcaacggtgtggaatattcccgtcgcaatgaatatggcaacagcagattttctcattacatcacctagctttgctcaagaaacccaagtacgaattcctgattatgacggctatttgaaagaacgtttaaaataa

SEQ ID NO: 36783 - protein, 152 aa, Pasteurella multocida
MQSTARTLSVNKHIALVAHDHCKQDLINWCKTHRTLLAQHTLYATGTTGNLIQKEANLPIKSLLSGPMGGDQQLGGLIAEKQIDVLIFFWDPMNAVPHDPDVKALMRIATVWNIPVAMNMATADFLITSPSFAQETQVRIPDYDGYLKERLK

SEQ ID NO: 36784 - DNA, 459 bp, Photobacterium profundum
  CDS (1)..(459): transl_table=11
atgcaagtcacaacacgtacaatgaacaagagcaagcatattgccttagttgcacacgacaactgtaaacaagaccttttacgctgggtaaaagagtttgaagacaaacttgaagaccacactctatatgcaacaggcaccacaggtcatcttctttccaaagaaacaggccttaaaatcaactgcatgatcagtggtcctatgggaggagatcaacaactaggcgctttaatttcagaaagtaaaattgatatgatgattttcttctgggatccgctaaatgccgttcctcatgatcctgatgtgaaagcactattgcgtatttctgccgtctggaatgtacctgttgcgaccaaccgagcaagcgcaaagtttatgattacatcaccattattagcagaagaaatttctatcgaaattccagattatgaagcttaccttgctgagcgtattggctaa

SEQ ID NO: 36785 - protein, 152 aa, Photobacterium profundum
MQVTTRTMNKSKHIALVAHDNCKQDLLRWVKEFEDKLEDHTLYATGTTGHLLSKETGLKINCMISGPMGGDQQLGALISESKIDMMIFFWDPLNAVPHDPDVKALLRISAVWNVPVATNRASAKFMITSPLLAEEISIEIPDYEAYLAERIG

SEQ ID NO: 36786 - DNA, 408 bp, Ralstonia solanacearum
  CDS (1)..(408): transl_table=11
gtgcccaagcgccgccgcatcgccctgatcgcgcacgaccacaagaaggacgacatgatcgccttcgcgcagacgcacaaggccttcctgatgcgatgcgacctgctggccaccggcaccaccggcggccggctgcaggacgaagtcggcctgagcgtgcagcgcatgctgtccggcccgtggggcggcgacctgcagatcggggcgcaactggccgagggccgcgtcgatgccgtcatcttcctgcgcgacccgatgacgccgcagccgcacgagcccgacatcaacgcgctggtccgcgcctgcgacgtccacaacattccctgcgccaccaatctggcgacggccgacctggtgatgattgcactgggcctggcgcaacccgaccccaaggagatccacgcatga

SEQ ID NO: 36787 - protein, 135 aa, Ralstonia solanacearum
MPKRRRIALIAHDHKKDDMIAFAQTHKAFLMRCDLLATGTTGGRLQDEVGLSVQRMLSGPWGGDLQIGAQLAEGRVDAVIFLRDPMTPQPHEPDINALVRACDVHNIPCATNLATADLVMIALGLAQPDPKEIHA

SEQ ID NO: 36788 - DNA, 381 bp, Rhizobium meliloti
  CDS (1)..(381): transl_table=11
atggcagatcggaaatgtctcgccctgatcgcccatgatcagaagaaggatgacctcgcggcttttgcaaaggcgaacgaggcggtcctgtccaagtggaagatcgtcgccacggggaccaccggcggccgtgttctcgacgtgtgtccggcgctcgacatcgtccggttgaagagcggtccgctcggcggcgaccagcagataggcgcgctgatcgccacgggcgacgtggactgcctgatcttcttcgtcgatccgttgacggccatgccgcacgacgtcgatgtcaaggcactgatgcgcctggcgatcgtctatgacatcccgatggcgctcaaccgcgcgactgccgagcagttgatcgacttcaggcgcaactga

SEQ ID NO: 36789 - protein, 126 aa, Rhizobium meliloti
MADRKCLALIAHDQKKDDLAAFAKANEAVLSKWKIVATGTTGGRVLDVCPALDIVRLKSGPLGGDQQIGALIATGDVDCLIFFVDPLTAMPHDVDVKALMRLAIVYDIPMALNRATAEQLIDFRRN

SEQ ID NO: 36790 - DNA, 501 bp, Thermotoga maritima; identical to SEQ ID NO: 36672
  CDS (34)..(501): transl_table=11

SEQ ID NO: 36791 - protein, 155 aa, Thermotoga maritima
MDKKKRIALIAHDRRKRDLLEWVSFNLGTLSKHELYATGTTGALLQEKLGLKVHRLKSGPLGGDQQIGAMIAEGKIDVLIFFWDPLEPQAHDVDVKALIRIATVYNIPVAITRSTADFLISSPLMNDVYEKIQIDYEEELERRIRKVVEGEEEET

SEQ ID NO: 36792 - DNA, 390 bp, Thermoanaerobacter tengcongensis
  CDS (1)..(390): transl_table=11
atgaatatcgctcttattgcgcatgaccagaagaaagaacttatggttaactttgctatcgcttataagcacatatttgaaaaatgcaatttgtacgctacggggcacaccggacagcttataaaagaagcaacaggacttgatgttcactgcctcttgccgggacctctgggaggagaccagcagataggggctttgattgctgagaataaaattgaccttgtcattttcttgagagaccctctcactgttcagcctcatgaacctgatatacttgctcttttgagggtatgcgatgtccattcaatccctgttgctactaatattgctactgctgaagtgcttttgaaaggaatggaaatgggacttttagactggagacaaatttga

SEQ ID NO: 36793 - protein, 129 aa, Thermoanaerobacter tengcongensis
MNIALIAHDQKKELMVNFAIAYKHIFEKCNLYATGHTGQLIKEATGLDVHCLLPGPLGGDQQIGALIAENKIDLVIFLRDPLTVQPHEPDILALLRVCDVHSIPVATNIATAEVLLKGMEMGLLDWRQI

SEQ ID NO: 36794 - DNA, 477 bp, Treponema socranskii
  CDS (1)..(477): transl_table=11
atgagacggaaattacggatcgcgcttgtagcgcacgataaccgaaaagccgatatcgtcgactgggcgttaaacaatgcggaaatgctttcacagcacaggcttttcggtacggggacgacgggcacgctcgtgcgggaatcctttatgaagcgcggcatcgccagcgatatcacgtgcatgcattcggggccgatgggcggggatgctgaaatcgcggcgctcgtcgttcgaaaggaaatcgattttgcggttttttttatagacgatttgaatccgcagccgcacgaagccgatattcaaatgcttttgcgccagtgcaggatccacaatataccgatcgcgtgcaaccgctacagcgccgatttaatgatcacgagttcgctgtgggacgatgccggctatgtgccgaaagatccgatttacgcgccgtttgacagaaaagcgttcgaagaaagccttaaagtaaaagagtga

SEQ ID NO: 36795 - protein, 158 aa, Treponema socranskii
MRRKLRIALVAHDNRKADIVDWALNNAEMLSQHRLFGTGTTGTLVRESFMKRGIASDITCMHSGPMGGDAEIAALVVRKEIDFAVFFIDDLNPQPHEADIQMLLRQCRIHNIPIACNRYSADLMITSSLWDDAGYVPKDPIYAPFDRKAFEESLKVKE

SEQ ID NO: 36796 - DNA, 456 bp, Vibrio cholerae
  CDS (1)..(456): transl_table=11
atgaaaaaaaccacccgcactatggcagcgcacaaacacgttgctcttgtggctcacgataactgcaaaggtgaactgctgcgctgggtaacagagaacaaggaaaaactgcaacgccatttcctgtatgccactggcaccacggggcatatgctcagtaaagaaacgggactggcgatcaaaagtatgatcagcggcccaatgggcggtgatcagcaactgggcgcgttaatttctgaaggcaaaattgatgtgctgattttcttttgggatccacttaatgccgttccgcatgatccggatgtgaaagcgctgctgcgtatcgccagtgtgtggaatattcccgtcgccaccaaccgcgccagtgctaaattcttgttttcttcttctttgatggagcaggaagtgcaaattgaaattccggattaccaagcttatctcgctgaacgcacctaa

SEQ ID NO: 36797 - protein, 151 aa, Vibrio cholerae
MKKTTRTMAAHKHVALVAHDNCKGELLRWVTENKEKLQRHFLYATGTTGHMLSKETGLAIKSMISGPMGGDQQLGALISEGKIDVLIFFWDPLNAVPHDPDVKALLRIASVWNIPVATNRASAKFLFSSSLMEQEVQIEIPDYQAYLAERT

SEQ ID NO: 36798 - DNA, 456 bp, Vibrio parahaemolyticus
  CDS (1)..(456): transl_table=11
atgcaaaaaacgactcgtaccatgcctgcgcataaacacgtggcattggttgcccacgacaattgcaaacctgagctacttcgctgggtaaaagagaataaagaaaagctgcaacgccatttcttgtacgctacaggcacaactggccacatgctgagcaaagaaactggcttagcaattaagagtatgatcagcggccctatggggggcgaccaacaacttggtgcattgatttcggaaggtaaaatcgatgtgttggtcttcttctgggatccactaaacgccgtacctcacgaccccgatgtgaaagccctacttcgtattgcgagtgtttggaacatcccagttgcgactaaccgtgcaacggcaaaattcctcttcgactctcctcttctagaacaagaagtcgacatcgaagtgccagattacgaagcttaccttgcagaacgcatgtaa

SEQ ID NO: 36799 - protein, 151 aa, Vibrio parahaemolyticus
MQKTTRTMPAHKHVALVAHDNCKPELLRWVKENKEKLQRHFLYATGTTGHMLSKETGLAIKSMISGPMGGDQQLGALISEGKIDVLVFFWDPLNAVPHDPDVKALLRIASVWNIPVATNRATAKFLFDSPLLEQEVDIEVPDYEAYLAERM

SEQ ID NO: 36800 - DNA, 456 bp, Vibrio vulnificus
  CDS (1)..(456): transl_table=11
atgcaaaaaacaactcgcacgatgccagcgcataaacacattgcattggttgcacacgataactataagcctgagctgctacgctgggtaaaagagaacaaagaaaaattgcagagccacttcttgtatgccacggggacaactggccacatgcttagtcgtgaaaccgggcttgcgattaaaagtatgatcagcggcccaatgggtggtgatcaacagcttggtgctttaatctcagaaggcaaaatcgatatgctgattttcttctgggacccactgaatgcggtaccacatgatccggatgtaaaagcgctactgcgcattgccagtgtgtggaatattccagtggcaaccaaccgtgcaacggcaaagttcctttttgaatcgccattattgaatgaagaagttgatgtcgaaatccctgattaccaagcctatttggcaggtcgcacctaa

SEQ ID NO: 36801 - protein, 151 aa, Vibrio vulnificus
MQKTTRTMPAHKHIALVAHDNYKPELLRWVKENKEKLQSHFLYATGTTGHMLSRETGLAIKSMISGPMGGDQQLGALISEGKIDMLIFFWDPLNAVPHDPDVKALLRIASVWNIPVATNRATAKFLFESPLLNEEVDVEIPDYQAYLAGRT

SEQ ID NO: 36802 - DNA, 465 bp, Yersinia pestis
  CDS (1)..(465): transl_table=11
atggaactgactacccgcactattgcggctcgcaaacacattgcccttgtttcccatgatcactgtaagaaatcactgctcgcatgggtgatggaaaacagagatctactggcacaacacgaactctatgccacagggaccaccggtaatttagtgcagaaggcgacaggtattgatgtgcactgtttgctcagtggcccgatgggcggtgatcaggaagtgggtgcgctgatatctgagaagaagatagatatcctgattttcttttgggatccgctcaatgccgttccacatgacccagatgtgaaagccctgctgcgcctagcaacagtatggaatattccagtagcaacaaaccgctctactgcagatttcttaattggctcaaccctgtttagcagcgaagtcactatcgccatccctgattatgaccgttacatgcaacagcgcctggacctaaaatag

SEQ ID NO: 36803 - protein, 154 aa, Yersinia pestis
MELTTRTIAARKHIALVSHDHCKKSLLAWVMENRDLLAQHELYATGTTGNLVQKATGIDVHCLLSGPMGGDQEVGALISEKKIDILIFFWDPLNAVPHDPDVKALLRLATVWNIPVATNRSTADFLIGSTLFSSEVTIAIPDYDRYMQQRLDLK

SEQ ID NO: 36804 - DNA, 25 bp, Artificial sequence
  primer
atgtacattatggaactgacgactc

SEQ ID NO: 36805 - DNA, 22 bp, Artificial sequence
  primer
ttacttcagacggtccgcgaga

SEQ ID NO: 36806 - protein, 122 aa, Artificial sequence
  consensus sequence
  Variant (4)..(4): Xaa in position 4 is any amino acid
  Variant (8)..(9): Xaa in position 8 to 9 is any amino acid
  Variant (11)..(23): Xaa in position 11 to 23 is any amino acid
  Variant (25)..(28): Xaa in position 25 to 28 is any amino acid
  Variant (30)..(30): Xaa in position 30 is any amino acid
  Variant (37)..(43): Xaa in position 37 to 43 is any amino acid
  Variant (44)..(49): Xaa in position 44 to 49 is any or no amino acid
  Variant (51)..(56): Xaa in position 51 to 56 is any amino acid
  Variant (57)..(63): Xaa in position 57 to 63 is any or no amino acid
  Variant (67)..(67): Xaa in position 67 is any amino acid
  Variant (73)..(73): Xaa in position 73 is any amino acid
  Variant (76)..(82): Xaa in position 76 to 82 is any amino acid
  Variant (84)..(85): Xaa in position 84 to 85 is any amino acid
  Variant (88)..(89): Xaa in position 88 to 89 is any amino acid
  Variant (92)..(95): Xaa in position 92 to 95 is any amino acid
  Variant (98)..(99): Xaa in position 98 to 99 is any amino acid
  Variant (101)..(102): Xaa in position 101 to 102 is any amino acid
  Variant (105)..(105): Xaa in position 105 is any amino acid
  Variant (107)..(109): Xaa in position 107 to 109 is any amino acid
  Variant (111)..(113): Xaa in position 111 to 113 is any amino acid
  Variant (115)..(115): Xaa in position 115 is any amino acid
  Variant (117)..(117): Xaa in position 117 is any amino acid
  Variant (119)..(121): Xaa in position 119 to 121 is any amino acid
IALXAHDXXKXXXXXXXXXXXXXLXXXXLXATGTTGXXXXXXXXXXXXXLXXXXXXXXXXXXXSGPXGGDQQXGAXXXXXXXDXXIFXXDPXXXXPHXXDXXALXRXXXVXXXPXAXNXXXA

SEQ ID NO: 36807 - protein, 58 aa, Artificial sequence
  protein pattern
  Variant (3)..(3): Xaa in position 3 is any amino acid
  Variant (8)..(8): Xaa in position 8 is Glu or Gln
  Variant (9)..(9): Xaa in position 9 is Ile, Leu, Met or Val
  Variant (11)..(11): Xaa in position 11 is Ala, Gly or Ser
  Variant (12)..(12): Xaa in position 12 is any amino acid
  Variant (13)..(13): Xaa in position 13 is Ile or Val
  Variant (14)..(14): Xaa in position 14 is Ala, Ser or Val
  Variant (15)..(17): Xaa in position 15 to 17 is any amino acid
  Variant (18)..(18): Xaa in position 18 is Phe, Ile, Leu, Met or Val
  Variant (19)..(20): Xaa in position 19 to 20 is any amino acid
  Variant (21)..(21): Xaa in position 21 is Ile, Leu, Met or Val
  Variant (22)..(22): Xaa in position 22 is Phe, Ile or Val
  Variant (24)..(24): Xaa in position 24 is Phe or Leu
  Variant (25)..(25): Xaa in position 25 is any amino acid
  Variant (28)..(28): Xaa in position 28 is Phe, Leu or Met
  Variant (29)..(29): Xaa in position 29 is Ala, Glu, Asn, Ser or Thr
  Variant (30)..(31): Xaa in position 30 to 31 is any amino acid
  Variant (32)..(32): Xaa in position 32 is Ala or Pro
  Variant (34)..(34): Xaa in position 34 is Asp or Glu
  Variant (35)..(35): Xaa in position 35 is Pro, Thr or Val
  Variant (37)..(37): Xaa in position 37 is Ile or Val
  Variant (38)..(38): Xaa in position 38 is any amino acid
  Variant (41)..(41): Xaa in position 41 is any amino acid
  Variant (43)..(44): Xaa in position 43 to 44 is any amino acid
  Variant (45)..(45): Xaa in position 45 is any or no amino acid
  Variant (47)..(49): Xaa in position 47 to 49 is any amino acid
  Variant (50)..(50): Xaa in position 50 is Ile, Pro or Val
  Variant (51)..(56): Xaa in position 51 to 56 is any amino acid
  Variant (57)..(57): Xaa in position 57 is Ala, Gly, Ser or Thr
  Variant (58)..(58): Xaa in position 58 is Ala or Thr
GPXGGDQXXGXXXXXXXXXXXXFXXDPXXXXXHXXDXXALXRXXXVXXXXXXXXXXXX

SEQ ID NO: 36808 - protein, 21 aa, Artificial sequence
  protein pattern
  Variant (2)..(5): Xaa in position 2 to 5 is any amino acid
  Variant (6)..(6): Xaa in position 6 is Phe, Ile or Leu
  Variant (7)..(7): Xaa in position 7 is any amino acid
  Variant (8)..(8): Xaa in position 8 is Ala, Cys or Gly
  Variant (13)..(20): Xaa in position 13 to 20 is any or no amino acid
LXXXXXXXTGTTXXXXXXXXG

SEQ ID NO: 36809 - DNA, 1299 bp, Escherichia coli
  CDS (1)..(1299): transl_table=11
atgaaagcgatcttaatcccatttttatctcttctgattccgttaaccccgcaatctgcattcgctcagagtgagccggagctgaagctggaaagtgtggtgattgtcagtcgtcatggtgtgcgtgctccaaccaaggccacgcaactgatgcaggatgtcaccccagacgcatggccaacctggccggtaaaactgggttggctgacaccgcgcggtggtgagctaatcgcctatctcggacattaccaacgccagcgtctggtagccgacggattgctggcgaaaaagggctgcccgcagtctggtcaggtcgcgattattgctgatgtcgacgagcgtacccgtaaaacaggcgaagccttcgccgccgggctggcacctgactgtgcaataaccgtacatacccaggcagatacgtccagtcccgatccgttatttaatcctctaaaaactggcgtttgccaactggataacgcgaacgtgactgacgcgatcctcagcagggcaggagggtcaattgctgactttaccgggcatcggcaaacggcgtttcgcgaactggaacgggtgcttaattttccgcaatcaaacttgtgccttaaacgtgagaaacaggacgaaagctgttcattaacgcaggcattaccatcggaactcaaggtgagcgccgacaatgtctcattaaccggtgcggtaagcctcgcatcaatgctgacggagatatttctcctgcaacaagcacagggaatgccggagccggggtggggaaggatcaccgattcacaccagtggaacaccttgctaagtttgcataacgcgcaattttatttgctacaacgcacgccagaggttgcccgcagccgcgccaccccgttattagatttgatcaagacagcgttgacgccccatccaccgcaaaaacaggcgtatggtgtgacattacccacttcagtgctgtttatcgccggacacgatactaatctggcaaatctcggcggcgcactggagctcaactggacgcttcccggtcagccggataacacgccgccaggtggtgaactggtgtttgaacgctggcgtcggctaagcgataacagccagtggattcaggtttcgctggtcttccagactttacagcagatgcgtgataaaacgccgctgtcattaaatacgccgcccggagaggtgaaactgaccctggcaggatgtgaagagcgaaatgcgcagggcatgtgttcgttggcaggttttacgcaaatcgtgaatgaagcacgcataccggcgtgcagtttgtaa

SEQ ID NO: 36810 - protein, 432 aa, Escherichia coli
MKAILIPFLSLLIPLTPQSAFAQSEPELKLESVVIVSRHGVRAPTKATQLMQDVTPDAWPTWPVKLGWLTPRGGELIAYLGHYQRQRLVADGLLAKKGCPQSGQVAIIADVDERTRKTGEAFAAGLAPDCAITVHTQADTSSPDPLFNPLKTGVCQLDNANVTDAILSRAGGSIADFTGHRQTAFRELERVLNFPQSNLCLKREKQDESCSLTQALPSELKVSADNVSLTGAVSLASMLTEIFLLQQAQGMPEPGWGRITDSHQWNTLLSLHNAQFYLLQRTPEVARSRATPLLDLIKTALTPHPPQKQAYGVTLPTSVLFIAGHDTNLANLGGALELNWTLPGQPDNTPPGGELVFERWRRLSDNSQWIQVSLVFQTLQQMRDKTPLSLNTPPGEVKLTLAGCEERNAQGMCSLAGFTQIVNEARIPACSL

SEQ ID NO: 36811 - DNA, 1335 bp, Escherichia coli O157:H7 EDL933
  CDS (1)..(1335): transl_table=11
atgtcggatatgaaaagcggaaacatatcgatgaaagcgatcttgatcccatttttatctcttctgattccgttaaccccgcaatctgcattcgctcagagtgagccggagccggagctgaagctggaaagtgtggtgattgtcagtcgtcatggtgtgcgtgccccaaccaaggccacgcaactgatgcaggatgtcaccccagacgcatggccaaactggccggtaaaactgggttggctgacaccgcgcggtggtgagctaatcgcttatctcggacattaccaacgccagcgtctggtagccgacggattgctgacgaaaaagggctgcccgcagcctggtcaggtcgcgattattgctgatgtcgacgagcgtacccgtaaaacaggcgaagccttcgccgccgggctggcacctgactgtgcaataaccgtacatacccaggcagatacgtccagtcccgatccgttatttaatcctctaaaaactggcgtttgccaactggataacgcgaacgtgactgacgcgatcctcagcagggcaggagggtcaattgctgactttaccgggcatcggcaaacggcgtttcgcgaactggaacgggtgcttaattttccgcaatcaaacttgtgccttaaccgtgagaaacaggacgaaagctgttcattaacgcaggcattaccatcggaactcaaggtgagcgccgacaatgtctcattaaccggtgcggtaagcctcgcatcaatgctgacggaaatatttctcctgcaacaggcacagggaatgccggagccggggtggggaaggatcactgattcacaccagtggaacacgttgctaagtttgcataacgcgcaattttatttactacaacgcacgccagaggttgcccgcagccgcgccaccccgttgttggatttgatcatgatagcgttgactccccatccaccgcaaaaacaggcgtatggtgtgacattacccacttcagtgctgtttatcgccggacacgatactaatctggcaaatctcggcggcgcactggagctcaactggacgcttccaggtcagccggataacacgccgccaggtggtgaactggtgtttgaacgctggcgtcggctaagcgataacagccagtggattcaggtttcgctggtcttccagactttacagcagatgcgtgataaaactccgctgtcattaaatacgccgcccggagaggtgaaactgaccctggcaggatgtgaagagcgaaatgcgcagggcatgtgttcgttggccggttttacgcaaatcgtgaatgaagcacgcataccggcgtgcagtttgtaa

SEQ ID NO: 36812 - protein, 444 aa, Escherichia coli O157:H7 EDL933
MSDMKSGNISMKAILIPFLSLLIPLTPQSAFAQSEPEPELKLESVVIVSRHGVRAPTKATQLMQDVTPDAWPNWPVKLGWLTPRGGELIAYLGHYQRQRLVADGLLTKKGCPQPGQVAIIADVDERTRKTGEAFAAGLAPDCAITVHTQADTSSPDPLFNPLKTGVCQLDNANVTDAILSRAGGSIADFTGHRQTAFRELERVLNFPQSNLCLNREKQDESCSLTQALPSELKVSADNVSLTGAVSLASMLTEIFLLQQAQGMPEPGWGRITDSHQWNTLLSLHNAQFYLLQRTPEVARSRATPLLDLIMIALTPHPPQKQAYGVTLPTSVLFIAGHDTNLANLGGALELNWTLPGQPDNTPPGGELVFERWRRLSDNSQWIQVSLVFQTLQQMRDKTPLSLNTPPGEVKLTLAGCEERNAQGMCSLAGFTQIVNEARIPACSL

SEQ ID NO: 36813 - DNA, 1242 bp, Escherichia coli O157:H7 EDL933
  CDS (1)..(1242): transl_table=11
  misc_feature (157)..(157): y is t or c
atgaacaaaacgctaatcgccgcagctgtggcaggggtagttttactcgcttcaaacgctcaggcacaaaccgtaccggaaggctatcagctacagcaagtgctcatgatgagccgccataacttacgtgcgccgctggcgaacaatggcagtgtgytggagcagtcgacgccgaataaatggcccgaatgggacgtccccggtgggcaactcaccaccaaaggtggcgtactcgaagtgtatatgggccattacatgcgtgaatggctggcagagcaggggatggtaaaatcgggggaatgcccgccgccggacaccgtttatgcctatgccaatagtctgcaacgtaccgttgcgaccgcacagttctttattaccggcgcattcccggggtgtgatattcctgtgcatcaccaggaaaaaatgggcactatggacccaacctttaacccggtgatcaccgatgattccgccgcattcagtgaacaggcggtggcggcaatggagaaagagctcagcaaactccagcttaccgacagctaccagctactggaaaaaatcgttaactataaagattcccctgcctgtaaagagaaacaacagtgttcgctggtggatggcaaaaatacctttagcgccaagtatcaacaagaaccaggtgtttccgggccgctgaaagtcggcaactcgctggtagatgcgtttactttgcaatactacgaaggttttccgatggatcaggtggcctggggagaaatcaaatctgaccagcagtggaaggtgttgtcgaagctgaaaaacggttaccaggacagcctgtttacctcaccggaagtggcgcgcaatgttgcgaaaccgctggtcagttatatcgacaaagccctggtcaccgatcgcaccagtgctccaaaaatcacggtgttagttgggcatgactccaacattgcctctctgttaacggcgctggatttcaaaccgtatcagttgcatgaccagaacgaacgcacgccgattggcggcaaaatcgttttccagcgttggcgtgacagcaaagccaatcgcgatttgatgaaaattgaatatgtgtaccagagtgcggaacagttacgtaatgccgatgcgttaaccctgcaggcacctgcgcagcgcgtgacgctggaattaagcggttgcccgatagacgctgatggtttctgcccgatggataagtttgatagcgtgttgaatgaagcggtgaaataa

SEQ ID NO: 36814 - protein, 413 aa, Escherichia coli O157:H7 EDL933
MNKTLIAAAVAGVVLLASNAQAQTVPEGYQLQQVLMMSRHNLRAPLANNGSVLEQSTPNKWPEWDVPGGQLTTKGGVLEVYMGHYMREWLAEQGMVKSGECPPPDTVYAYANSLQRTVATAQFFITGAFPGCDIPVHHQEKMGTMDPTFNPVITDDSAAFSEQAVAAMEKELSKLQLTDSYQLLEKIVNYKDSPACKEKQQCSLVDGKNTFSAKYQQEPGVSGPLKVGNSLVDAFTLQYYEGFPMDQVAWGEIKSDQQWKVLSKLKNGYQDSLFTSPEVARNVAKPLVSYIDKALVTDRTSAPKITVLVGHDSNIASLLTALDFKPYQLHDQNERTPIGGKIVFQRWRDSKANRDLMKIEYVYQSAEQLRNADALTLQAPAQRVTLELSGCPIDADGFCPMDKFDSVLNEAVK

SEQ ID NO: 36815 - DNA, 1245 bp, Caulobacter crescentus CB15
  CDS (1)..(1245): transl_table=11
atgcgcctgtccctccgcatcgccgttgtgaccctcgccctggcgtcggccggcgccgcgtcggccgagacgctggaaaaggtcgtcatcctcagccgtcacggcgtccggtcggccatgtccagtcccgagcggttggaggaggcctcggcccggccctggccccgcttcgaggttccggccggacacctgacggcgagaggcgagacgctggtcgcgcggatgggcgactattaccgtcggcactacgccgcccaggggctgttgaagccgggggactgcgcatccgtctacgcctgggccaatgtgacccagcgcaccatcgccacggccaaagcctatcgtgagaccctggcgcccggatgtccggtcaccgtcaacaccgtgggcgaggggaacatcgacccgatgttcgagccggtgaaggctggaatcgtgaaagccgatcacgccttggcccgcgccgccgtcgccggccgggtcggcggcgacctgaccgcctggagcgccagtcacaaccaggaggccgagcaactcgatgcgctcctgatgcagtgtgacaagggtccgtgtccgccagcgcccggcaagcgccgcgtgttcgacgccaagcccggctttgtcgacggcgaggagctggccggcctttcggggccggaagccttcgcctcgggcgtcaccgagagcctgctgatggcctgggccgatgggcgggacttcgcgggtctgggctggaagagtctggacgaagaggcgctgacccggtcgttcttcctgcaccaggccgagttcgatcttcgtctgcgcacgccctatgtggcgcggaccttagccggccatctggccgatcggctggcggccaccctccgggatggcgcggccgcgatcggtcccgtcgacgccagactggtgatcatcgccggccacgacggcaccctggcgtcgctgggggggctgctgcgaatggagtggaccctgccgggctatcaacccaaccagattcagccgggcggggctctcgtgttcgagcgctggcggcgcgatgacggcgtgcgcgtggtccgtgttcgcttcaccggacaaagcctttcccagctgcggaacatgactgcgctggacgccaagaccccgccgctgtccgcgcccgtgttcgtgcagggctgcggcacggcgaccccggcctttgattgccggctggaagatttcgagacggtcgtccggggcgcgacgcgcgcggacggctaa

SEQ ID NO: 36816 - protein, 414 aa, Caulobacter crescentus CB15
MRLSLRIAVVTLALASAGAASAETLEKVVILSRHGVRSAMSSPERLEEASARPWPRFEVPAGHLTARGETLVARMGDYYRRHYAAQGLLKPGDCASVYAWANVTQRTIATAKAYRETLAPGCPVTVNTVGEGNIDPMFEPVKAGIVKADHALARAAVAGRVGGDLTAWSASHNQEAEQLDALLMQCDKGPCPPAPGKRRVFDAKPGFVDGEELAGLSGPEAFASGVTESLLMAWADGRDFAGLGWKSLDEEALTRSFFLHQAEFDLRLRTPYVARTLAGHLADRLAATLRDGAAAIGPVDARLVIIAGHDGTLASLGGLLRMEWTLPGYQPNQIQPGGALVFERWRRDDGVRVVRVRFTGQSLSQLRNMTALDAKTPPLSAPVFVQGCGTATPAFDCRLEDFETVVRGATRADG

SEQ ID NO: 36817 - DNA, 1332 bp, Xanthomonas campestris pv. campestris str. ATCC 33913
  CDS (1)..(1332): transl_table=11
atgtgttctgatcccgctgcagtggtggttgcagagttgaagtcactgcagacgttcgcgcgcaggccagcgcggccgcgggcagctgcagctcctctgcgctggcaaacgctcggcgtgctgctggtggccgcgctgtcgctgggctgtacgccacggccgaccccggcggcgtcagctgccagcgcgaccctggaacgggtggtggtggtgttccggcacggcgtacgtgcgccgctgcaaggggaagcggccgcggcgcattacgccgacgcaccctggccgcaatggtccacgccagcgagcctggtcaccccgcatggccgcaaggcggtgcagctgagtggcgagtatctgcggcagtggttgatgcaacaggcgctgctgccccgcaatggctgcccggcgcggggcagcctgacagtctgggccaataccgaccaacgcaccatcgacagtggcgcgttgctggccgacgccctggcgcctggctgcaacgtgcaggcaggacatcgcgcggtcgggagtaacgatccgttgttccggccgatcgaagccggtgccgtgcctttcgatgcgaacgcagcggttgcagcgatccagcgtgaaaccggcggcccggccgccttgctgcaagggcatggcgcggaattgcaggccttgcagcagatcctgggctgcaccaaaacgccttgtgaattcgcacgcatgccatccactttgaaaccttcggcggacggtcgcggcctggcgctgggcgggccgatcgacctggcctccggcaccggtgaagtactgctgctgcaatacgccgaaggcatgccgctgtcgcaggtcggctgggggcgcgccactcccgagcgcctggcgcaagtttcgcgcctgcacgcgctgctgttcgacatctatgcgcggccgcattacatggcctcgcgctcgggtgcgccgctggcgcgcgaggtgctgcagcgcttcggcgacgcgggcgcgccgaaggtgtctgtcttcgtcggcagcgacacgcatatcgcggcgttgagcagtctgttgggcgtgcattttcatttacccggttatggcgcagacgacccaccgccgggtggcgcgttggtgctgggtttgtggcgcacgcccgacggccaacgcagcgtgcgcgcgcagtacctggcgcaatcgctggagcaattgcgcacagtggcaccgctggatctggaccacccaccgttgcagcagacgttggcgttaggcgtttgcgctggtgagcagcggatggcgtgcccgttgccggcgtttacgcaggcgctggagcggcagctgcagccctcgccgtga

SEQ ID NO: 36818 - protein, 443 aa, Xanthomonas campestris pv. campestris str. ATCC 33913
MCSDPAAVVVAELKSLQTFARRPARPRAAAAPLRWQTLGVLLVAALSLGCTPRPTPAASAASATLERVVVVFRHGVRAPLQGEAAAAHYADAPWPQWSTPASLVTPHGRKAVQLSGEYLRQWLMQQALLPRNGCPARGSLTVWANTDQRTIDSGALLADALAPGCNVQAGHRAVGSNDPLFRPIEAGAVPFDANAAVAAIQRETGGPAALLQGHGAELQALQQILGCTKTPCEFARMPSTLKPSADGRGLALGGPIDLASGTGEVLLLQYAEGMPLSQVGWGRATPERLAQVSRLHALLFDIYARPHYMASRSGAPLAREVLQRFGDAGAPKVSVFVGSDTHIAALSSLLGVHFHLPGYGADDPPPGGALVLGLWRTPDGQRSVRAQYLAQSLEQLRTVAPLDLDHPPLQQTLALGVCAGEQRMACPLPAFTQALERQLQPSP

SEQ ID NO: 36819 - DNA, 1245 bp, Xanthomonas axonopodis pv. citri str. 306
  CDS (1)..(1245): transl_table=11
atgcggcacgcactgctcggtctggcgctctgtctgccgatggcaaaaccggtctgcgcaaaacagaccgccgcgacaaccgcgcacctgcgcctgaccatcgtgctggtgcggcatggcatccgtgcaccgacccagcccggcagcgaactggatcgctacagcgcgcagccatggccgcactggccggtggctgcgggccagctgacgccgcacggacgggcgggcatgcaggcgctgggcgcacgttatcgcctgcgattggcaccgccgctcgggctggcggccagtggctgcgcaggcaccgaacagatcgtcaccatcgccgacagcgctgcccgcaaccacgccagcgcgcaggcgctgctgcagggcatggcgcctggctgcgcaatgcgctaccaggccctgccggaaggcgagcgcaacgccttgttcgatggcggcaaggcgcccgcaccgccggtgcggctggaggctgagacgcgcgcgcagctggcgcacttgcaggcggtgttgagtgcctgccagcacgggcgctgcgccacggcgccgcctacccggctgctctacgagccggctacgcgcgacggctcgccggccgcggccagcaccctgaagctggccggtggactggccgagaacctgatgctggaagacgtcgaaggcttcgatgcggcgcagctgggctggggccgggtggatcgcgccgcggtggcgcaattgcttgccctgcacaacacctcgttcgcacagagcaagcgtccgttgccggttgccacggcggcggcatccaacctgctcgcgcatctgctggccactgtgcaggccgcggtcgggcaaacgccgtcggtggcggcactggcgccgccctccacgcggttgctggtgctggtgggccacgacaccaatctggccacgcttggcgggctgctcggcgtgcagtggcatcgcagcgatcgccccgacgactatccgcccggcggcgcattggtgctggacctgctcgaacgcgacggcgcgcccttgctacgcgtgcggaccctgatgccaagcctgtcggcgttgcgcagcgggcgcctggatgacgaggcgctggcctcgtccacgctggtgttgcccggttgccacggtgaggccttgtgtccattgccggttgcatcggcctggctgcgcacgcgcatcgatccggcccaggtgcaagtggcgctgccggccatgcagtcctggccggtgccaccgtag

SEQ ID NO: 36820 - protein, 414 aa, Xanthomonas axonopodis pv. citri str. 306
MRHALLGLALCLPMAKPVCAKQTAATTAHLRLTIVLVRHGIRAPTQPGSELDRYSAQPWPHWPVAAGQLTPHGRAGMQALGARYRLRLAPPLGLAASGCAGTEQIVTIADSAARNHASAQALLQGMAPGCAMRYQALPEGERNALFDGGKAPAPPVRLEAETRAQLAHLQAVLSACQHGRCATAPPTRLLYEPATRDGSPAAASTLKLAGGLAENLMLEDVEGFDAAQLGWGRVDRAAVAQLLALHNTSFAQSKRPLPVATAAASNLLAHLLATVQAAVGQTPSVAALAPPSTRLLVLVGHDTNLATLGGLLGVQWHRSDRPDDYPPGGALVLDLLERDGAPLLRVRTLMPSLSALRSGRLDDEALASSTLVLPGCHGEALCPLPVASAWLRTRIDPAQVQVALPAMQSWPVPP

SEQ ID NO: 36821 - DNA, 1614 bp, Xanthomonas axonopodis pv. citri str. 306
  CDS (1)..(1614): transl_table=11
atgcgttctgatcccgcacgattcgcatgcgacgacctgccaggcgcgcagcaagatgcagatgtcatgacggacgcgcggcatagcgcaggccgtgcacgcgcctgcggtggaacggggcagtgggcattgcaacgcgcgttgctggccagcggtggggagccgcgatgggccgcccgcgttgtcgcgagcgtaggtgccgcgatggggatcgcggcacctacgcggcaggcaagacgcaggcagtgcgtcggcatcgcaccgaggtctggcgcgccccgtgccacgccggtggcaaccggcagcgtgctgtgcctggtattggcggctgcgttggcgttgggaggctgcaccacgtcgatcccgagcgtgtccacagcgcgcgcatccaccacacacagtggcgatcaatcgaccgtcactgccggcaaacaggtgggcaccggagcgccagcatccgcgcagagcgcgcaactggagcgcgtcgtggtggtgttccggcatggcgtgcgcgcaccgctgcaaggcgaggccgccgccgcgcactatgccgaccaaccctggccgcagtggtccacgcctgccagcctgctcactccgcatggtcgccaaggcgtgcgcttgagtggcgagtacctgcgccagtggttggtgcagcaggcgctgttgccgcgcagtgggtgtccggcaaccggcagcatgtcggtgtgggccaataccgatcaacgcaccatcgagagtggcgccctgctggccgacgcgctcgcacctggctgcggcatcgtcgccgggcatcgggaggctggcagcaacgacccgctgtttcgaccgatcgaagccggcacgttgccgttcgatgcggcggcagcggtcgcatcgatccagcaacagaccggaggccctgccgccctgctgcaaggccacgccgccgagctgcaggcactgcagcagattctgggctgcacgcggacgccctgcgatttcgcgcagatgccttccacgctggcgccgtcggccaacgggcgtgggcttaagttaggcgggcccatcgacctgacctccggcaccggcgaggtgttgctgctgcaatacgcagagggcctgccgcttgcgcaggtcggttggggacgtgcgacgcccgagcgcctggcccaggtctcacgcttgcacgcattgctgttcgacatttacgcacggccgcactacatggcctcgcgttcgggcgcaccgctggcgcgcgaggtcttgcaacgtttcggcgacgcgcaggcgccgaaaatctcggtgttcgttggcagtgacacccatatcgccgcgttgagcagtttgctgggcgtgcactttcatctccccggctacggcgccgacgatccaccgccgggcggcgcgttgctgctggagctatggcgcgaaccgaatgggcagcaagtggtgcgtgcgcagtatcttgcgcaatcgctggatcaactgcggacgctggcgccgctaaatttggagcatcctccgttgcggcagaagttggcgcttggcgtttgcacggcagagcaacgcatggcgtgcccgttgaaggcgttcgcccaggcgttggaggaacagttgcaacgcgagccttga

SEQ ID NO: 36822 - protein, 537 aa, Xanthomonas axonopodis pv. citri str. 306
MRSDPARFACDDLPGAQQDADVMTDARHSAGRARACGGTGQWALQRALLASGGEPRWAARVVASVGAAMGIAAPTRQARRRQCVGIAPRSGAPRATPVATGSVLCLVLAAALALGGCTTSIPSVSTARASTTHSGDQSTVTAGKQVGTGAPASAQSAQLERVVVVFRHGVRAPLQGEAAAAHYADQPWPQWSTPASLLTPHGRQGVRLSGEYLRQWLVQQALLPRSGCPATGSMSVWANTDQRTIESGALLADALAPGCGIVAGHREAGSNDPLFRPIEAGTLPFDAAAAVASIQQQTGGPAALLQGHAAELQALQQILGCTRTPCDFAQMPSTLAPSANGRGLKLGGPIDLTSGTGEVLLLQYAEGLPLAQVGWGRATPERLAQVSRLHALLFDIYARPHYMASRSGAPLAREVLQRFGDAQAPKISVFVGSDTHIAALSSLLGVHFHLPGYGADDPPPGGALLLELWREPNGQQVVRAQYLAQSLDQLRTLAPLNLEHPPLRQKLALGVCTAEQRMACPLKAFAQALEEQLQREP

SEQ ID NO: 36823 - DNA, 1251 bp, Xanthomonas axonopodis pv. citri str. 306
  CDS (1)..(1251): transl_table=11
gtgccgctcacccctgcccaggccaccgatgcgacgccggacaccctggaaaaagtggtgatcctcaaacgccacggcgtgcgtgcggcgatgtccagccccgaacggctgggccgctattcgctgcatccatggccgcatttcggcgtgccggccggtcacctcaccgccaacggcgcgcagctggaacgcctgttcggcgactactaccgcgcgcactacaccgcgcttggtctgttgaacggcgatggctgcaaccaggcctattactgggccaaccgcacccaacgcaccattgcctcggcgcaagcgctggccagcacactgacgcccggctgcgccgacccggtgcatcacgtaccgaccggcagttccgatgtgttgttcgatggcaccgctgcgctgcgccagccccaggcgcgtgcgcgcatgcaggcggccattgccggccgcatcggtggcgatgcgcaggcttggaatgcgacccagagcgatgcgctcgatacgctcgaacacctgctgctgcaatgcgcgcaacggccgtgtcccgcgcaggccgcgcccggcaagctgcgcctgaccacggtaccggccgggctggacgatgccgggccgtcgattcccggtctcgatggccccgccgcggctgcctcgggcatcaccgaaagcctgctgatgggctgggccgatggacaggacttcgccgcgctgggttggcaaggcctggacgaagccacgctgctgcgcgtgttcgccccgcaccaggccgagttcgcgctgcggttgcgcgcgccgaccgtcgctcgcctggccagcaccccgctggccgcacgcctgctggccacgctgcagcaaggcaacgatgcacacgccgaggccgatgccatcggcggcgatgcgcgcctggtggtggtgtccggccatgacggcaccctgaccttgctggccggcatgttcgatctgcactggcagttgcccggctatcaatccgaccagaccgtccccggtggcgcgctggtgttcgaacgctggcggcgtgccgacggtgagcgcgtcattcgcctgcgctacaccgcgcagagcctgacgcagctgcgcgaacgggtgccattgacgctgcaggcaccaccgccgagcgcagccatcttcattcccggctgcagcaccgccacgccggcgtacgactgcccgctgccgcagttcgcccgcatcgtccaggccgcactcgatccgctcgccttggaccactga

SEQ ID NO: 36824 - protein, 416 aa, Xanthomonas axonopodis pv. citri str. 306
MPLTPAQATDATPDTLEKVVILKRHGVRAAMSSPERLGRYSLHPWPHFGVPAGHLTANGAQLERLFGDYYRAHYTALGLLNGDGCNQAYYWANRTQRTIASAQALASTLTPGCADPVHHVPTGSSDVLFDGTAALRQPQARARMQAAIAGRIGGDAQAWNATQSDALDTLEHLLLQCAQRPCPAQAAPGKLRLTTVPAGLDDAGPSIPGLDGPAAAASGITESLLMGWADGQDFAALGWQGLDEATLLRVFAPHQAEFALRLRAPTVARLASTPLAARLLATLQQGNDAHAEADAIGGDARLVVVSGHDGTLTLLAGMFDLHWQLPGYQSDQTVPGGALVFERWRRADGERVIRLRYTAQSLTQLRERVPLTLQAPPPSAAIFIPGCSTATPAYDCPLPQFARIVQAALDPLALDH

SEQ ID NO: 36825 - DNA, 1326 bp, Yersinia pestis KIM
  CDS (1)..(1326): transl_table=11
atgtcagtattagaaaatcgtgtacggctatctgggctggtattgatgctaagcggattggctgctattactgcgccggtagccgccgagccatcgggctatactttagaacgtgtggttattttgagtcgccatggtgttcgctcgccgaccaaacaaacgcagcttatgaatgatgttacgccagataagtggccacaatggccggtaaaagcggggtatttaacgccacgtggtgcggagttggtcacattgatgggggggttttatggtgattactttcgcagccttggtttgttagcggcgggatgtccggcagaggggggggtatatgcacaggcagatatcgatcaacgtacccgcttaaccggacaggcatttcttgatggtgtggctccggggtgtggtttgaccgtgcataatcaggccgatttgaaaaagaccgatcccctgttccatccggtagaggctggcgtgtgtaagttagacgccgcacaaacagataaagcgattgaagaacagttgggcgggccgttagatacggtgagccagcgctacgctaaaccttttgcccagatgggggacgtgctgaattttgcggcttctccttattgcaaatctttgcaacagcaaggaaaaacgtgtgattttgcccactttgcggccaatgaagttaacgttaataaagaagggacaaaagtgaccctcagtgggccactggcgttatcatcgacattgggtgaaatcttcttattacaaaacgcacaagccatgccagaggttgcctggcaacggctaaaaggggcggagaattgggtatccttattgtcattacataacgcgcaatttaatttaatggcaaaaacaccgtatatcgcccgtcataaagggacgccattattacagcagatagatacggctttaacccttcaactggatgctcaggggcaaaagctacccatttcagcccaaaaccgggtcttgttcctcggtgggcatgataccaatattgccaatattgcgggtatgctgggagccgactggcagctacccgagcaacctgataatactccaccaggtgggggattggtttttgaactatggcaaaatccggataaccaccagcgctacgttgcggtgaagatgttctaccaaacgatggatcagttgcgtaatgccgaaaaattggatctgaaaaataacccagcgggtattatttccgttgcagttgctggttgtgaaaataacggtgacgataagctttgcgagcttgatacattccaaaagaaagtggctaaggtaattgaacctgcctgccacatctaa

SEQ ID NO: 36826 - protein, 441 aa, Yersinia pestis KIM
MSVLENRVRLSGLVLMLSGLAAITAPVAAEPSGYTLERVVILSRHGVRSPTKQTQLMNDVTPDKWPQWPVKAGYLTPRGAELVTLMGGFYGDYFRSLGLLAAGCPAEGGVYAQADIDQRTRLTGQAFLDGVAPGCGLTVHNQADLKKTDPLFHPVEAGVCKLDAAQTDKAIEEQLGGPLDTVSQRYAKPFAQMGDVLNFAASPYCKSLQQQGKTCDFAHFAANEVNVNKEGTKVTLSGPLALSSTLGEIFLLQNAQAMPEVAWQRLKGAENWVSLLSLHNAQFNLMAKTPYIARHKGTPLLQQIDTALTLQLDAQGQKLPISAQNRVLFLGGHDTNIANIAGMLGADWQLPEQPDNTPPGGGLVFELWQNPDNHQRYVAVKMFYQTMDQLRNAEKLDLKNNPAGIISVAVAGCENNGDDKLCELDTFQKKVAKVIEPACHI

SEQ ID NO: 36827 - DNA, 1299 bp, Shigella flexneri 2a str. 301
  CDS (1)..(1299): transl_table=11
atgaaagcgatcttaatcccatttttatctcttctgattccgttaaccccgcaatctgcattcgctcagagtgagccggagctgaagctggaaagtatggtgattgtcagtcgtcatggtgtgcgtgctccaaccaaggccacgcaactgatgcaggatgtcaccccagacgcatggccaacctggccggtaaaactgggttggctgacaccgcgcggtggtgagctaatcgcctatctcggacattaccaacgccagcgtctggtagccgacggattgctggcgaaaaagggctgcccgcagtctgctcaggtcgcgattattgctgatgtcgacgagcgtacccgtaaaacaggcgaagccttcgccgccgggctggcacctgactgtgcaataaccgtacatacccaggcagatacgtccagtcccgatccgttatttaatcctctaaaaactggtgtttgccaactggataacgcgaacgtgactgacgcgatcctctgcagggcaggagggtcaattgctgactttaccgggcatcggcaaacggtgtttcgcgaactggaacgggtgcttaatttcccgcaatcaaacttgtgccttaaccgtgagaaacaggacgaaagctgttcattaacgcaggcattaccatcggaactcaaggtgagcgccgacaatgtctcattaaccggtgcggtaagcctcgcatcaatgctgacggagatatttctcctgcaacaggcacaaggaatgccggagccggggtggggaaggatcaccgattcacaccagtggaacaccttgctaagtttgcataacgcgcaattttatttactacaacgcacgccggaggttgcccgcagtcgcgccaccccgttattggatttgatcatggcagcgttgacgccccatccaccgcaaaaacaggcgtatggtgtgacattacccacttcagtgctgtttattgccggacacgatactaatctggcaaatctcggcggcgcactggagctcaactggacgcttccaggtcagccggataacacgccgccaggtggtgaactggtgtttgaacgctggcgtcggctaagcgataacagccagtggattcaggtttcgctggtcttccagactttacagcagatgcgtgataaaacgccgctgtcattaaatacgccgcccggagaggtgaaactgaccctggcaggatgtgaagagcgaaatgcgcagggcatgtgttcgttggcaggttttacgcaaatcgtgaatgaagcacgcataccggcgtgcagtttgtaa

SEQ ID NO: 36828 - protein, 432 aa, Shigella flexneri 2a str. 301
MKAILIPFLSLLIPLTPQSAFAQSEPELKLESMVIVSRHGVRAPTKATQLMQDVTPDAWPTWPVKLGWLTPRGGELIAYLGHYQRQRLVADGLLAKKGCPQSAQVAIIADVDERTRKTGEAFAAGLAPDCAITVHTQADTSSPDPLFNPLKTGVCQLDNANVTDAILCRAGGSIADFTGHRQTVFRELERVLNFPQSNLCLNREKQDESCSLTQALPSELKVSADNVSLTGAVSLASMLTEIFLLQQAQGMPEPGWGRITDSHQWNTLLSLHNAQFYLLQRTPEVARSRATPLLDLIMAALTPHPPQKQAYGVTLPTSVLFIAGHDTNLANLGGALELNWTLPGQPDNTPPGGELVFERWRRLSDNSQWIQVSLVFQTLQQMRDKTPLSLNTPPGEVKLTLAGCEERNAQGMCSLAGFTQIVNEARIPACSL

SEQ ID NO: 36829 - DNA, 1242 bp, Shigella flexneri 2a str. 301
  CDS (1)..(1242): transl_table=11
atgaacaaaacgctaatcgccgcaactgtggcagggatagttttactcgcttcaaatgctcaggcacaaaccgtaccggaaggctatcagctacagcaagtgctcatgatgagccgccataacttacgtgcgccgctggcgaacaatggcagtgtgctggagcagtcgacgccgaataaatggcccgaatgggacgtccccggtgggcaactcaccaccaaaggtggcgtgctcgaagtgtatatgggccattacatgcgtgaatggctggcagagcaggggatagtgaaatcgggggaatgcccgccgccggacaccgtttatgcctatgccaatagtctgcaacgtaccgtcgctaccgcccagttctttattactggtgcattccctgggtgtgatattcctgtgcatcaccaggaaaaaatgggcactatggacccaacctttaacccgatgatcaccgatgattccgccgcattcagtgaacaggcggtggcggcaatggagaaagagctcagcaaactccagcttaccgacagctaccagctactggaaaaaatcgttaactataaagattcccctgcctgtaaagagaaacaacagtgttcgctggtggatggcaaaaatacctttagcgccaagtatcaacaagaaccaggtgtttccgggccgctgaaagtcggcaactcgctggtagatgcgtttactttgcaatactacgaaggttttccgatggatcaggtggcctggggagaaatcaaatctgaccagcagtggaaggtattgtcgaagctgaaaaacggttaccaggacagtctgtttacctcaccggaagtggcgcgcaatgttgcgaaaccgctggtcagttatatcgacaaagccctggtcaccgatcgcgccagtgctccgaaaatcacggtgttagttgggcacgactccaacatagcctctctgttaacggcgctggatttcaaaccgtatcagttgcatgaccagaacgaacgcacgccgattggcggcaaaatcgttttccagcgttggcatgacagcaaagccaatcgcgatttgatgaaaattgaatatgtgtaccagagtgcggaacagttacgtaatgccgatgcgttaaccctgcaggcacctgcgcagcgcgtgacgctggaattaagcggttgcccgatagatgccaacggtttctgcccgatggataagtttgatagcgtgttgaatgaggcggtgaaataa

SEQ ID NO: 36830 - protein, 413 aa, Shigella flexneri 2a str. 301
MNKTLIAATVAGIVLLASNAQAQTVPEGYQLQQVLMMSRHNLRAPLANNGSVLEQSTPNKWPEWDVPGGQLTTKGGVLEVYMGHYMREWLAEQGIVKSGECPPPDTVYAYANSLQRTVATAQFFITGAFPGCDIPVHHQEKMGTMDPTFNPMITDDSAAFSEQAVAAMEKELSKLQLTDSYQLLEKIVNYKDSPACKEKQQCSLVDGKNTFSAKYQQEPGVSGPLKVGNSLVDAFTLQYYEGFPMDQVAWGEIKSDQQWKVLSKLKNGYQDSLFTSPEVARNVAKPLVSYIDKALVTDRASAPKITVLVGHDSNIASLLTALDFKPYQLHDQNERTPIGGKIVFQRWHDSKANRDLMKIEYVYQSAEQLRNADALTLQAPAQRVTLELSGCPIDANGFCPMDKFDSVLNEAVK

SEQ ID NO: 36831 - DNA, 1341 bp, Escherichia coli CFT073
  CDS (1)..(1341): transl_table=11
atgtcggatatgaaaagcggaaacatatcgatgaaagcgatcttgatcccattcttatctcttctgattccgttaacaccgaaatctgcattcgctcagagtgagccggagctgaagctggaaagtgtggtgattgtcagtcgtcacggtgtgcgtgcaccaaccaaggccacgcaactgatgcaggatgtcaccccagacgcatggccaacctggccggtaaaactgggttggctgacaccgcgcggtggtgagttaatcgcttatctcggacattaccaacgccagcgtctggtagccgacggattgttgacgaaaaagggctgcccgcagcctggtcaggtcgcgattatttctgatgtcgacgagcgtacccgtaaaacaggcgaagccttcgccgccgggctggcacctgactgtgcaataaccgtacatacccaggcagatacctccagtcccgatccgttatttaatcctctaaaaactggcgtttgccaactggataacgcgaacgtgactgacgcgatcctcagcagggcaggagggtcaattgctgactttaccgggcatcggcaaacggcgtttcgtgaactggaacgggtgcttaatttcccgcaatcaaacttgtgccttaaccgtgagaaacaggacgaaagctgttcattaacgcaggcattaccatcggaactcaaggtgagcgccgacaatgtctcattaaccggtgcggtaagcctcgcatcaatgctgacggagatatttctcctgcaacaagcacagggaatgccggagccggggtggggaaggatcaccgattcacaccagtggaacaccttgctaagtctacataacgcgcagttttatttgctgcaacgcacaccagaggttgcccgcagtcgcgccaccccgttattggatttgatcatggcagcgttgacgccccatccatcgcaaaaacaggcgtatggtgtgacattacccacttcagtgctgtttattgccggacacgatactaatctggcaaatctcggcggcgcactggagctcaactggacacttccaggtcagccggataacacgccgccaggtggtgaactggtgtttgaacgctggcgtcggctcagcgataacagccagtggattcaggtttcgctggtcttccagactttacagcagatgcgtgataaaacgccgctgtcattaaatacgccgcccggagaggtgaaactgaccctggcaggatgtgaagagcgaaatgcgcagggcatgtgttcgttggcaggttttacgcaaatcgtgaatgaagcacgcataccggcgtgcgctctccatcaagataaataa

SEQ ID NO: 36832 - protein, 446 aa, Escherichia coli CFT073
MSDMKSGNISMKAILIPFLSLLIPLTPKSAFAQSEPELKLESVVIVSRHGVRAPTKATQLMQDVTPDAWPTWPVKLGWLTPRGGELIAYLGHYQRQRLVADGLLTKKGCPQPGQVAIISDVDERTRKTGEAFAAGLAPDCAITVHTQADTSSPDPLFNPLKTGVCQLDNANVTDAILSRAGGSIADFTGHRQTAFRELERVLNFPQSNLCLNREKQDESCSLTQALPSELKVSADNVSLTGAVSLASMLTEIFLLQQAQGMPEPGWGRITDSHQWNTLLSLHNAQFYLLQRTPEVARSRATPLLDLIMAALTPHPSQKQAYGVTLPTSVLFIAGHDTNLANLGGALELNWTLPGQPDNTPPGGELVFERWRRLSDNSQWIQVSLVFQTLQQMRDKTPLSLNTPPGEVKLTLAGCEERNAQGMCSLAGFTQIVNEARIPACALHQDK

SEQ ID NO: 36833 - DNA, 1242 bp, Salmonella enterica subsp. enterica serovar Typhi Ty2
  CDS (1)..(1242): transl_table=11
atgaaaaaatcattactcgctgttgctgtggcaggggctgttttgttgtcatccgccgtacaggcgcagacaacgccggaaggttatcaattacaacaggtgctgatgatgagccgccataatctgcgggcgccgctggcgaataatggcaacgtactggcgcagtcgacgccgaacgcctggccggcgtgggacgttcccggcgggcaactgacgacgaaaggcggcgtgctggaagtctatatgggacactacacacgtgaatggctggtcgcgcaggggctgataccgtcgggagaatgtccggcgcccgacacggtatatgcctatgcgaatagtttgcagcgcaccgtcgccaccgcgcaatttttcattaccagcgctttccccggctgtgatattcctgttcatcatcaggaaaaaatgggcactatggaccctaccttcaatccggtgattaccgatgattccgccgcgttccggcaacaggccgtacaggcgatggaaaaggcgcgtagtcagctacatcttgatgagagttataaactgcttgagcagataacgcattatcaggactcgccgtcctgcaaagagaagcatcagtgttcgctaatcgacgcgaaagataccttcagcgcgaactatcagcaagagcctggcgtgcaggggccgctgaaagtagggaactcgctggtggatgcgtttaccctgcaatattacgaaggctttccgatggatcaggtcgcttggggcgggatccacaccgatcggcagtggaaggtgctgtcaaaactgaaaaacggctaccaggacagcctgtttacctcacccacggtggcgcgcaatgtcgctgcgccgctggtaaaatatatcgataaggtgctggttgccgagcgcgttagcgcgccgaaggttaccgtgctggtggggcatgattccaatatcgcgtcgctgctgacggcgctggattttaaaccctatcagctccatgaccagtatgagagaacgccgattggtggtcagcttgtcttccaacgctggcatgacggtaacgctaaccgggatttgatgaaaatcgagtatgtctaccagagcgcccggcagttacgtaatgcggaagcgttaacgctcaaatcgcctgcgcaaagggtaacgctggaactgaaaggatgtccggtggatgcgaacggcttctgtccgctggataagttcgataacgtcatgaacactgctgcaaaatag

SEQ ID NO: 36834 - protein, 413 aa, Salmonella enterica subsp. enterica serovar Typhi Ty2
MKKSLLAVAVAGAVLLSSAVQAQTTPEGYQLQQVLMMSRHNLRAPLANNGNVLAQSTPNAWPAWDVPGGQLTTKGGVLEVYMGHYTREWLVAQGLIPSGECPAPDTVYAYANSLQRTVATAQFFITSAFPGCDIPVHHQEKMGTMDPTFNPVITDDSAAFRQQAVQAMEKARSQLHLDESYKLLEQITHYQDSPSCKEKHQCSLIDAKDTFSANYQQEPGVQGPLKVGNSLVDAFTLQYYEGFPMDQVAWGGIHTDRQWKVLSKLKNGYQDSLFTSPTVARNVAAPLVKYIDKVLVAERVSAPKVTVLVGHDSNIASLLTALDFKPYQLHDQYERTPIGGQLVFQRWHDGNANRDLMKIEYVYQSARQLRNAEALTLKSPAQRVTLELKGCPVDANGFCPLDKFDNVMNTAAK

SEQ ID NO: 36835 - DNA, 1299 bp, Shigella flexneri 2a str. 2457T
  CDS (1)..(1299): transl_table=11
atgaaagcgatcttaatcccatttttatctcttctgattccgttaaccccgcaatctgcattcgctcagagtgagccggagctgaagctggaaagtatggtgattgtcagtcgtcatggtgtgcgtgctccaaccaaggccacgcaactgatgcaggatgtcaccccagacgcatggccaacctggccggtaaaactgggttggctgacaccgcgcggtggtgagctaatcgcctatctcggacattaccaacgccagcgtctggtagccgacggattgctggcgaaaaagggctgcccgcagtctgctcaggtcgcgattattgctgatgtcgacgagcgtacccgtaaaacaggcgaagccttcaccgccgggctggcacctgactgtgcaataaccgtacatacccaggcagatacgtccagtcccgatccgttatttaatcctctaaaaactggtgtttgccaactggataacgcgaacgtgactgacgcgatcctctgcagggcaggagggtcaattgctgactttaccgggcatcggcaaacggtgtttcgcgaactggaacgggtgcttaatttcccgcaatcaaacttgtgccttaaccgtgagaaacaggacgaaagctgttcattaacgcaggcattaccatcggaactcaaggtgagcgccgacaatgtctcattaaccggtgcggtaagcctcgcatcaatgctgacggagatatttctcctgcaacaggcacaaggaatgccggagccggggtggggaaggatcaccgattcacaccagtggaacaccttgctaagtttgcataacgcgcaattttatttactacaacgcacgccggaggttgcccgcagtcgcgccaccccgttattggatttgatcatggcagcgttgacgccccatccaccgcaaaaacaggcgtatggtgtgacattacccacttcagtgctgtttattgccggacacgatactaatctggcaaatctcggcggcgcactggagctcaactggacgcttccaggtcagccggataacacgccgccaggtggtgaactggtgtttgaacgctggcgtcggctaagcgataacagccagtggattcaggtttcgctggtcttccagactttacagcagatgcgtgataaaacgccgctgtcattaaatacgccgcccggagaggtgaaactgaccctggcaggatgtgaagagcgaaatgcgcagggcatgtgttcgttggcaggttttacgcaaatcgtgaatgaagcacgcataccggcgtgcagtttgtaa

SEQ ID NO: 36836 - protein, 432 aa, Shigella flexneri 2a str. 2457T
MKAILIPFLSLLIPLTPQSAFAQSEPELKLESMVIVSRHGVRAPTKATQLMQDVTPDAWPTWPVKLGWLTPRGGELIAYLGHYQRQRLVADGLLAKKGCPQSAQVAIIADVDERTRKTGEAFTAGLAPDCAITVHTQADTSSPDPLFNPLKTGVCQLDNANVTDAILCRAGGSIADFTGHRQTVFRELERVLNFPQSNLCLNREKQDESCSLTQALPSELKVSADNVSLTGAVSLASMLTEIFLLQQAQGMPEPGWGRITDSHQWNTLLSLHNAQFYLLQRTPEVARSRATPLLDLIMAALTPHPPQKQAYGVTLPTSVLFIAGHDTNLANLGGALELNWTLPGQPDNTPPGGELVFERWRRLSDNSQWIQVSLVFQTLQQMRDKTPLSLNTPPGEVKLTLAGCEERNAQGMCSLAGFTQIVNEARIPACSL

SEQ ID NO: 36837 - DNA, 1308 bp, Erwinia carotovora subsp. atroseptica SCRI1043
  CDS (1)..(1308): transl_table=11
atgcttttccacacgacattacgcatgccccgtaccttattgattaccatgatcattatttcaacattcgctgctcaggcacgagcccaggatcgctacctgatggaaaaggtggttgaagttagccgtcatggcgttcgtcccccgacagaatccaacacaaccgcactggagtccggcacggcacgacaatggccgcagtgggtcacgcgagagggtgaattaaccggacatggctatgccgccaccgtgataaaaggacactatgagggcgagtattatcgccaacagcatctgttcgcttcaggttgcccagcggaacagcagatttatgtacttgccagcccgttacagcgcacccgcgcaaccgcgcaagcttatatggacggcatgtttcccggctgcggcgttactacacatgccgttgaggatgaaaagcaagatccgctgttccacggcgataaaatggggattggcacgcttgatcctgaacaggcaaaagctgctgtactgaaagccatgggaggcgatctggatctcgcttatcaacgtctgaagcccagtattgagcagctaaaacagatcgtatgtggagaagataaaccctgtccggtgtttgataaaccgtgggcgctcaaacaggataaagacggttcgacttctatcagcggcctgaatacgctggcgaatatgagtgaagttttcctgctggagtacagcgaaaatttgccactggcacaggttgcttttggtcacgtccgcagcgcacaggatcttattcccctgatggctccgatgaccgccaaatacgacttcaccaatgatgttccctacattgcacagcgtggcggttcactattgatgcagcaaatcgcacaggcactcgcgcaagggacgcaagcagagcaggacaccacacaaggcgagccgccgacagccccttacttgctgtatgtcgcgcatgacaccaacattgcctacctgcgcacgctgttgcagtttcactggcaactacccggcgataccgccgataacatcccacccgcaggcagtctggtctttgagcgctggcgcgataccacgactcagcagcgttttttgcgtatttatttccagacacagtcgctggatcagattcgttcgctgacgccgctgggcgagcaacagccgttgctgaaagaggaatttacgtctcagagctgtcagcagacagaaaaaggcacgctgtgtccttttgatacgacgctggaatccatgcggaaaagtatcgatagcagtgcgctggcaacggtacattacgcgccgtag

SEQ ID NO: 36838 - protein, 435 aa, Erwinia carotovora subsp. atroseptica SCRI1043
MLFHTTLRMPRTLLITMIIISTFAAQARAQDRYLMEKVVEVSRHGVRPPTESNTTALESGTARQWPQWVTREGELTGHGYAATVIKGHYEGEYYRQQHLFASGCPAEQQIYVLASPLQRTRATAQAYMDGMFPGCGVTTHAVEDEKQDPLFHGDKMGIGTLDPEQAKAAVLKAMGGDLDLAYQRLKPSIEQLKQIVCGEDKPCPVFDKPWALKQDKDGSTSISGLNTLANMSEVFLLEYSENLPLAQVAFGHVRSAQDLIPLMAPMTAKYDFTNDVPYIAQRGGSLLMQQIAQALAQGTQAEQDTTQGEPPTAPYLLYVAHDTNIAYLRTLLQFHWQLPGDTADNIPPAGSLVFERWRDTTTQQRFLRIYFQTQSLDQIRSLTPLGEQQPLLKEEFTSQSCQQTEKGTLCPFDTTLESMRKSIDSSALATVHYAP

SEQ ID NO: 36839 - DNA, 1326 bp, Yersinia pseudotuberculosis IP 32953
  CDS (1)..(1326): transl_table=11
atgtcagtattagaaaatcgtgtacggctatctgggctggtattgatgctaagcggattggctgctattactgcgccggtagccgccgagccatcgggctatactttagaacgtgtggttattttgagtcgccatggtgttcgctcgccgaccaaacaaacgcagcttatgaatgatgttacgccagataagtggccacaatggccggtaaaagcggggtatttaacgccacgtggtgcggagttggtcacattgatgggggggttttatggtgattactttcgcagccttggtttgttagcggcgggatgtccggcagagggggtggtatatgcacaggcagatatcgatcaacgtacccgcttaaccggacaggcatttcttgatggtgtggctccggggtgtggtttgaccgtgcataatcaggccgatttgaaaaagaccgatcccctgttccatccggtagaggctggcgtgtgtaagttagacgccgcacaaacagataaagcgattgaagaacagttgggcgggccgttagatacggtgagccagcgctacgctaaaccttttgcccagatgggggacgtgctgaattttgcggcttctccttattgcaaatctttgcaacagcaaggaaaaacgtgtgattttgcccactttgcggccaatgaagttaacgttaataaagaagggacaaaagtgaccctcagtgggccactggcgttatcatcgacattgggtgaaatcttcttattacaaaacgcacaagccatgccagaggttgcctggcaacggctaaaaggggcggagaattgggtatccttattgtcattacataacgcgcaatttaatttaatggcaaaaacaccgtatatcgcccgtcataaagggacgccattattacagcagatagatacggctttaacccttcaactggatgctcaggggcaaaagctacccatttcagcccaaaaccgggtcttgttcctcggtgggcatgataccaatattgccaatattgcgggtatgctgggagccgactggcagctacccgagcaacctgataatactccaccaggtgggggattggtttttgaactatggcaaaatccggataaccaccagcgctacgttgcggtgaagatgttctaccaaacgatggatcagttgcgtaatgccgaaaaattggatctgaaaaataacccagcgggtattatttccgttgcagttgctggttgtgaaaataacggtgacgataagctttgcgagcttgatacattccaaaagaaagtggctaaggtaattgaacctgcctgccacatctaa

SEQ ID NO: 36840 - protein, 441 aa, Yersinia pseudotuberculosis IP 32953
MSVLENRVRLSGLVLMLSGLAAITAPVAAEPSGYTLERVVILSRHGVRSPTKQTQLMNDVTPDKWPQWPVKAGYLTPRGAELVTLMGGFYGDYFRSLGLLAAGCPAEGVVYAQADIDQRTRLTGQAFLDGVAPGCGLTVHNQADLKKTDPLFHPVEAGVCKLDAAQTDKAIEEQLGGPLDTVSQRYAKPFAQMGDVLNFAASPYCKSLQQQGKTCDFAHFAANEVNVNKEGTKVTLSGPLALSSTLGEIFLLQNAQAMPEVAWQRLKGAENWVSLLSLHNAQFNLMAKTPYIARHKGTPLLQQIDTALTLQLDAQGQKLPISAQNRVLFLGGHDTNIANIAGMLGADWQLPEQPDNTPPGGGLVFELWQNPDNHQRYVAVKMFYQTMDQLRNAEKLDLKNNPAGIISVAVAGCENNGDDKLCELDTFQKKVAKVIEPACHI

SEQ ID NO: 36841 - DNA, 1284 bp, Pseudomonas syringae pv. syringae B728a
  CDS (1)..(1284): transl_table=11
atgacttctaggcccgtgatgatgaaatcgactttgttgaagtatgcggggttggcgctgggcgtgtgcctggcgcttccatcggtggccgcgcctctggacaccaccggcctgcgcctggacaaggtggtactggtgatgcgccacggtatccgcccggctaccgacaccgccaagttgcaacgctggtcggccaggacctggccagcgtttggtgcccgcgacggtcagttgaccgagcatggccgcgctgccaccgtgctgctgggccaatggcaacgccacacgctggattcgctcgggctgttcaagacggggcagtgcccgcaggcgggggatgcctacgtgtggtccagcccggtagcgcgaacccaggccaccggtgcggcgctggtaaaggggatgttcccgggctgcaacatagcagtacaccatgggcgtgagagtgaagaccggctgttccacggcggcgaaaatggcctggcaccgctggacccggcgcgcacccaggcggcgatgctggcagccatgggtggcagcgtcgacgcagctcgcgagcgctttgccgcgccgttgctggccatgcagcaattggcaggcgtgccgacgaactgcgggaaaaagacctgtgccttgagcaagcaaccctgggcgctgaaagagaaggcaggcgtcaccaagctcagcggaccgttgagcgtgggcgcggccatgagcgaaaccttccgcatgcaatacgccgaaggcttgccactggaccaggtggcgtttggcgaagggcgcaccgctgcagacgtatcgcgcttgatggccttgcgttcgggcaaatacgcgctgagcaatcacgtaccttacatcgcccagcggggtgcttcgcaattgctcggacaaatcctcctggctctgcaaccgacatccgtgggcagcccgccgggtagcaaatggttggcgtacgtaggccacgacagcaacatcgcgcagttgcgaacgctgctgggttttgactggaaaatcgccgaataccccgagaatgacgcagcaccaggcggcaccatcgtgtttgaacgctgggcgaacgaccgcacgggcgcgcagtttgtcagcgttgcctatgtggcgcagagcctggaccagttacgcaatttgtccggtgaaccgccgtatcaggtgcagtacccggggtatgcaggagagcaattgatgccattgaacgggtttgttgccgatatggaaaagcgcatcgatcggtctgcgactgaggtacagcactacgacaacccttga

SEQ ID NO: 36842 - protein, 427 aa, Pseudomonas syringae pv. syringae B728a
MTSRPVMMKSTLLKYAGLALGVCLALPSVAAPLDTTGLRLDKVVLVMRHGIRPATDTAKLQRWSARTWPAFGARDGQLTEHGRAATVLLGQWQRHTLDSLGLFKTGQCPQAGDAYVWSSPVARTQATGAALVKGMFPGCNIAVHHGRESEDRLFHGGENGLAPLDPARTQAAMLAAMGGSVDAARERFAAPLLAMQQLAGVPTNCGKKTCALSKQPWALKEKAGVTKLSGPLSVGAAMSETFRMQYAEGLPLDQVAFGEGRTAADVSRLMALRSGKYALSNHVPYIAQRGASQLLGQILLALQPTSVGSPPGSKWLAYVGHDSNIAQLRTLLGFDWKIAEYPENDAAPGGTIVFERWANDRTGAQFVSVAYVAQSLDQLRNLSGEPPYQVQYPGYAGEQLMPLNGFVADMEKRIDRSATEVQHYDNP

SEQ ID NO: 36843 - DNA, 1329 bp, Escherichia coli B
  CDS (1)..(1329): transl_table=11
atgtcagatatgaaaagcggaaacatatcgatgaaagcgatcttaatcccatttttatctcttctgattccgttaaccccgcaatctgcattcgctcagagtgagccggagctgaagctggaaagtgtggtgattgtcagtcgtcatggtgtgcgtgctccaaccaaggccacgcaactgatgcaggatgtcaccccagacgcatggccaacctggccggtaaaactgggttggctgacaccgcgcggtggtgagctaatcgcctatctcggacattaccaacgccagcgtctggtagccgacggattgctggcgaaaaagggctgcccgcagtctggtcaggtcgcgattattgctgatgtcgacgagcgtacccgtaaaacaggcgaagccttcgccgccgggctggcacctgactgtgcaataaccgtacatacccaggcagatacgtccagtcccgatccgttatttaatcctctaaaaactggcgtttgccaactggataactcgaacgtgactgacgcgatcctcagcagggcaggagggtcaattgctgactttaccgggcatcggcaaacggcgtttcgcgaactggaacgggtgcttaattttccgcaatcaaacttgtgccttaaacgtgagaaacaggacgaaagctgttcattaacgcaggcattaccatcggaactcaaggtgagcgccgacaatgtctcattaaccggtgcggtaagcctcgcatcaatgctgacggagatatttctcctgcaacaagcacagggaatgccggagccggggtggggaaggatcaccgattcacaccagtggaacaccttgctaagtttgcataacgcgcaattttatttgctacaacgcacgccagaggttgcccgcagccgcgccaccccgttattagatttgatcaagacagcgttgacgccccatccaccgcaaaaacaggcgtatggtgtgacattacccacttcagtgctgtttatcgccggacacgatactaatctggcaaatctcggcggcgcactggagctcaactggacgcttcccggtcagccggataacacgccgccaggtggtgaactggtgtttgaacgctggcgtcggctaagcgataacagccagtggattcaggtttcgctggtcttccagactttacagcagatgcgtgataaaacgccgctgtcattaaatacgccgcccggagaggtgaaactgaccctggcaggatgtgaagagcgaaatgcgcagggcatgtgttcgttggcaggttttacgcaaatcgtgaatgaagcacgcataccggcgtgcagtttgtaa

SEQ ID NO: 36844 - protein, 442 aa, Escherichia coli B
MSDMKSGNISMKAILIPFLSLLIPLTPQSAFAQSEPELKLESVVIVSRHGVRAPTKATQLMQDVTPDAWPTWPVKLGWLTPRGGELIAYLGHYQRQRLVADGLLAKKGCPQSGQVAIIADVDERTRKTGEAFAAGLAPDCAITVHTQADTSSPDPLFNPLKTGVCQLDNSNVTDAILSRAGGSIADFTGHRQTAFRELERVLNFPQSNLCLKREKQDESCSLTQALPSELKVSADNVSLTGAVSLASMLTEIFLLQQAQGMPEPGWGRITDSHQWNTLLSLHNAQFYLLQRTPEVARSRATPLLDLIKTALTPHPPQKQAYGVTLPTSVLFIAGHDTNLANLGGALELNWTLPGQPDNTPPGGELVFERWRRLSDNSQWIQVSLVFQTLQQMRDKTPLSLNTPPGEVKLTLAGCEERNAQGMCSLAGFTQIVNEARIPACSL

SEQ ID NO: 36845 - DNA, 2354 bp, Yersinia intermedia
  CDS (747)..(2072): transl_table=11
tctgcggcggataatatccagatcctggaagacggcatcagcggtaccggtataccagtggttctgtccttgggcgctgtgtgccggtaacaaatcaacaaactcattcatctcttcactgagaaacgaccagccatgctggatatgctgcaccaaagtatgtgattgatactgcgttatcacgccaattcggcgaatacccgagttgaggcagttagagagcgcgaagtcgataatgcggtatttcccgccaaagtgaactgcgggtttcgcccgaacggacgtaagatctttaaggcgtgaaccacggcctcctgcaagaatcagtgctagggctttgtttggcagttgtcttgccgacatgactctgtcaatatcgcctgttttccgcatgtcagactccttatgatttgtatgtatagctaccggattacgggctatattctccaatcctaatgcgccaaatgcttttatgcgctaaatgcttttcggacaatggtcggaatgataaaacgggttttaccctacctcctttcaatataaatatcgctaatgacatcatcggctaattgccgttctaacactgagaaccgaatcaagtttagcgccaattgacatatttttttgctcaatagcaccaattatcactcctattatttattgttttcgcacattgtgaggtcagcgatcgtcgaccatactcgttgaggcaaaaatattcgtagttttaataaggatataaaattatgacaataacagtagatagtctgcgattatccgtactgaccttgatactcaatagttatgcgattagtgccgcgccggttgccatacaacccacgggctatacattggagcgagtggttattttgagccgccatggtgttcgctcgccaaccaaacaaacacagttaatgaatgatgttacccctgacacgtggccgcaatggccggtcgccgcaggatacttaaccccccgaggtgcacaattagtgacattgatgggcggattctatggtgattacttccgtagccaagggttactcgcagcagggtgcccaactgacgcggttatttatgctcaggccgatgttgatcaacgaacgcgtttaacggggcaggcattccttgatggaatagcaccggggtgtggactgaaagtacattatcaggctgatttgaaaaaagtggatccgctgtttcatcccgtcgacgcgggggtgtgtaagttagattcgacacaaacccataaggctgttgaggagcgactaggtgggccattaagtgaactgagcaaacgctatgctaagccctttgcccagatgggtgagattctgaattttgcggcatctccttactgtaaatcactgcaacagcaagggaaaacctgtgattttgccaactttgcagcgaataagatcacggtgaacaagccggggacaaaagtctcgctcagcggaccactggcactgtcatcaaccttaggtgagatctttttgctacaaaattcacaagcgatgcctgatgttgcctggcatcggttaacgggagaagataattggatctcgttattatcgttgcacaatgcgcaatttgatttaatggcaaaaacaccttatatcgctcgtcataagggcacaccgttgctgcaacagatcgagactgccctcgtccttcagcgtgatgctcaggggcaaacattgccattatcacctcaaaccaaaattctgttcctcgggggacatgatacaaacatcgccaatattgctggaatgttgggggctaactggcaattaccacagcagcccgataataccccacctggggggggattggtcttcgagctatggcaaaacccagataatcatcaacgttatgtcgcggtgaaaatgttctatcaaacaatgggccaattgcgaaatgctgagaaactagacctgaaaaacaatccggctggtagggtccctgttgcaatagacggttgtgaaaatagtggtgatgacaaactttgtcagcttgataccttccaaaagaaagtagctcaggcgattgaacctgcttgccatatttaaatagcgcttgtccggttggcagtgattaacgtcagccggatatattactgggagttgatcgtaatacgtgttaattagggttacactcccagttgttatagttattgtagtcgagccatcaaataccgtaattatatagatggtaaggccggggtaaccattttaatataggcttccccggcgtattagtgccactgctaatacaacattatctcatttctcggcaagaaaacttgcatgtttaactctattggttatatacacgcagcaacctaccctgta

SEQ ID NO: 36846 - protein, 441 aa, Yersinia intermedia
MTITVDSLRLSVLTLILNSYAISAAPVAIQPTGYTLERVVILSRHGVRSPTKQTQLMNDVTPDTWPQWPVAAGYLTPRGAQLVTLMGGFYGDYFRSQGLLAAGCPTDAVIYAQADVDQRTRLTGQAFLDGIAPGCGLKVHYQADLKKVDPLFHPVDAGVCKLDSTQTHKAVEERLGGPLSELSKRYAKPFAQMGEILNFAASPYCKSLQQQGKTCDFANFAANKITVNKPGTKVSLSGPLALSSTLGEIFLLQNSQAMPDVAWHRLTGEDNWISLLSLHNAQFDLMAKTPYIARHKGTPLLQQIETALVLQRDAQGQTLPLSPQTKILFLGGHDTNIANIAGMLGANWQLPQQPDNTPPGGGLVFELWQNPDNHQRYVAVKMFYQTMGQLRNAEKLDLKNNPAGRVPVAIDGCENSGDDKLCQLDTFQKKVAQAIEPACHI

SEQ ID NO: 36847 - DNA, 2527 bp, Citrobacter amalonaticus
  CDS (653)..(1963): transl_table=11
agtggagaagcagagacaacagtgtcaacaactaaccattccatattagagaccttaacattaataatgacaatttttcataaatgaaaagtgtagttgttttttgacaactcattgaaaaagatcatttttttgattgtgtttttgttcgtgagttattgattttattattataacgatcttttgttgaatctttttgtttcacttctttaatatttgcatttctttttataagtctttataaaattggtggtcaaattataaacatagattttttcagggtgagagtgaattatttaatctgtgatacccctatttgtcatcgtgcacagtgacatgccttatccttttctttagagatggtgatacagcctgtatgttgaaggtcgattcttatgactagtacaaatcatgttgcacctgggaggccagttatcacgttaagtcgtggttatgtctctcgtgggcgctaatggaagaaggctttcgcgtagtgaaaaataacggcgtcggcccggtagtggtctctctttcttatgcgatgaggttcattggaatagaggcgtgggatgaatgtttatgtgataagatgattatacagtaatccctatgttaactatttatggttcattaactataaggttggctggcaatgaatacgctactttttcgattaataatgtttatattcatgtttggttctttcccattacaggcggaagtgccagatgacatgaagctagaacgagttgtgatagtaagtcgccacggtgtaagagcaccaacaaagttcaccccattgatgcaggaaatcacaccttactattggccgcaatgggatgttcccctgggctggttgacggctcggggtggtgagctcgtcaccgaaatgggacgatatcaacaaaaagtattaatcgataacggcgttctggaaagtaatgtatgtccgtcaccagaacaggtggcagttattgccgataccgatcagcgcactcgtaaaaccggtgaggcatttctggctggatttgcgccgggatgtaaaaataaggttcattatcaaaaagatcacgataaaaaagatcctctttttaatccagtaaaaatgggggtgtgcgcttttaatgtacaaaaaactcaggaagcgattctgacacgtgcggaaggaaacattgaacggtacactcagcgttatgactctgcattccgtactctggaacaggttctcaatttctcccggtcagcagcatgccgatcagcaagccagtctggttgcacgctaccaggaaccttaccttcagaactcagggtttctgcggataccgtttccttatctggcgcgtggagtctttcttccatgctgacggaaatatttctattgcaagaggcgcagggaatgccagaggttgcgtgggggcgaattcatggggagaaagaatggacagcgttattaagtctgcataatgctcagtttgaccttttgcaaagaactcccgaagttgcccgcagcagagcaacaccattactcgatttgatcagcgaagcattagtgagtaatgggtcaacagaaaatcattacggaattaaattacccgtctcattattgtttattgctggtcatgataccaatcttgcaaatctcagtggggtatttgatcttaactggtctctacctgggcagccagataatacacctcctggcggggagctggttttcgaaagatggacgcgagtgagtgataacactgactggattcaaatttcgtttgtttttcagactcttcaacaaatgcgtaagtttaaacctttttcatcttcgtctctcccaaacaagattgtgcttacgttgccctcttgccaggataaaaatcctgagggtatgtgtccattaaagcattttattgacattgtgcagacagcacgtattccacaatgtgcagtgatggctgatgtaaaccgttaaatataattcgtagagaatagggagattaagaacggtagtgacaaacaggtgaatgtttaaaagcgaagttttgggaatttcaggtgcgcattttggggcaggatttggaagcaaatccctctttaatatttcgatattattataagtttttgtttttcatgctattttctttttgtctgcgtagtttaacgctgatgatggtgttgtggggatcaatatttcgtaaaccggggaagggacgtgccggggggggggcgcgagccatgcgcgaaagtcggcccggtgacgtcgtgtcaccgggcaagtgattatttcagctcatccaccgtggcgatggctcgaccaatataattggccggagtcatggctttcaggcgagttttctcgtcatccggcagcggcaggctgtcgatgaattgcgtcatgccttccgcgtcgacacgttttccacgggttaactctttcagcttttcgtacggcttttcaataccgtaacgacgcatcacagtctgaatcggctctgccagtacttcccagttatgatccagttcgtctcggccgatg

SEQ ID NO: 36848 - protein, 436 aa, Citrobacter amalonaticus
MNTLLFRLIMFIFMFGSFPLQAEVPDDMKLERVVIVSRHGVRAPTKFTPLMQEITPYYWPQWDVPLGWLTARGGELVTEMGRYQQKVLIDNGVLESNVCPSPEQVAVIADTDQRTRKTGEAFLAGFAPGCKNKVHYQKDHDKKDPLFNPVKMGVCAFNVQKTQEAILTRAEGNIERYTQRYDSAFRTLEQVLNFSRSAACRSASQSGCTLPGTLPSELRVSADTVSLSGAWSLSSMLTEIFLLQEAQGMPEVAWGRIHGEKEWTALLSLHNAQFDLLQRTPEVARSRATPLLDLISEALVSNGSTENHYGIKLPVSLLFIAGHDTNLANLSGVFDLNWSLPGQPDNTPPGGELVFERWTRVSDNTDWIQISFVFQTLQQMRKFKPFSSSSLPNKIVLTLPSCQDKNPEGMCPLKHFIDIVQTARIPQCAVMADVNR

SEQ ID NO: 36849 - DNA, 1302 bp, Citrobacter braakii
  CDS (1)..(1302): transl_table=11
atgagtacattcatcattcgtttattaattttttctctcttatgcggttctttctcaatacatgctgaagagcagaacggcatgaaactggagcgggttgtgatagtgagccgtcatggagtaagagcacctacgaagttcactccaataatgaaagatgtcacacccgaccaatggccacaatgggatgtgccgttaggatggctaacgcctcgtgggggagaacttgtttctgaattaggtcagtatcaacgtttatggttcacaagcaaaggtctgttgaataatcaaacgtgcccatctccagggcaggttgctgttattgcagacacggatcaacgcacccgtaaaacgggtgaggcgtttctggctgggttagcaccaaaatgtcaaattcaagtgcattatcagaaggatgaagaaaaaaatgatcctctttttaatccggtaaaaatggggaaatgttcgtttaacacattgaaggttaaaaacgctattctggaacgggccggaggaaatattgaactgtatacccaacgctatcaatcttcatttcggaccctggaaaatgttttaaatttctcacaatcggagacatgtaagactacagagaagtctacgaaatgcacattaccagaggctttaccgtctgaatttaaggtaactcctgacaacgtatcattacctggtgcctggagtctttcttccacgctgactgagatatttctgttgcaagaggcccagggaatgccacaggtagcctgggggcgtattacgggagaaaaagaatggagagatttgttaagtctgcataacgctcagtttgatcttttgcaaagaactccagaagttgcccgtagtagggccacaccattactcgatatgatagacactgcattattgacaaatggtacaacagaaaacaggtatggcataaaattacccgtatctctgttgtttattgctggtcatgataccaatcttgcaaatttaagcggggctttagatcttaagtggtcgctgcccggtcaacccgataatacccctcctggtggggagcttgtattcgaaaagtggaaaagaaccagtgataatacggattgggttcaggtttcatttgtttatcagacgctgagagatatgagggatattcaaccgttgtcgttagaaaaacctgctggaaaagttgatttaaaattaattgcatgtgaagagaaaaatagtcagggaatgtgttcgttaaaaagtttttccaggctcattaaggaaattcgcgtgccagagtgtgcagttacggaataa

SEQ ID NO: 36850 - protein, 433 aa, Citrobacter braakii
MSTFIIRLLIFSLLCGSFSIHAEEQNGMKLERVVIVSRHGVRAPTKFTPIMKDVTPDQWPQWDVPLGWLTPRGGELVSELGQYQRLWFTSKGLLNNQTCPSPGQVAVIADTDQRTRKTGEAFLAGLAPKCQIQVHYQKDEEKNDPLFNPVKMGKCSFNTLKVKNAILERAGGNIELYTQRYQSSFRTLENVLNFSQSETCKTTEKSTKCTLPEALPSEFKVTPDNVSLPGAWSLSSTLTEIFLLQEAQGMPQVAWGRITGEKEWRDLLSLHNAQFDLLQRTPEVARSRATPLLDMIDTALLTNGTTENRYGIKLPVSLLFIAGHDTNLANLSGALDLKWSLPGQPDNTPPGGELVFEKWKRTSDNTDWVQVSFVYQTLRDMRDIQPLSLEKPAGKVDLKLIACEEKNSQGMCSLKSFSRLIKEIRVPECAVTE

SEQ ID NO: 36851 - DNA, 1302 bp, Citrobacter freundii
  CDS (1)..(1302): transl_table=11
atgagtacattcatcattcgtttattatttttttctctcttatgcggttctttctcaatacatgctgaagagcagaacggtatgaaacttgagcgggttgtgatagtgagccgccatggagtaagagcacctacgaagttcactccaataatgaaagatgtcacacccgatcaatggccacaatgggatgtgccgttaggatggctaacgcctcgtgggggagaacttgtttctgaattaggtcagtatcaacgtttatggttcacgagcaaaggtctgttgaataatcaaacgtgcccatctccagggcaggttgctgttattgcagacacggatcaacgcacccgtaaaacgggtgaggcgtttctggctgggttagcaccaaaatgtcaaattcaagtgcattatcagaaggatgaagaaaaaactgatcctctttttaatccagtaaaaatggggacatgttcgtttaacacattgaaggttaaaaacgctattctggaacgggccggaggaaatattgaactgtatacccaacgctatcaatcttcatttcggaccctggaaaatgttttaaatttctcacaatcggagacatgtaagactacagaaaagtctacgaaatgcacattaccagaggctttaccgtctgaacttaaggtaactcctgacaatgtatcattacctggtgcctggagcctttcttccacgctgactgagatatttctgttgcaagaggcccagggaatgccacaggtagcctgggggcgtattacgggggaaaaagaatggagagatttgttaagtctgcataacgctcagtttgatcttttgcaaagaactccagaagttgcccgtagtagagccacaccattactcgatatgatagacactgcattattgacaaatggtacaacagaaaacaggtatggcataaaattacccgtatctctgttgtttattgctggtcatgataccaatcttgcaaatttaagcggggctttagatcttaactggtcgctacccggtcaacccgataatacccctcctggtggggagcttgtattcgaaaagtggaaaagaaccagtgataatacggattgggttcaggtttcatttgtttatcagacgctgagagatatgagggatatacaaccgttgtcgttagaaaaacctgccggcaaagttgatttaaaattaattgcatgtgaagagaaaaatagtcagggaatgtgttcgttaaaaagtttttccaggctcattaaggaaattcgcgtgccagagtgtgcagttacggaataa

SEQ ID NO: 36852 - protein, 433 aa, Citrobacter freundii
MSTFIIRLLFFSLLCGSFSIHAEEQNGMKLERVVIVSRHGVRAPTKFTPIMKDVTPDQWPQWDVPLGWLTPRGGELVSELGQYQRLWFTSKGLLNNQTCPSPGQVAVIADTDQRTRKTGEAFLAGLAPKCQIQVHYQKDEEKTDPLFNPVKMGTCSFNTLKVKNAILERAGGNIELYTQRYQSSFRTLENVLNFSQSETCKTTEKSTKCTLPEALPSELKVTPDNVSLPGAWSLSSTLTEIFLLQEAQGMPQVAWGRITGEKEWRDLLSLHNAQFDLLQRTPEVARSRATPLLDMIDTALLTNGTTENRYGIKLPVSLLFIAGHDTNLANLSGALDLNWSLPGQPDNTPPGGELVFEKWKRTSDNTDWVQVSFVYQTLRDMRDIQPLSLEKPAGKVDLKLIACEEKNSQGMCSLKSFSRLIKEIRVPECAVTE

SEQ ID NO: 36853 - DNA, 1242 bp, Enterobacter cloacae
  CDS (1)..(1242): transl_table=11
atgagaaaagcactactcgcgctggcagtcgccggttccatttcagcaacgtttggcgtgcaggcgcaagagacgccggaagggtatcagctggagcaagttttaatcatgagccgtcacaacctgcgcgcgccgctcgccaataacggcagcgtgctggagcagtccacgccgaagcagtggccggagtgggaggtgccgggcggtcagctcactaccaagggcggcgtgctggaagtctatatgggccattacatgcgcgagtggctggcgcagcaggggatggtgaagacgggagaatgtcctgcggcggatagcgtttatgcttacgccaacagcctgcagcgtaccgttgccaccgcgcagttcttcatcaccggcgcgttcccgggctgcgacgttcccgtgcaccatcaggaaaaaatgggcaccatggatccgaccttcaatccggtgataaccgataactcgccggaattccgtgaaaaagcgctcaaggcgatggagaccgagcggcagaaaatgcagcttaccgaaagctataagctgctggagcagatgacgaactacgcggattccccgtcctgcaaagagaaaaaggtctgctcgctggctgacgcgaaagataccttcagcgccgactatgaaaaagagcctggcgtatccgggccgctgaaggtgggtaactcgctggtggacgcgttcacgctgcagtattacgaaggcttcccggccgaccaggtggcctggggcgaaatcaaaaccgaccagcagtggcgcgtgctgtcgaagctgaagaacggctatcaggactcgctgtttacctccaccgaagtggcgcaaaacgtggcgaagccgctggtgaagtacattgataaaacgctggtcaccgaacaggcaaaagcgccgaaaatcaccctgctggtggggcacgactcgaacattgcttccctgctgacggccctggatttcaaaccgtatcagttgcacgaccagcaggagcgcaccccgattggcggcaagattgttttccagcgctggcatgacaaaaatgccaaccaggagctgatgaaaattgagtatgtctaccagagctcagagcagctgcgtaacgccagcgtgctgtcgctgcagtcgcccgcgcagcgcgtgacgctggagctgaaaggctgcccggtggatgcgaacggcttctgtcctgtcgataaattcaatgcggtgatgaataacgcggcgaagtaa

SEQ ID NO: 36854 - protein, 413 aa, Enterobacter cloacae
MRKALLALAVAGSISATFGVQAQETPEGYQLEQVLIMSRHNLRAPLANNGSVLEQSTPKQWPEWEVPGGQLTTKGGVLEVYMGHYMREWLAQQGMVKTGECPAADSVYAYANSLQRTVATAQFFITGAFPGCDVPVHHQEKMGTMDPTFNPVITDNSPEFREKALKAMETERQKMQLTESYKLLEQMTNYADSPSCKEKKVCSLADAKDTFSADYEKEPGVSGPLKVGNSLVDAFTLQYYEGFPADQVAWGEIKTDQQWRVLSKLKNGYQDSLFTSTEVAQNVAKPLVKYIDKTLVTEQAKAPKITLLVGHDSNIASLLTALDFKPYQLHDQQERTPIGGKIVFQRWHDKNANQELMKIEYVYQSSEQLRNASVLSLQSPAQRVTLELKGCPVDANGFCPVDKFNAVMNNAAK

SEQ ID NO: 36855 - DNA, 2161 bp, Obesumbacterium proteus
  CDS (476)..(1810): transl_table=11
tcaccggggtgcgcaatgatatgagccagagtcacctgtttaccgggaacaaactcttgaataatccgttccttttccattgtgtcccctgtttttcagctcaatccccgctgctacaacggttacgttcagccccataaagtgattgatatcatcttatggcgactaacctaacggcagcgcccactcgtctgaggtcatcctcgcagcaataaagaaaagggaataacaaaaatcggcacacaaacagaaaggttgaagtgggtcacagccggagggttttgagtcagcgcgttttgagccagagttaaatattccctcaccgacacacgcaaaatgggcgcagatactccgcccgttttcgcttctggcgtatagtgattcgcatgcggcctatgctcagcatcggctccctacaaacgtgttttcacgccgcaatcacggatatgacaattcgaaaatcaagaggcgataaatgacaatttatctgtttacacacagcccagctcggttgctaaagcgcatgcctctggctctgatcgccgccagcatgctaaccacggcgagctacgccagtgaaaccgtgccttcaggctatcagcttgaaaaggtggtgatactcagccgtcatggcgttcgagcgccgaccaaaatgacgcaaaccatgcgtgatgttacgcctaatacctggcctgaatggcctgttaagctggggtatatcacacccagaggcgaacatttagcgagcctgatggggggattctatcgacagaaatttcagcagttggggatcctgtctaaagatcgctgcccaacggcaaatgatgtctatgtttgggcagacgtcgatcagcgcacccggaaaacaggcgaggcgtttttagcgggtctcgcacctgaatgccatctaagtatccatcatcagcaagacatcaagcaggtcgattcgctatttcatccagtgaaagccggtgtctgcaccatggaaaaagcgcaggtacagcaggccgtcgagcagcaggccggtatgcccatcgctcagttaaaccaacactaccgccctgcactggcgctgatgagcaacgtgcttaacttcccaacgtcagcgtattgccagcagcacagcgcagaacaaacctgcaactttgcagaggtaatgccaagcaagctctcaatcaaagacgatggcaataaagtggcgctcgacggagccgtcggtttgtcgtcaacgctggccgagattttcctacttgaacatgctcagggcatgccaaatgctgcgtggggaaaaatccattcggagcaagactggaacactttactaacgctacacaatgcgcaatttgatttgatgtcacgcacgccctacatcgccaaacataatggaaccccgctattacaaaccatcgttagcgccatcaactcacaaactagcccacgagaattgccagagttatcagcggataacaagatcctgtttcttgcgggacatgataccaatatcgccaatattgcaggcatgctcggcctgtcgtggacgctacccggtcagccagataacacgcctccgggtggtgccttagtttttgaacgttggtccgataagacgggaaaaaaatacgtgagcgcacagatgatgtatcaaacgctggcacagctgcgcaatcaaaccccactcactctggatgagcctgcgggcagcgttgcgttaaaaataccggggtgtgacgatcaaaccgcggagggatattgcccgctagataccttcacgcgtttggcgaaacaaaacgaactggcggagtgtcagtagttataatcaactggaacccttcctccgtttgtttggggaagggaatcttatatcgttatctgaatgctaaggaataaagcacactttagactgattagttatttgcagcgttactttgcacagcgtaattaattctacgttgcttttaatattaaattttcgcatcacgcgacgcttatgtgcactcaccgttttaacgctgaggcccaaaatattcgcaatacgcgcaatggtgaagccttgagagatatagctaataatcttgatttcttgcagcgagagctccaccgatttgcaatcacgacaccctttccggcagccgagttttccatcaatcttcaccttagcacg

SEQ ID NO: 36856 - protein, 444 aa, Obesumbacterium proteus
MTIYLFTHSPARLLKRMPLALIAASMLTTASYASETVPSGYQLEKVVILSRHGVRAPTKMTQTMRDVTPNTWPEWPVKLGYITPRGEHLASLMGGFYRQKFQQLGILSKDRCPTANDVYVWADVDQRTRKTGEAFLAGLAPECHLSIHHQQDIKQVDSLFHPVKAGVCTMEKAQVQQAVEQQAGMPIAQLNQHYRPALALMSNVLNFPTSAYCQQHSAEQTCNFAEVMPSKLSIKDDGNKVALDGAVGLSSTLAEIFLLEHAQGMPNAAWGKIHSEQDWNTLLTLHNAQFDLMSRTPYIAKHNGTPLLQTIVSAINSQTSPRELPELSADNKILFLAGHDTNIANIAGMLGLSWTLPGQPDNTPPGGALVFERWSDKTGKKYVSAQMMYQTLAQLRNQTPLTLDEPAGSVALKIPGCDDQTAEGYCPLDTFTRLAKQNELAECQ

SEQ ID NO: 36857 - DNA, 2558 bp, Obesumbacterium proteus
  CDS (961)..(2295): transl_table=11
atcgttggccgcgtgaacataaatcagcaattcgcactcaactaacgtattgattaacgcgtgatagagacgtgggtgactaaaatattctccgggggtatcaatatcgccctcgttattaaactcaatggcctgcgtttttctggccagcgagtaatcaccctgtagcgcattaaataaggttgttttcccggcgccgaccgcacccacaaaaatagcgcgcgtcatcgttagctccgcgttaacgaacacacggcatagttgagtaaattgcccaaccccgtgaccgtttgttgtagtgactcttccaccgcaccgaccgaaccataaaccactaatgcaccggtaaaacggtcgagaaaaccgatttgcacgtttgccgctttggttgccaagtcaccggcaatcatcgcggtttcgcctggcgttagcgtcataatgccgatggcttctgcaccgggaacgcctatctttttggctaaatcctcaccgggatgcgcaatgatatgagccagagtcacctgtttaccgggaacaaactcttgaataatccgttccttttccattgtgtcccctgtttttcagctcaatccccgctgctagaacgattacgttcagccccataaagtgattgatatcatcttatggcgactaacctaacggcagcgcccattcatctgagctcatcctcgcagcaataaagaaaagggaataacaaaaatcggcacacaaacagaaaggttgaagtgggtcacagccggagagtttttagccagaggattttgaagcagagttaaatattccctcaccgacacacgcaaaactggcgtaggtactccgcccattttagcttctggcgtatagtgattcgcatgcggcctatgctcggcatcggctccctacaaacgtgttttcacgccgcaatcacggatatgaccattcaaaatcaagaggcgataaatgacaatttctctgtttacacacagtccaactaggttgctaaagtgtatgcctctggctttcatcgccgccagcatgctaaccacggcaagctacgccagtgaaaccgaaccttccggatatcagcttgaaaaggtggtgattctcagccggcatggcgttcgagcgccaaccaaaatgacgcaaaccatgcgcgacgtaacacctaatgcgtggcctgagtggccagtcaaactggggtatatcacgccgaggggcgagcatttggtgagcctgatgggtgggttctatcggcagaagtttcagcagttggggatcttgtctaaaggtcgctgtccaacggcgaatgatgtttatgtttgggcagacgtcgaccaacgcactcggaaaacaggcgaggcgtttttagcgggtctcgcacctgaatgccatctaagtattcatcatcagcaagacatcaagcaggccgacccgctatttcatccggtgaaagcgggtgtctgcacaatggaaaaaacgcaggtacagcaggccgtcgagcaacaggccggtatgcccatagatcagctaaaccagcactaccgccctgcactggcgctgatgagcagcgtgctgaactttccaaagtcaacgtactgccagcaacatagcgcagaccaaacctgcgatttagcacaagccatgccaagcaagctctcaatcaaagacaatggcaataaagtggcacttgatggggccgtaggtttgtcgtcaacgctggccgaaattttcctgcttgaatatgcgcagggcatgccagatgccgcgtggggaaaaatccattcagagcaagactggaacgctttgctaacgctacacaacgcacaatttgatttgatgtcacgcacgccttacatcgccaaacataacggcacaccgctattacaaaccatcgtcagcgcaatcaattcacaacctagctcgcgagaattgcccgagttatcagcggataacaagatcctgtttcccgccggacatgacaccaatattgccaatatcgcgggtatgttcggtatgtcgtgggcgctacccggccagccggataacacgcctccaggcggtgccttagtttttgaacgttggtcagataagacggggaaaaaatacgtgagcgtacagatgatgtaccaaacgctggcacagctacgtaatcaaaccccactcactctggataagcccgctggcagcgtggcgctaaaaataccggggtgtgacgatcaaaccgcggaaggatattgcccactagataccttcacgcgtctggcgaaacaaaacgaactggtggagtgccaataattataatcaactggaaccctttcccttaattagggaaaggatttcttatatcgccatctgagcactaaggaataaaacacactttagactgattggttatttgcagcgtcactttgcatagcgtaattaattctacgttgtttttaatattaaattttcgcatcacgcgacgcttgtgcgcacttacagttttgacgctgagtcctaaaatattcgcaatgcgtgcaatagtgaagccatgagagatatagctgatgatcctc

SEQ ID NO: 36858 - protein, 444 aa, Obesumbacterium proteus
MTISLFTHSPTRLLKCMPLAFIAASMLTTASYASETEPSGYQLEKVVILSRHGVRAPTKMTQTMRDVTPNAWPEWPVKLGYITPRGEHLVSLMGGFYRQKFQQLGILSKGRCPTANDVYVWADVDQRTRKTGEAFLAGLAPECHLSIHHQQDIKQADPLFHPVKAGVCTMEKTQVQQAVEQQAGMPIDQLNQHYRPALALMSSVLNFPKSTYCQQHSADQTCDLAQAMPSKLSIKDNGNKVALDGAVGLSSTLAEIFLLEYAQGMPDAAWGKIHSEQDWNALLTLHNAQFDLMSRTPYIAKHNGTPLLQTIVSAINSQPSSRELPELSADNKILFPAGHDTNIANIAGMFGMSWALPGQPDNTPPGGALVFERWSDKTGKKYVSVQMMYQTLAQLRNQTPLTLDKPAGSVALKIPGCDDQTAEGYCPLDTFTRLAKQNELVECQ

SEQ ID NO: 36859 - DNA, 1266 bp, Klebsiella terrigena
  CDS (1)..(1266): transl_table=11
atgcctgccagagttcaggggctgttacgcctgtttatcgcctgcgcgctgccgctgctggcgctgcattcagccgccgccgaacgctaccagctggagaaagtggtggagctcagccgccacggtattcgtccgccgacggccggcaacaacgaagaaatcattgccgccaccggacgcccatggaccgagtggaccacccatgacggcgagctcaccggtcatggctatgccgccgtggtcaacaaagggcgtgaggaaggccagcattaccgccagctcggcctgctgcaggcgggatgcccgacggcggagtcgatttacgtgcgcgccagcccgctgcagcggacgcgggcgaccgcccaggcgctggtggatggcgccttccccggctgcggcgtcgctatccattacgtcaacggggatgccgatccgctgtttcagaccgacaagttcgccgccacgcaaaccgaccccgcccgccagctggcggcggtgaaagagaaggccggggatctggcgcagcgtcggcaggcgctggagccgaccatccagctattgaaagtggcggtttgccaggccgataagccctgcccgatctttgataccccatggcaggtcgagcagagcaaaagcgggaagaccaccattagcggactgagcgtgatggccaatatggtggaaacgctgcgtctcggctggagtgaaaacctgcctctcagccagctggcgtggggcaagatcgcccaggccagtcagatcaccgccctgctgccgctgttaacggaaaactacgatctgagtaacgatgtgctgtataccgcgcaaaaacgcgggtcgatcctgctcaacgccatgctccagggcgtcgaagaaggggcgcgtccggacgtacgctggctgctgctggtggcgcatgacaccaacatcgccatggtgcgcacgctgatgaactttagctggcagctgccgggctacagccgggggaatatcccgccgggcagtagcctggtgctggagcgctggcgcgacgcgaagagcggccgatactttctgcgggtcgatttccaggcgcaaggcctcgacgacctgcgtcgtctgcagacgccggacgcgcagcacccgatgctgcgtcaggagtggcgtcagccgggctgccgtcagaccgacgtcggtacgctgtgccccttccaggcggctatcaccgccttgggtcagcgtatcgaccggtcctccaccccggcggtagccatggtcctgccgtag

SEQ ID NO: 36860 - protein, 421 aa, Klebsiella terrigena
MPARVQGLLRLFIACALPLLALHSAAAERYQLEKVVELSRHGIRPPTAGNNEEIIAATGRPWTEWTTHDGELTGHGYAAVVNKGREEGQHYRQLGLLQAGCPTAESIYVRASPLQRTRATAQALVDGAFPGCGVAIHYVNGDADPLFQTDKFAATQTDPARQLAAVKEKAGDLAQRRQALEPTIQLLKVAVCQADKPCPIFDTPWQVEQSKSGKTTISGLSVMANMVETLRLGWSENLPLSQLAWGKIAQASQITALLPLLTENYDLSNDVLYTAQKRGSILLNAMLQGVEEGARPDVRWLLLVAHDTNIAMVRTLMNFSWQLPGYSRGNIPPGSSLVLERWRDAKSGRYFLRVDFQAQGLDDLRRLQTPDAQHPMLRQEWRQPGCRQTDVGTLCPFQAAITALGQRIDRSSTPAVAMVLP

SEQ ID NO: 36861 - DNA, 1266 bp, Klebsiella pneumoniae
  CDS (1)..(1266): transl_table=11
atgcctgcaagacatcaggggctgttacgcctgtttatcgcctgcgcgctgccgctgctggcgctgcactcagccgccgccgcagactggcagctggagaaagtggtggagcttagccgccacggcattcgtccgccgacggccggcaaccgggaagccatcgaggccgccaccggacgcccatggaccgagtggaccacccatgacggcgagctcaccggtcatggctatgccgccgtggtcaacaaagggcgtgaggaaggccagcactatcgccagctcggcctgctgcaggcgggatgcccgacggcggagtcgatttacgtgcgcgccagcccgctgcagcggacgcgggcgaccgcccaggcgctggtggatggcgccttccccggctgtggcgtcgctatccattacgtcaacggggatgccgatccgctgtttcagaccgacaagttcgccgccacgcaaaccgaccccgcccgccagctggcggcggtgaaagagaaggccggggatctggcgcagcgtcggcaggcgctggcgccgactatccagctattgaaacaggcggtttgccaggccgataagccctgcccgatctttgataccccatggcgggtcgagcagagcaaaagcggcaagaccaccattagcggactgagcgtgatggccaatatggtggaaacgctgcgtctcggctggagtgaaaacctgcctctcagccagctggcgtggggcaagatcgcccaggccagtcagatcacggccctgctgccgctgttaacggaaaactacgatctgagtaacgacgtgctgtataccgcgcaaaaacgcgggtcggtgctgctcaacgccatgctcgacggcgtcaaaccagaggcgaatccgaacgtacgctggctgctgctggtggcgcatgacaccaacatcgccatggtgcgcacgctgatgaactttagctggcagctgccgggctacagccgggggaatatcccgccgggcagtagcctggtgctggagcgctggcgcgacgcgaagagcggtgaacgctatctgcgggtctatttccaggcgcaaggcctcgacgacctgcgtcgtctgcagacgccggacgcgcagcacccgatgctgcgtcaggagtggcgtcagccgggctgccgtcagaccgacgtcggtacgctgtgccccttccaggcggccatcaccgcgttgggtcagcgtatcgatcggccctccaccccggcggtagccatggtcctgccgtag

SEQ ID NO: 36862 - protein, 421 aa, Klebsiella pneumoniae
MPARHQGLLRLFIACALPLLALHSAAAADWQLEKVVELSRHGIRPPTAGNREAIEAATGRPWTEWTTHDGELTGHGYAAVVNKGREEGQHYRQLGLLQAGCPTAESIYVRASPLQRTRATAQALVDGAFPGCGVAIHYVNGDADPLFQTDKFAATQTDPARQLAAVKEKAGDLAQRRQALAPTIQLLKQAVCQADKPCPIFDTPWRVEQSKSGKTTISGLSVMANMVETLRLGWSENLPLSQLAWGKIAQASQITALLPLLTENYDLSNDVLYTAQKRGSVLLNAMLDGVKPEANPNVRWLLLVAHDTNIAMVRTLMNFSWQLPGYSRGNIPPGSSLVLERWRDAKSGERYLRVYFQAQGLDDLRRLQTPDAQHPMLRQEWRQPGCRQTDVGTLCPFQAAITALGQRIDRPSTPAVAMVLP

SEQ ID NO: 36863 - DNA, 1287 bp, Pseudomonas syringae
  CDS (1)..(1287): transl_table=11
atgttcccttgcttcgtacgattggcccctttctttttggttggcttggtttcgctgcaggcccacgccgcatcagcggacggttatgtgttggacaaggtggtgcaagtcagccgccacggcgtgcggccacccacggatacccccaaactggccaaggtcaccggtcgtgaattgcccaaatggtcggtgcccgatgggcagttgaccggccacggatacgcggcggccgtggagatgggccgttaccgcggtcaggttctacgcacagccggcctgttacccaatggctgcccggcgcctggcgaagtatttgtacgcgccagccctttgcaacgcacccgagccaccgcgtcggccttgctcgatggtctgtttccaggctgcgggttgcaaccaagcgtagtgcaaggcgaccaggatgcgctgttccaggccgataagatgcccttcgcccgtctggatccacagcgcgctgaggacagcgtactcgcacgcatggggggcagcgtagccggcgcccaagcccggtatcaagacgcgcagcagcagttacgcaaggtcatctgcaatgggatcagcgcgtgcgcctatacagatgagccctggcaattggcccaggacgacgacgggcgcctggcggtcaagggcttgaacacgcagaccaatctgggtgagacgttccgtctggagtacagcgaaggcttgccgctggaccaggttgcctttggccagggccgcagtgcgcagcaggtgtcccagttgaccgcgttgaccaaagccaagtacgatttcatcaacgacggcccgtatattgccagccgtggtggttctcaattgatgaaccagatttccctggcgctcaaacaaggcacaccgctgaccacgaacgatcccctgggcatgccgcctgatgcgccgttcactctactggtcgcccatgacaccaacatttcctacctgcggacactgctcggttttcgctggaccctgggtgattatttggagggcaatattccacccgtcggtagcctgcaattcgagcgctacaagcaggtcgccaccggtcgctatttcctgcgggtggcgttcgaggcgcaatccctggagcagatccgtcaattgacgccactgaccgtcgaacagccgcctctgcatgccgatatgcgtggcgcggaggggtgcgtcgatacctccgtagggcggctttgccccctggccttggcgttgcaacgactggatcaaaatattgatcgcaccgcgctgacctcgtaccactatccataa

SEQ ID NO: 36864 - protein, 428 aa, Pseudomonas syringae
MFPCFVRLAPFFLVGLVSLQAHAASADGYVLDKVVQVSRHGVRPPTDTPKLAKVTGRELPKWSVPDGQLTGHGYAAAVEMGRYRGQVLRTAGLLPNGCPAPGEVFVRASPLQRTRATASALLDGLFPGCGLQPSVVQGDQDALFQADKMPFARLDPQRAEDSVLARMGGSVAGAQARYQDAQQQLRKVICNGISACAYTDEPWQLAQDDDGRLAVKGLNTQTNLGETFRLEYSEGLPLDQVAFGQGRSAQQVSQLTALTKAKYDFINDGPYIASRGGSQLMNQISLALKQGTPLTTNDPLGMPPDAPFTLLVAHDTNISYLRTLLGFRWTLGDYLEGNIPPVGSLQFERYKQVATGRYFLRVAFEAQSLEQIRQLTPLTVEQPPLHADMRGAEGCVDTSVGRLCPLALALQRLDQNIDRTALTSYHYP

SEQ ID NO: 36865 - DNA, 1299 bp, Escherichia coli
  CDS (1)..(1299): transl_table=11
atgaaagcgatcttaatcccatttttatctcttctgattccgttaaccccgcaatctgcattcgctcagagtgagccggagctgaagctggaaagtgtggtgattgtcagtcgtcatggtgtgcgtgctccaaccaaggccacgcaactgatgcaggatgtcaccccagacgcatggccaacctggccggtaaaactgggttggctgacaccgcgcggtggtgagctaatcgcctatctcggacattaccaacgccagcgtctggtagccgacggattgctggcgaaaaagggctgcccgcagtctggtcaggtcgcgattattgctgatgtcgacgagcgtacccgtaaaacaggcgaagccttcgccgccgggctggcacctgactgtgcaataaccgtacatacccaggcagatacgtccagtcccgatccgttatttaatcctctaaaaactggcgtttgccaactggataacgcgaacgtgactgacgcgatcctcagcagggcaggagggtcaattgctgactttaccgggcatcggcaaacggcgtttcgcgaactggaacgggtgcttaattttccgcaatcaaacttgtgccttaaacgtgagaaacaggacgaaagctgttcattaacgcaggcattaccatcggaactcaaggtgagcgccgacaatgtctcattaaccggtgcggtaagcctcgcatcaatgctgacgaagatatttctcctgcaacaagcacagggaatgccggagccggggtggggaaggatcaccgattcacaccagtggaacaccttgctaagtttgcataacgcgcaattttatttgttacaacgcacgccagaggttgcccgcagccgcgccaccccgttattagatttgatcaagacagcgttgacgccccatccaccgcaaaaacaggcgtatggtgtgacattacccacttcagtgctgtttatcgccggacacgatactaatctggcaaatctcggcggcgcactggagctcaactggacgcttcccggtcagccggataacacgccgccaggtggtgaactggtgtttgaacgctggcgtcggctaagcgataacagccagtggattcaggtttcgctggtcttccagactttacagcagatgcgtgataaaacgccgctgtcattaaatacgccgcccggagaggtgaaactgaccctggcaggatgtgaagagcgaaatgcgcagggcatgtgttcgttggcaggttttacgcaaatcgtgaatgaagcacgcataccggcgtgcagtttgtaa

SEQ ID NO: 36866 - protein, 432 aa, Escherichia coli
MKAILIPFLSLLIPLTPQSAFAQSEPELKLESVVIVSRHGVRAPTKATQLMQDVTPDAWPTWPVKLGWLTPRGGELIAYLGHYQRQRLVADGLLAKKGCPQSGQVAIIADVDERTRKTGEAFAAGLAPDCAITVHTQADTSSPDPLFNPLKTGVCQLDNANVTDAILSRAGGSIADFTGHRQTAFRELERVLNFPQSNLCLKREKQDESCSLTQALPSELKVSADNVSLTGAVSLASMLTKIFLLQQAQGMPEPGWGRITDSHQWNTLLSLHNAQFYLLQRTPEVARSRATPLLDLIKTALTPHPPQKQAYGVTLPTSVLFIAGHDTNLANLGGALELNWTLPGQPDNTPPGGELVFERWRRLSDNSQWIQVSLVFQTLQQMRDKTPLSLNTPPGEVKLTLAGCEERNAQGMCSLAGFTQIVNEARIPACSL

SEQ ID NO: 36867 - DNA, 1179 bp, Xanthomonas axonopodis pv
  CDS (1)..(1179): transl_table=11
gtgggcaccggagcgccagcatccgcgcagagcgcgcaactggagcgcgtcgtggtggtgttccggcatggcgtgcgcgcaccgctgcaaggcgaggccgccgccgcgcactatgccgaccaaccctggccgcagtggtccacgcctgccagcctgctcactccgcatggtcgccaaggcgtgcgcttgagtggcgagtacctgcgccagtggttggtgcagcaggcgctgttgccgcgcagtgggtgtccggcaaccggcagcatgtcggtgtgggccaataccgatcaacgcaccatcgagagtggcgccctgctggccgacgcgctcgcacctggctgcggcatcgtcgccgggcatcgggaggctggcagcaacgacccgctgtttcgaccgatcgaagccggcacgttgccgttcgatgcggcggcagcggtcgcatcgatccagcaacagaccggaggccctgccgccctgctgcaaggccacgccgccgagctgcaggcactgcagcagattctgggctgcacgcggacgccctgcgatttcgcgcagatgccttccacgctggcgccgtcggccaacgggcgtgggcttaagttaggcgggcccatcgacctgacctccggcaccggcgaggtgttgctgctgcaatacgcagagggcctgccgcttgcgcaggtcggttggggacgtgcgacgcccgagcgcctggcccaggtctcacgcttgcacgcattgctgttcgacatttacgcacggccgcactacatggcctcgcgttcgggcgcaccgctggcgcgcgaggtcttgcaacgtttcggcgacgcgcaggcgccgaaaatctcggtgttcgttggcagtgacacccatatcgccgcgttgagcagtttgctgggcgtgcactttcatctccccggctacggcgccgacgatccaccgccgggcggcgcgttgctgctggagctatggcgcgaaccgaatgggcagcaagtggtgcgtgcgcagtatcttgcgcaatcgctggatcaactgcggacgctggcgccgctaaatttggagcatcctccgttgcggcagaagttggcgcttggcgtttgcacggcagagcaacgcatggcgtgcccgttgaaggcgttcgcccaggcgttggaggaacagttgcaacgcgagccttga

SEQ ID NO: 36868 - protein, 392 aa, Xanthomonas axonopodis pv
MGTGAPASAQSAQLERVVVVFRHGVRAPLQGEAAAAHYADQPWPQWSTPASLLTPHGRQGVRLSGEYLRQWLVQQALLPRSGCPATGSMSVWANTDQRTIESGALLADALAPGCGIVAGHREAGSNDPLFRPIEAGTLPFDAAAAVASIQQQTGGPAALLQGHAAELQALQQILGCTRTPCDFAQMPSTLAPSANGRGLKLGGPIDLTSGTGEVLLLQYAEGLPLAQVGWGRATPERLAQVSRLHALLFDIYARPHYMASRSGAPLAREVLQRFGDAQAPKISVFVGSDTHIAALSSLLGVHFHLPGYGADDPPPGGALLLELWREPNGQQVVRAQYLAQSLDQLRTLAPLNLEHPPLRQKLALGVCTAEQRMACPLKAFAQALEEQLQREP

SEQ ID NO: 36869 - DNA, 1810 bp, Providencia rettgeri
  CDS (245)..(1498): transl_table=11
gaattatttcatcatcatgtgcacgcgtggcagcttggactatcattatcttgtctccctaaaataatgctgcaatcttaaattgcagacttgtaatgtcaatgtctgattttaattttagttaaggctggttttgagatattaatctcagaaaaaaaagtcaactttgtcattatgagataagtttagattattggggcggtttaacgtcttttcacttttccatattggtaggggtatcttaatgaaatacaaagtgttaacgctatgtttatctgcggccttatttgcaccgattgcaccaaccatggcaagtaccgacaatcaagcagatatggttttagaccaagttttagtccttagccgccacaatttacgaacaccaatagttaatacaggtattctcactgaagtgactgataaaaaatggccggattgggatgcaaaaagcggttatctcactactcaaggtggggcgcttgaagtgtatatggggcattattttagagagtggattgaccaaaataagttactcgcggatgagttatgcccaactagtaacgaagatatatatctgtataccaatagcttacaacgaacgatagcgacagcacagttttttgcagcgggggcatttcctggctgtaaagtgaatatccaccatcagccagaaattggtaagatggaccctgtctttaacccgattattaccaatggctcgcctgagtttaaacaaaaagcccttgcggcaatggatgattatcttaaaggtttatcactaaaagcaggttatgaagaacttgataccgtattgaatattaaagattctcaaaaatgcaaaacggataaattgtgtaacctcgatagccaaaaaaatagttttattatcgaagcagataaagagccgggtgttagtggcccattgaaaattgcgaattctgcagtggatgctatcgacctacaatattatgaaggttttcccgcagatcaagtcgcatgggggctagtggatacccctgagaaatggaaaaaactgaatactctgaaaaatgcgtaccaagagaccttatttacgccaaaaattattgcgaaaaatgtggctcatccaatcctcaattatattgataaaggctttgtatccgtagataaaggggaaacagctaaatttattttcttagtgggtcacgattccaacattgcttcattgatgtcagcgatggattttaaaccgtatcagttagcacagcagtacgagcatacgccaattggcggtaaattggttttccagcgttggacagacaaacaaacgaaaaaagactttatgaaagttgaatatgtttatcaaactgcagatcaacttagggacaatgcctatttatcccttgagacacccccaaaacatgtgactttagagctaaaagattgcccggttgataaaaatggctattgttcatgggaagatttccaaaaggtgatggcgaaagcattggaacaataaacgtttaatcttcctcgttaaggcccattaacagtaatgttcaatgggcttttttcatgttgaaatttatgtttagctgcttacaattcagccatcttattttatcgagtgacaaatatgcctatccagtttttacgacttccccaaattccaacagctgagattattgcgctaaatacacacccattagtattgaagcatatgcctctgggggatgtactatttgatgaggcactttgccgaaattgggttgcgggaaaagagcagcattggagccagtatggttatggcgtttgggcatttgttatcgat

SEQ ID NO: 36870 - protein, 417 aa, Providencia rettgeri
MKYKVLTLCLSAALFAPIAPTMASTDNQADMVLDQVLVLSRHNLRTPIVNTGILTEVTDKKWPDWDAKSGYLTTQGGALEVYMGHYFREWIDQNKLLADELCPTSNEDIYLYTNSLQRTIATAQFFAAGAFPGCKVNIHHQPEIGKMDPVFNPIITNGSPEFKQKALAAMDDYLKGLSLKAGYEELDTVLNIKDSQKCKTDKLCNLDSQKNSFIIEADKEPGVSGPLKIANSAVDAIDLQYYEGFPADQVAWGLVDTPEKWKKLNTLKNAYQETLFTPKIIAKNVAHPILNYIDKGFVSVDKGETAKFIFLVGHDSNIASLMSAMDFKPYQLAQQYEHTPIGGKLVFQRWTDKQTKKDFMKVEYVYQTADQLRDNAYLSLETPPKHVTLELKDCPVDKNGYCSWEDFQKVMAKALEQ

SEQ ID NO: 36871 - DNA, 1242 bp, Salmonella typhimurium
  CDS (1)..(1242): transl_table=11
atgaaaaaatcattactcgctgttgctgtggcaggggctgttttgttgtcatccgccgtacaggcgcagacaacgccggagggttatcaattacaacaggtgctgatgatgagccgccataatctgcgggcgccgctggcgaataatggcagcgtactggcgcagtcgacgccgaacgcctggccggcgtgggacgttcccggcgggcaactgacgacgaaaggcggcgtgctggaagtctatatgggacactacacacgtgaatggctggtcgcgcaggggctgataccgtcgggagaatgtccggcgcccgacacggtatatgcctatgcgaatagtttgcagcgcaccgtcgccaccgcgcaatttttcattaccggcgctttccccggctgtgatattcctgttcatcatcaggaaaaaatgggcactatggaccctaccttcaatccggtaattaccgatgattctgccgcgttccggcaacaagccgtacaggcgatggaaaaggcgcgtagtcagctacatcttgatgagagttataaactgcttgagcagataacgcattatcaggactcgccgtcctgcaaagagaagcatcagtgttcgctaatcgacgcgaaagataccttcagcgcgaactatcagcaagagcctggcgtgcaggggccgcttaaagtagggaactcgctggtggatgcgtttaccctgcaatattacgaagggtttccgatggatcaggtcgcctggggcgggatccacaccgatcggcagtggaaggtgctgtcaaaactgaaaaacggctatcaggacagcctgtttacctcacccacggtggcgcgcaatgtcgctgcgccgctggtgaaatatatcgataaggtgctggttgccgatcgcgttagcgcgccgaaggttaccgtgctggtggggcatgattccaatatcgcgtcgctgctgacggcgctggattttaaaccctatcagctccatgaccagtatgagagaacgccgattggcggtcagcttgtcttccaacgctggcatgacggcaacgctaaccgggatttgatgaaaatcgagtatgtctaccagagcgcccggcagttacgcaatgcggaagcgttaacgctcaaatcgcccgcgcaaagggtaaccctggaactgaaaggatgtccggtggatgcgaacggcttctgtccgctggataagttcgataacgtcatgaacactgctgcaaaatag

SEQ ID NO: 36872 - protein, 413 aa, Salmonella typhimurium
MKKSLLAVAVAGAVLLSSAVQAQTTPEGYQLQQVLMMSRHNLRAPLANNGSVLAQSTPNAWPAWDVPGGQLTTKGGVLEVYMGHYTREWLVAQGLIPSGECPAPDTVYAYANSLQRTVATAQFFITGAFPGCDIPVHHQEKMGTMDPTFNPVITDDSAAFRQQAVQAMEKARSQLHLDESYKLLEQITHYQDSPSCKEKHQCSLIDAKDTFSANYQQEPGVQGPLKVGNSLVDAFTLQYYEGFPMDQVAWGGIHTDRQWKVLSKLKNGYQDSLFTSPTVARNVAAPLVKYIDKVLVADRVSAPKVTVLVGHDSNIASLLTALDFKPYQLHDQYERTPIGGQLVFQRWHDGNANRDLMKIEYVYQSARQLRNAEALTLKSPAQRVTLELKGCPVDANGFCPLDKFDNVMNTAAK

SEQ ID NO: 36873 - DNA, 26 bp, Artificial sequence
  primer
atgaaagcgatcttaatcccattttt

SEQ ID NO: 36874 - DNA, 23 bp, Artificial sequence
  primer
ttacaaactgcacgccggtatgc

SEQ ID NO: 36875 - protein, 402 aa, Artificial sequence
  consensus sequence
  Variant (2)..(3): Xaa in position 2 to 3 is any amino acid
  Variant (5)..(7): Xaa in position 5 to 7 is any amino acid
  Variant (12)..(12): Xaa in position 12 is any amino acid
  Variant (14)..(14): Xaa in position 14 is any amino acid
  Variant (16)..(28): Xaa in position 16 to 28 is any amino acid
  Variant (29)..(30): Xaa in position 29 to 30 is any or no amino acid
  Variant (33)..(33): Xaa in position 33 is any amino acid
  Variant (35)..(38): Xaa in position 35 to 38 is any amino acid
  Variant (40)..(40): Xaa in position 40 is any amino acid
  Variant (43)..(44): Xaa in position 43 to 44 is any amino acid
  Variant (46)..(52): Xaa in position 46 to 52 is any amino acid
  Variant (54)..(63): Xaa in position 54 to 63 is any amino acid
  Variant (65)..(69): Xaa in position 65 to 69 is any amino acid
  Variant (70)..(70): Xaa in position 70 is any or no amino acid
  Variant (73)..(77): Xaa in position 73 to 77 is any amino acid
  Variant (78)..(81): Xaa in position 78 to 81 is any or no amino acid
  Variant (83)..(86): Xaa in position 83 to 86 is any amino acid
  Variant (89)..(90): Xaa in position 89 to 90 is any amino acid
  Variant (92)..(97): Xaa in position 92 to 97 is any amino acid
  Variant (99)..(100): Xaa in position 99 to 100 is any amino acid
  Variant (102)..(102): Xaa in position 102 is any amino acid
  Variant (104)..(107): Xaa in position 104 to 107 is any amino acid
  Variant (109)..(114): Xaa in position 109 to 114 is any amino acid
  Variant (115)..(116): Xaa in position 115 to 116 is any or no amino acid
  Variant (119)..(119): Xaa in position 119 is any amino acid
  Variant (121)..(137): Xaa in position 121 to 137 is any amino acid
  Variant (139)..(142): Xaa in position 139 to 142 is any amino acid
  Variant (143)..(163): Xaa in position 143 to 163 is any or no amino acid
  Variant (165)..(174): Xaa in position 165 to 174 is any amino acid
  Variant (175)..(175): Xaa in position 175 is any or no amino acid
  Variant (177)..(195): Xaa in position 177 to 195 is any amino acid
  Variant (196)..(208): Xaa in position 196 to 208 is any or no amino acid
  Variant (210)..(221): Xaa in position 210 to 221 is any amino acid
  Variant (222)..(222): Xaa in position 222 is any or no amino acid
  Variant (224)..(227): Xaa in position 224 to 227 is any amino acid
  Variant (229)..(229): Xaa in position 229 is any amino acid
  Variant (231)..(233): Xaa in position 231 to 233 is any amino acid
  Variant (234)..(235): Xaa in position 234 to 235 is any or no amino acid
  Variant (238)..(246): Xaa in position 238 to 246 is any amino acid
  Variant (247)..(247): Xaa in position 247 is any or no amino acid
  Variant (249)..(250): Xaa in position 249 to 250 is any amino acid
  Variant (252)..(265): Xaa in position 252 to 265 is any amino acid
  Variant (267)..(272): Xaa in position 267 to 272 is any amino acid
  Variant (274)..(293): Xaa in position 274 to 293 is any amino acid
  Variant (294)..(305): Xaa in position 294 to 305 is any or no amino acid
  Variant (309)..(309): Xaa in position 309 is any amino acid
  Variant (311)..(311): Xaa in position 311 is any amino acid
  Variant (313)..(317): Xaa in position 313 to 317 is any amino acid
  Variant (319)..(331): Xaa in position 319 to 331 is any amino acid
  Variant (332)..(332): Xaa in position 332 is any or no amino acid
  Variant (337)..(337): Xaa in position 337 is any amino acid
  Variant (341)..(342): Xaa in position 341 to 342 is any amino acid
  Variant (344)..(357): Xaa in position 344 to 357 is any amino acid
  Variant (358)..(359): Xaa in position 358 to 359 is any or no amino acid
  Variant (361)..(363): Xaa in position 361 to 363 is any amino acid
  Variant (365)..(365): Xaa in position 365 is any amino acid
  Variant (367)..(369): Xaa in position 367 to 369 is any amino acid
  Variant (370)..(370): Xaa in position 370 is any or no amino acid
  Variant (372)..(374): Xaa in position 372 to 374 is any amino acid
  Variant (375)..(376): Xaa in position 375 to 376 is any or no amino acid
  Variant (378)..(383): Xaa in position 378 to 383 is any amino acid
  Variant (384)..(386): Xaa in position 384 to 386 is any or no amino acid
  Variant (389)..(393): Xaa in position 389 to 393 is any amino acid
  Variant (394)..(396): Xaa in position 394 to 396 is any or no amino acid
  Variant (398)..(401): Xaa in position 398 to 401 is any amino acid
LXXVXXXSRHGXRXPXXXXXXXXXXXXXXXWPXWXXXXGXLTXXGXXXXXXXGXXXXXXXXXXGXXXXXXCPXXXXXXXXXAXXXXRTXXTXXXXXXGXXPXCXXXXHXXXXXXXXDPXFXXXXXXXXXXXXXXXXXAXXXXXXXXXXXXXXXXXXXXXXXXXLXXXXXXXXXXXCXXXXXXXXXXXXXXXXXXXXXXXXXXXXXXXXGXXXXXXXXXXXXXLXXXXGXPXXXXXWGXXXXXXXXXXLXXLXXXXXXXXXXXXXXAXXXXXXLXXXXXXXXXXXXXXXXXXXXXXXXXXXXXXXXGHDXNXAXXXXXLXXXXXXXXXXXXXXPPGGXLVFXXWXXXXXXXXXXXXXXXXQXXXQXRXXXXLXXXXXPXXXXXXXXXGCXXXXXXXXCXXXXF

SEQ ID NO: 36876 - protein, 19 aa, Artificial sequence
  protein pattern
  Variant (2)..(2): Xaa in position 2 is Asp, Glu or Gln
  Variant (3)..(3): Xaa in position 3 is any amino acid
  Variant (5)..(5): Xaa in position 5 is Leu or Val
  Variant (6)..(6): Xaa in position 6 is any amino acid
  Variant (7)..(7): Xaa in position 7 is Leu, Met or Val
  Variant (8)..(8): Xaa in position 8 is any amino acid
  Variant (11)..(11): Xaa in position 11 is Gly or Asn
  Variant (12)..(12): Xaa in position 12 is Ile, Leu or Val
  Variant (14)..(14): Xaa in position 14 is any or no amino acid
  Variant (16)..(18): Xaa in position 16 to 18 is any amino acid
  Variant (19)..(19): Xaa in position 19 is Glu, Asn or Thr
LXXVXXXXRHXXRXPXXXX

SEQ ID NO: 36877 - protein, 34 aa, Artificial sequence
  protein pattern
  Variant (2)..(3): Xaa in position 2 to 3 is any or no amino acid
  Variant (5)..(10): Xaa in position 5 to 10 is any amino acid
  Variant (11)..(12): Xaa in position 11 to 12 is any or no amino acid
  Variant (14)..(14): Xaa in position 14 is Asp, Asn or Ser
  Variant (15)..(16): Xaa in position 15 to 16 is any amino acid
  Variant (17)..(17): Xaa in position 17 is Glu or Gln
  Variant (20)..(21): Xaa in position 20 to 21 is any amino acid
  Variant (22)..(22): Xaa in position 22 is Ser or Thr
  Variant (23)..(23): Xaa in position 23 is Ala or Gly
  Variant (24)..(24): Xaa in position 24 is Ala, Glu, Gln or Ser
  Variant (25)..(27): Xaa in position 25 to 27 is any amino acid
  Variant (28)..(28): Xaa in position 28 is Ala, Asp or Thr
  Variant (29)..(29): Xaa in position 29 is Ala, Gly or Ser
  Variant (30)..(31): Xaa in position 30 to 31 is any amino acid
  Variant (33)..(33): Xaa in position 33 is any amino acid
CXXPXXXXXXXXAXXXXRTXXXXXXXXXXXXPXC

SEQ ID NO: 36878 - protein, 15 aa, Artificial sequence
  protein pattern
  Variant (3)..(3): Xaa in position 3 is any amino acid
  Variant (5)..(5): Xaa in position 5 is any amino acid
  Variant (6)..(6): Xaa in position 6 is Ala, Thr or Val
  Variant (7)..(8): Xaa in position 7 to 8 is any amino acid
  Variant (9)..(9): Xaa in position 9 is Gly or Ser
  Variant (10)..(10): Xaa in position 10 is any amino acid
  Variant (11)..(11): Xaa in position 11 is Ile, Leu or Val
  Variant (13)..(13): Xaa in position 13 is Ala, Gly, Pro or Thr
  Variant (14)..(14): Xaa in position 14 is any amino acid
WPXWXXXXXXXTXXG

SEQ ID NO: 36879 - protein, 13 aa, Artificial sequence
  protein pattern
  Variant (2)..(3): Xaa in position 2 to 3 is any amino acid
  Variant (4)..(5): Xaa in position 4 to 5 is any or no amino acid
  Variant (8)..(8): Xaa in position 8 is Ser or Thr
  Variant (10)..(10): Xaa in position 10 is Ile or Leu
  Variant (12)..(12): Xaa in position 12 is any amino acid
  Variant (13)..(13): Xaa in position 13 is Ile, Leu or Val
LXXXXHDXNXAXX

SEQ ID NO: 36880 - DNA, 2019 bp, Escherichia coli
  CDS (1)..(2019): transl_table=11
atgttacgtaatggaaataaatatctcctgatgctggtgagtataattatgctcaccgcgtgcattagccagtcaagaacatcatttataccgccacaggatcgcgaatctttactcgccgagcaaccgtggccgcataatggttttgtagcgatttcatggcataacgttgaagacgaagctgccgaccagcgttttatgtcagtgcggacatcagcactgcgtgaacaatttgcctggctgcgcgagaacggttatcaaccggtcagtattgctcaaattcgtgaagcacatcgaggaggaaaaccgctaccggaaaaagctgtagtgctgacttttgatgacggctaccagagtttttatacccgcgtcttcccaattcttcaggccttccagtggcctgctgtatgggcccccgtcggcagttgggtcgatacgccagcggataaacaagtaaaatttggcgatgagttggtcgatcgagaatattttgccacgtggcaacaagtgcgagaagttgcgcgttcccggctcgttgagctcgcttctcatacatggaattctcactacggtattcaggctaatgccaccggcagcttattgcctgtatatgtaaatcgtgcatattttactgaccacgcacggtatgaaaccgcagcagaataccgggaaagaattcgtctggatgctgtaaaaatgacggaatacctgcgtacaaaggttgaggtaaatccacacgtttttgtttggccttatggcgaagcgaatggcatagcgatagaggaattaaaaaaactcggttatgacatgttcttcacccttgaatcaggtttggcaaatgcgtcgcaattggattccattccgcgggtattaatcgccaataatccctcattaaaagagtttgcccagcaaattattaccgtacaggaaaaatcaccacaacggataatgcatatcgatcttgattacgtttatgacgaaaacctccagcaaatggatcgcaatattgatgtgctaattcagcgggtgaaagatatgcaaatatcaaccgtgtatttgcaggcatttgctgatcccgatggtgatgggctggtcaaagaggtctggtttccaaatcgtttgctaccaatgaaagcagatatttttagtcgggttgcctggcaattacgtacccgctcaggtgtaaacatctatgcgtggatgccggtattaagctgggatttagatcccacattaacgcgagtaaaatacttaccaacaggggagaaaaaagcacaaattcatcctgaacaatatcaccgtctctctcctttcgatgacagagtcagagcacaagttggcatgttatatgaagatcttgccggacatgctgcttttgatggcatattgttccacgatgatgctttgctttcagattatgaagatgccagtgcaccggctatcacggcttatcagcaagcaggctttagcgggagtctgagcgaaattcgacaaaacccggagcaatttaaacagtgggcccgctttaaaagtcgtgcgttaactgacttcactttagaacttagtgcgcgcgtaaaagccattcgcggtccacatattaaaactgcacgaaatatttttgcacttccggtaatacaacctgaaagtgaagcctggtttgcacagaattatgctgatttcctaaaaagctatgactggaccgctattatggctatgccttatctggaaggtgtcgcagaaaaatcggctgaccaatggttaatacaattgaccaatcaaattaaaaacatccctcaggctaaagacaaatctattttagaattacaggcacaaaactggcagaaaaatggtcagcatcaggctatttcttcgcaacaactcgctcactggatgagcctattacaactgaatggagtgaaaaactatggttattatcccgacaattttctgcataaccaacctgaaatagaccttattcgtcctgagttttcaacagcctggtatccgaaaaatgattaa

SEQ ID NO: 36881 - protein, 672 aa, Escherichia coli
MLRNGNKYLLMLVSIIMLTACISQSRTSFIPPQDRESLLAEQPWPHNGFVAISWHNVEDEAADQRFMSVRTSALREQFAWLRENGYQPVSIAQIREAHRGGKPLPEKAVVLTFDDGYQSFYTRVFPILQAFQWPAVWAPVGSWVDTPADKQVKFGDELVDREYFATWQQVREVARSRLVELASHTWNSHYGIQANATGSLLPVYVNRAYFTDHARYETAAEYRERIRLDAVKMTEYLRTKVEVNPHVFVWPYGEANGIAIEELKKLGYDMFFTLESGLANASQLDSIPRVLIANNPSLKEFAQQIITVQEKSPQRIMHIDLDYVYDENLQQMDRNIDVLIQRVKDMQISTVYLQAFADPDGDGLVKEVWFPNRLLPMKADIFSRVAWQLRTRSGVNIYAWMPVLSWDLDPTLTRVKYLPTGEKKAQIHPEQYHRLSPFDDRVRAQVGMLYEDLAGHAAFDGILFHDDALLSDYEDASAPAITAYQQAGFSGSLSEIRQNPEQFKQWARFKSRALTDFTLELSARVKAIRGPHIKTARNIFALPVIQPESEAWFAQNYADFLKSYDWTAIMAMPYLEGVAEKSADQWLIQLTNQIKNIPQAKDKSILELQAQNWQKNGQHQAISSQQLAHWMSLLQLNGVKNYGYYPDNFLHNQPEIDLIRPEFSTAWYPKND

SEQ ID NO: 36882 - DNA, 2019 bp, Escherichia coli CFT073
  CDS (1)..(2019): transl_table=11
atgttacgtaatggaaataaatatatcctgatgctggtgagtataattatgctcactgcgtgcattagccagtcaagaacatcatttataccgccacaggatcgcgaatctttactcgccgagcaaccgtggccgcataatggttttgtggcgatttcatggcataacgttgaagacgaagctgccgaccagcgttttatgtcagtgcggacatcagcactgcgtgaacaatttgcctggctgcgcgagaacggttatcaaccggtcagtattgctcaaattcgtgaagcacatcgaggaggaaaaccgctaccggaaaaagcagtagtgctgacttttgatgacggctaccagagtttttatacccgcgtcttcccaattcttcaggccttccagtggcctgctgtatgggcccccgtcggcagttgggtcgatacgccagcggatgaacaagtaaaatttggcgatgagatggtcgatcgagaatattttgccacgtggcaacaagtgcgagaagttgcgcgttcccggctcgttgaggtcgcttctcatacatggaattctcactacggtattcaggctaatgccaccggcagcttattgcctgtatatgtaaatcgtgcatattttactgaccacgcacggtatgaaaccgcagcagaataccgggaaagaattcgtctggatgctgtaaaaatgacggaatacctgcgtacaaaggctaaggtaaatccacacgtttttgtttggccttatggcgaagcgaatggcatagcgatagaggaattaaaaaaactcggttatgacatgttcttcacccttgaatcaggtttggcaaatgcgtcacaattggattccattccgcgagtattaatcgccaataatccctcattaaaagagtttgcccagcaaattattaccgtacaggaaaaatcaccacaacggataatgcatatcgatcttgattacgtttatgacgaaaaccaccagcaaatggatcgcaatattgatgtgctaattcagcgggtgaaagatatgcaaatatcaaccgtgtatttgcaggcatttgctgatcccgatggtgatgggctggtcaaagaggtctggtttccaaatcgtttgctaccaatgaaagcagatatttttagtcgggttgcctggcaattacgtacccgctcaggtgtaaacatctatgcgtggatgccggtattaagctgggatttagatcccacattaacgcgagtaaaatacttaccgactggggagaaaaaagcacaaattcatcctgaacaatatcgccgtctctctcctttcgatgacagagtcagagcacaagttggcatgttatatgaagatcttgccggacatgctgcttttgatggcatattgttccacgatgatgctttgctttcagattatgaagatgccagtgcaccggctatcacggcttatcagcaagcaggctttagcgggagtctgagcgaaattcgacaaaacccggagcaatttaaacagtggacccgctttaaaagtcgtgcgttaactgacttcactttagaacttagtgcgcgcgtaaaagccattcgcggtccacatgttaaaactgcacgaaatatttttgcacttccggtaatacaacctgaaagtgaagcgtggtttgcacagaattatgctgatttcctaaaaagctatgactggaccgctattatggctatgccttatatggaaggtgtcgcagaaaaatcggctgaccaatggttaatacaattgaccaatcaaattaaaaacatccctcaggctaaagacaaatctattttagaattacaggcacaaaactggcagaaaaatggtcagcatcaggctatttcttcgcaacaactcgctcactggatgagcctattacaactgaatggagggaaaaactatggttattatcccgacaattttctgcataaccaacctgaaatagacgttattcgtcctgagttttcaacagcctggtatccgaaaaatgattaa

SEQ ID NO: 36883 - protein, 672 aa, Escherichia coli CFT073
MLRNGNKYILMLVSIIMLTACISQSRTSFIPPQDRESLLAEQPWPHNGFVAISWHNVEDEAADQRFMSVRTSALREQFAWLRENGYQPVSIAQIREAHRGGKPLPEKAVVLTFDDGYQSFYTRVFPILQAFQWPAVWAPVGSWVDTPADEQVKFGDEMVDREYFATWQQVREVARSRLVEVASHTWNSHYGIQANATGSLLPVYVNRAYFTDHARYETAAEYRERIRLDAVKMTEYLRTKAKVNPHVFVWPYGEANGIAIEELKKLGYDMFFTLESGLANASQLDSIPRVLIANNPSLKEFAQQIITVQEKSPQRIMHIDLDYVYDENHQQMDRNIDVLIQRVKDMQISTVYLQAFADPDGDGLVKEVWFPNRLLPMKADIFSRVAWQLRTRSGVNIYAWMPVLSWDLDPTLTRVKYLPTGEKKAQIHPEQYRRLSPFDDRVRAQVGMLYEDLAGHAAFDGILFHDDALLSDYEDASAPAITAYQQAGFSGSLSEIRQNPEQFKQWTRFKSRALTDFTLELSARVKAIRGPHVKTARNIFALPVIQPESEAWFAQNYADFLKSYDWTAIMAMPYMEGVAEKSADQWLIQLTNQIKNIPQAKDKSILELQAQNWQKNGQHQAISSQQLAHWMSLLQLNGGKNYGYYPDNFLHNQPEIDVIRPEFSTAWYPKND

SEQ ID NO: 36884 - DNA, 2016 bp, Erwinia carotovora subsp. atroseptica SCRI1043
  CDS (1)..(2016): transl_table=11
atgttattcatacgattacgaaactttgtgatggcgttgggggtgttaatgatcacagcctgcgcacatcccgttgacgtgaaatatctctctccagcagaccgtcctattttggtcaaggagcaaccgtggaaaaccaatcaatatattgttattgcctatcacgatgttgccgatgagggtgccgatcaacgttttatggcggtacgcaccagcgcactgaatgaacattttgcctggttgagggaaaacggttatcacccgatatccgttgatgacattctggctgccggctctgggggtaaaccgctaccggacagggcagtgttactgacatttgatgatggttacagcagtttttatcatcgcgtttaccctcttctgaaagcctatggctggccagctgtattggcacccgttgggcgctggctggatacgccagaaaaccagccggtggactttagtggcgttcaattacctcgcaaccatttccttacctggcagcaagtcagtgaaatggcgcaatctggcctgatagaaattggggcacatacctatgacttacataaagggattctggcaaaccctcaggggaatatggaaccggccgcttccactcgcctttatttcccagaggataagcgatacgaaacgcgggatgagtatcgtcaacgttttgcgcatgatacggacctcattactaaaaggatcgttgacgcgacagggaaaaagcctcgggtttgggtctggccctatggtgcggtgggtggggacgcgctaagcattgttaagcagcgaggctatcaactagcgctaacgcttggaagtgggccggcgtcggctgactcaccgtataatgttcctcgcatattgattaacaataatccagatgtgcaacgatttgcactgatggtcagccatgcccgagaacctgagactatacgagtcgcacatatcgatctggattatgtttatgacgccgataaaacccagcagtcccgcaatatggatgtattaattcaacgtattgccgacttacgtattaacaccgtttatcttcaggctttctccgatccgaatggtgatggcaacatcgagtcattgtatttccctaatcgctggatgcctgttcgagaggatttattcaatcatgtagcctggcagttggcatctcgggcaaaagtccgtgtttacgcatggatgccggttctggcttttgatatggatgataagacattaccgttcgtagagcggatcgacagtgagagcggtcaacgtagtgtcagccgtagccaatatagacgtttatctctatgggatgcggaagccagaagacgagttactgatatttatgaggatctttctgcttacaccatgttcaatggcatcttattccatgacgatgccgtacttgcagatgatgaagatgcaggccatctggcgatgcaagcctaccaaaaggccggattccccaacgcgatcgccagtattcgtcgcgacccccaactgactgcacgctggatgcggtttaaaagtaaggcgttaactgactttacgctcgaactggccgctcgtgtgcatgagatccgtggtccgcaagttcagaccgcgcgcaacattttcgcattaccgattattgaaccggaaagtgaagcatggttctcccaaaatctggatgatttccttgccgcttatgattgggttgcccccatggcgatgccattgatggaaaacgtcgcgtctaaggacagcaatgcgtggttgcaaaagctggtacaagaagtggctcgtcgtcccggtgcgttggataaaaccgtgtttgaacttcaggcaagggattggcgtgttccaggagaaccctggttagacaccgagcaattggctgaatggatgagggtgctgcaactgaatggtgcaaaaagttacggttattatccggatgattttcttaacaatacgcctgagttggaaggcatccgtcccatgatttcatcagaatggtacccactgccatga

SEQ ID NO: 36885 - protein, 671 aa, Erwinia carotovora subsp. atroseptica SCRI1043
MLFIRLRNFVMALGVLMITACAHPVDVKYLSPADRPILVKEQPWKTNQYIVIAYHDVADEGADQRFMAVRTSALNEHFAWLRENGYHPISVDDILAAGSGGKPLPDRAVLLTFDDGYSSFYHRVYPLLKAYGWPAVLAPVGRWLDTPENQPVDFSGVQLPRNHFLTWQQVSEMAQSGLIEIGAHTYDLHKGILANPQGNMEPAASTRLYFPEDKRYETRDEYRQRFAHDTDLITKRIVDATGKKPRVWVWPYGAVGGDALSIVKQRGYQLALTLGSGPASADSPYNVPRILINNNPDVQRFALMVSHAREPETIRVAHIDLDYVYDADKTQQSRNMDVLIQRIADLRINTVYLQAFSDPNGDGNIESLYFPNRWMPVREDLFNHVAWQLASRAKVRVYAWMPVLAFDMDDKTLPFVERIDSESGQRSVSRSQYRRLSLWDAEARRRVTDIYEDLSAYTMFNGILFHDDAVLADDEDAGHLAMQAYQKAGFPNAIASIRRDPQLTARWMRFKSKALTDFTLELAARVHEIRGPQVQTARNIFALPIIEPESEAWFSQNLDDFLAAYDWVAPMAMPLMENVASKDSNAWLQKLVQEVARRPGALDKTVFELQARDWRVPGEPWLDTEQLAEWMRVLQLNGAKSYGYYPDDFLNNTPELEGIRPMISSEWYPLP

SEQ ID NO: 36886 - DNA, 2022 bp, Yersinia pseudotuberculosis IP 32953
  CDS (1)..(2022): transl_table=11
atggcgaagctattaatttttatcaaatcgctcattgttgggatgatgatcgtgtccactatggggtgtgcggagaagccaacgttcgttccgcctgcacaacgtgcattgccgcaaagtgaaagaccgtggcaaaagaatacatttgttgtgattgcttatcatgacgttgaagacgattcagccgatcaacgctatctgtcggtaagaagcagcgcattaaatgagcagttcgtgtggttgcgtgataacggttaccacgtggtttctgttgatcaaattttggcagcccgtaatggtggccctacattgccggataaggcggtgctcctcacctttgacgatggttacagcagtttttatcggcgcgtttatcccttactgaaagcatacaaatggagtgccgtattagcgccagtgggcacttggattgatactgccaccgataaaaaagtggattttggtggcttgagcactgatcgggatcgttttgccacctggaagcagattactgaaatgtctaaatcagggttggttgaaatcggggcgcatacttacgcttctcactatggtgtgattgctaacccacaggggaataccgaaccggcggcggccaatctgcaatatgatcccaaaacaaaacagtatgaaactgttgaagcctttaagcagcgaatggagaaagacgttgcgttgataactcagcgtattgtccaggcaacagggaaacaaccacgggtttgggtttggccatacggtgcgccgaatggtacggtgctaaatattttacgccagcatggttatcaactcgccatgaccctagatcctggtgtggctaatattaatgacttgatgaatataccgcgcattttaatcagtaataatccgtcactgaaggactttgccctcacggttaccagcgtgcaggaaaaaaatatcatgcgggttgcgcatgttgatttggattatctctacgatccagacccggctcaggaaaaagagaatcttgataagttggttcagcgaatttctgacctacgtgtcactcacgttttcctgcaagcattttctgatccgaagggggatggcaacattcgccaggtttacttcccgaaccgttggatcccgatgcgtcaggatttgtttaaccgggtggtatggcaattggcttcacggcctgatgttgaagtctatgcctggatgccggtattggcgtttgatatggacccgtctttacctcggatcacgcgtattgaccctaaaaccggtaaaacgagtatcgacccagatcaatatcgccgtttgtcaccttttaaccctgaagtaagacagcgcattattgatatctatcgtgatatggcctatagcgcgccgattgacggaattatctatcacgatgatgcggtgatgtctgattttgaagatgcttcccccgatgctatccgggcctatgaaaaagcgggcttccctggttcgattaccacgatacgccaagatccagagatgatgcagcggtggactcgttacaagagtaagtatctgattgattttactaatgagttgacccgcgaagtccgtgatatccgtggcccacaggtaaaatcggcgcgtaatattttcgctatgcctattttagaaccagaaagcgaagcatggtttgcacagaatcttgatgatttcctcgctaactatgattgggtcgcaccaatggccatgccgttaatggagaaagtgccgctatctgaatctaatgaatggttagcggagctagtcaataaagttgcgcaacgccccggtgctttggagaaaaccgtgtttgaactgcaatctaaggactggacccaacctgagggcaataacgccatcagcggcccaatactggcgggatggatgcgccagttgcagttaagtggtgcgcaaagttttggttactacccggataactttattactggcgaaccaccgctaaaagatgtccgccctgtgctgtcttctgcctggtaccctttatatgatcgatag

SEQ ID NO: 36887 - protein, 673 aa, Yersinia pseudotuberculosis IP 32953
MAKLLIFIKSLIVGMMIVSTMGCAEKPTFVPPAQRALPQSERPWQKNTFVVIAYHDVEDDSADQRYLSVRSSALNEQFVWLRDNGYHVVSVDQILAARNGGPTLPDKAVLLTFDDGYSSFYRRVYPLLKAYKWSAVLAPVGTWIDTATDKKVDFGGLSTDRDRFATWKQITEMSKSGLVEIGAHTYASHYGVIANPQGNTEPAAANLQYDPKTKQYETVEAFKQRMEKDVALITQRIVQATGKQPRVWVWPYGAPNGTVLNILRQHGYQLAMTLDPGVANINDLMNIPRILISNNPSLKDFALTVTSVQEKNIMRVAHVDLDYLYDPDPAQEKENLDKLVQRISDLRVTHVFLQAFSDPKGDGNIRQVYFPNRWIPMRQDLFNRVVWQLASRPDVEVYAWMPVLAFDMDPSLPRITRIDPKTGKTSIDPDQYRRLSPFNPEVRQRIIDIYRDMAYSAPIDGIIYHDDAVMSDFEDASPDAIRAYEKAGFPGSITTIRQDPEMMQRWTRYKSKYLIDFTNELTREVRDIRGPQVKSARNIFAMPILEPESEAWFAQNLDDFLANYDWVAPMAMPLMEKVPLSESNEWLAELVNKVAQRPGALEKTVFELQSKDWTQPEGNNAISGPILAGWMRQLQLSGAQSFGYYPDNFITGEPPLKDVRPVLSSAWYPLYDR

SEQ ID NO: 36888 - DNA, 1998 bp, Pseudomonas fluorescens PfO-1
  CDS (1)..(1998): transl_table=11
atgcctttgatttcgcgtttcatccttctgctgggagtgctgctggtcagcgcctgcgcccagcaagctccggccttcgtgccgccgtccgagcgaccgctggcggccaatgaaaagccctggccgaaaaatcacgtgctgggcattgcctaccacgacgtcgaagaccgtgaccccgatcaggcggtggtggcggtgcgcaccgagcgcctgcttgagcaactcgcctggctgcgggagaacaactaccaaccggtgacggtcgatcagatcatggccgcgcgcaaaggcgggccggaactgccgcccaaggcgatcctgctcagtttcgacgacggttactcaagcttctacacccgagtgttgccggtgttgcgcgcctacaactggcatgcgctgctggcgccggtcggcacctggatcgacacgccgctgaaccaaccggtggatttcgccggtacaccgcgtccgcgctcggacttcctgacctgggctcaggtgcgggaaatctcgcaatcgggcctggtggaaatcgccgcccacaccgacgccagccacaaaggcatcctcgccaacccgcaaggcaacctgcagccggcggccgcgacccgacgctacgatccggtgagcaaacgctacgaatccgaagccgatttccaggcgcggatccgcgccgacgtgcaggcgatctcggagaagatccgcaagaacaccggtaaaaaaccgcgcatttgggtctggccttacgggacggcggacggaacctcgctgaccgtggtcagcgaagagggctatgaaatggccctgaccctcgatgacggcctcgatgccctcgacaacctgatgagcgggccgcgtttcctggtggcttccgaccctgacggcgagcacttcgccaacagcgtggtcggcgtgcaagcggatttcgtgatgcgcgtggtccacgtcgatctggacaacgtctacgacccggacccggcgcagcaggaaatcaacctcggcaaattgatccagcgcatggccgacatgggcgccaacaccgtgttcctgcaagccttcgccgatccgaagggcgatggcctggtgcattcgctgtacttccccaaccgtcatctgccgatgcgcgccgacctgttcgaccgcgtcgcctggcaattgcgcacccgggctcacgtgaaggttttcgcgtggatgccggtgctgagtttcgagctggattcgaagttgccacgggtgacgcgctgggatccgaagaccggcacgaccgcagtcgacccggatcaatacaaacggctgtcgccgttcgatcccgaagtgcggcggatcatcggcgagatctacgaagacgtagcacgcctgacttcggtcgacggcattctctatcacgacgacgcagtgctttcggacttcgaagacgccggcccgcaggcgctgaaggcttacaccgcccaaggcttgccgggctcgatcgccgctctgcgtgacgatccggcagccatgcagcgctggacgcgcttcaagagccgctacctgatcgacttcaccaatgagctgaccgccaaggtgcgcgcgattcgtggcccgcaagtgctcaccgcacgcaacatcttcgccgagccggtgctcaatccgcacagcgaagcgtggttcgcgcagaacctcgacgacttcctcgggacttacgactggacggcgccgatggccatgccgctcatggaaaaacagacgtatgcgcagtccggcccgtggctcgaagaactggtggcgaagatcaaacaacgccccggcgcgctggatcgcacggtgttcgaactgcaggcccgggactggacgaaaaaggaccaggccgacatcgatggcgcacaactggccgactggatgagccgcctcaaacgtcagggcgccaccagtttcggctactacccggacaactttctcgagaacctgccggacctgaaaaccgtgcggcctgcgctctccaacaaatggaacccatga

SEQ ID NO: 36889 - protein, 665 aa, Pseudomonas fluorescens PfO-1
MPLISRFILLLGVLLVSACAQQAPAFVPPSERPLAANEKPWPKNHVLGIAYHDVEDRDPDQAVVAVRTERLLEQLAWLRENNYQPVTVDQIMAARKGGPELPPKAILLSFDDGYSSFYTRVLPVLRAYNWHALLAPVGTWIDTPLNQPVDFAGTPRPRSDFLTWAQVREISQSGLVEIAAHTDASHKGILANPQGNLQPAAATRRYDPVSKRYESEADFQARIRADVQAISEKIRKNTGKKPRIWVWPYGTADGTSLTVVSEEGYEMALTLDDGLDALDNLMSGPRFLVASDPDGEHFANSVVGVQADFVMRVVHVDLDNVYDPDPAQQEINLGKLIQRMADMGANTVFLQAFADPKGDGLVHSLYFPNRHLPMRADLFDRVAWQLRTRAHVKVFAWMPVLSFELDSKLPRVTRWDPKTGTTAVDPDQYKRLSPFDPEVRRIIGEIYEDVARLTSVDGILYHDDAVLSDFEDAGPQALKAYTAQGLPGSIAALRDDPAAMQRWTRFKSRYLIDFTNELTAKVRAIRGPQVLTARNIFAEPVLNPHSEAWFAQNLDDFLGTYDWTAPMAMPLMEKQTYAQSGPWLEELVAKIKQRPGALDRTVFELQARDWTKKDQADIDGAQLADWMSRLKRQGATSFGYYPDNFLENLPDLKTVRPALSNKWNP

SEQ ID NO: 36890 - DNA, 2022 bp, Yersinia pestis
  CDS (1)..(2022): transl_table=11
atggcgaacgtattaatttttatcaaatcgctcattgttgggatgatgatcgtgtccactatggggtgtgcggagaagccaacgttcgttccgcctgcacaacgtgcattgccgcaaagtgaaagaccgtggcaaaagaatacatttgttgtgattgcttatcatgacgttgaagacgattcagccgatcaacgctatctgtcggtaagaagcagcgcattaaatgagcagttcgtgtggttgcgtgataacggttaccacgtggtttctgttgatcaaattttggcagcccgtaatggtggccctacattgccggataaggcggtgctcctcacctttgacgatggttacagcagtttttatcggcgcgtttatcccttactgaaagcatacaaatggagtgccgtattagcgccagtgggcacttggattgatactgccaccgataaaaaagtggattttggtggcttgagcactgatcgggatcgttttgccacatggaagcagattactgaaatgtctaaatcagggttggttgaaatcggggcgcatacttacgcttctcactatggtgtgattgctaacccacaggggaataccgaaccggcggcggccaatctgcaatatgatcccaaaacaaaacagtatgaaactgttgaagcctttaagcagcgaatggagaaagacgttgcgttgataactcagcgtattgtccaggcaacagggaaacaaccacgggtttgggtttggccatacggtgcgccgaatggtacggtgctaaatattttacgccagcatggttatcaactcgccatgaccctagatcctggtgtggctaatattaatgacttgatgaatataccgcgcattttaatcagtaataatccgtcactgaaggactttgccctcacggttaccagcgtgcaggaaaaaaatatcatgcgggtggcgcatgttgatttggattatctctacgatccagacccggctcaggaaaaagagaatcttgataagttggttcagcgaatttctgacctacgtgtcactcacgttttcctgcaagcattttctgatccgaagggggatggcaacattcgccaggtttacttcccgaaccgttggatcccgatgcgtcaggatttgtttaaccgggtggtatggcaattggcttcacggcctgatgttgaagtctatgcctggatgccggtattggcgtttgatatggacccgtctttacctcggatcacgcgtattgaccctaaaaccggtaaaacgagtatcgacccagatcaatatcgccgtttatcaccttttaaccctgaagtaagacagcgcattattgatatctatcgtgatatggcctatagcgcgccgattgacggaattatctatcacgatgatgcggtgatgtctgattttgaagatgcttcccccgatgctatccgggcctatgaaaaagcgggcttccctggttcgattaccacgatacgccaagatccagagatgatgcagcggtggactcgttacaagagtaagtatctgattgattttactaatgagttgacccgcgaagtccgtgatatccgtggcccacaggtaaaatcggcgcgtaatattttcgctatgcctattttagaaccagaaagcgaagcatggtttgcacagaatcttgatgatttcctcgctaactatgattgggtcgcaccaatggccatgccgttaatggagaaagtgccgctatctgaatctaatgaatggttagcggagctagtcaataaagttgcgcaacgccccggtgctttggagaaaaccgtgtttgaactgcaatctaaggactggacccaacctgagggcaataacgccatcagcggcccaatactggcgggatggatgcgccagttgcagttaagtggtgcgcaaagttttggttactacccggataactttattactggcgaaccaccgctaaaagatgtccgccctgtgctgtcttctgcctggtaccctttatatgatcgatag

SEQ ID NO: 36891 - protein, 673 aa, Yersinia pestis
MANVLIFIKSLIVGMMIVSTMGCAEKPTFVPPAQRALPQSERPWQKNTFVVIAYHDVEDDSADQRYLSVRSSALNEQFVWLRDNGYHVVSVDQILAARNGGPTLPDKAVLLTFDDGYSSFYRRVYPLLKAYKWSAVLAPVGTWIDTATDKKVDFGGLSTDRDRFATWKQITEMSKSGLVEIGAHTYASHYGVIANPQGNTEPAAANLQYDPKTKQYETVEAFKQRMEKDVALITQRIVQATGKQPRVWVWPYGAPNGTVLNILRQHGYQLAMTLDPGVANINDLMNIPRILISNNPSLKDFALTVTSVQEKNIMRVAHVDLDYLYDPDPAQEKENLDKLVQRISDLRVTHVFLQAFSDPKGDGNIRQVYFPNRWIPMRQDLFNRVVWQLASRPDVEVYAWMPVLAFDMDPSLPRITRIDPKTGKTSIDPDQYRRLSPFNPEVRQRIIDIYRDMAYSAPIDGIIYHDDAVMSDFEDASPDAIRAYEKAGFPGSITTIRQDPEMMQRWTRYKSKYLIDFTNELTREVRDIRGPQVKSARNIFAMPILEPESEAWFAQNLDDFLANYDWVAPMAMPLMEKVPLSESNEWLAELVNKVAQRPGALEKTVFELQSKDWTQPEGNNAISGPILAGWMRQLQLSGAQSFGYYPDNFITGEPPLKDVRPVLSSAWYPLYDR

SEQ ID NO: 36892 - DNA, 27 bp, Artificial sequence
  primer
atgttacgtaatggaaataaatatctc

SEQ ID NO: 36893 - DNA, 25 bp, Artificial sequence
  primer
ttaatcatttttcggataccaggct

SEQ ID NO: 36894 - protein, 670 aa, Artificial sequence
  consensus sequence
  Variant (2)..(25): Xaa in position 2 to 25 is any amino acid
  Variant (26)..(28): Xaa in position 26 to 28 is any or no amino acid
  Variant (30)..(30): Xaa in position 30 is any amino acid
  Variant (33)..(34): Xaa in position 33 to 34 is any amino acid
  Variant (36)..(40): Xaa in position 36 to 40 is any amino acid
  Variant (42)..(42): Xaa in position 42 is any amino acid
  Variant (45)..(46): Xaa in position 45 to 46 is any amino acid
  Variant (48)..(51): Xaa in position 48 to 51 is any amino acid
  Variant (53)..(54): Xaa in position 53 to 54 is any amino acid
  Variant (56)..(56): Xaa in position 56 is any amino acid
  Variant (60)..(61): Xaa in position 60 to 61 is any amino acid
  Variant (66)..(68): Xaa in position 66 to 68 is any amino acid
  Variant (71)..(71): Xaa in position 71 is any amino acid
  Variant (75)..(75): Xaa in position 75 is any amino acid
  Variant (79)..(79): Xaa in position 79 is any amino acid
  Variant (83)..(83): Xaa in position 83 is any amino acid
  Variant (87)..(88): Xaa in position 87 to 88 is any amino acid
  Variant (91)..(92): Xaa in position 91 to 92 is any amino acid
  Variant (95)..(96): Xaa in position 95 to 96 is any amino acid
  Variant (98)..(99): Xaa in position 98 to 99 is any amino acid
  Variant (102)..(103): Xaa in position 102 to 103 is any amino acid
  Variant (106)..(106): Xaa in position 106 is any amino acid
  Variant (110)..(110): Xaa in position 110 is any amino acid
  Variant (118)..(118): Xaa in position 118 is any amino acid
  Variant (122)..(122): Xaa in position 122 is any amino acid
  Variant (125)..(125): Xaa in position 125 is any amino acid
  Variant (127)..(127): Xaa in position 127 is any amino acid
  Variant (129)..(129): Xaa in position 129 is any amino acid
  Variant (131)..(132): Xaa in position 131 to 132 is any amino acid
  Variant (134)..(134): Xaa in position 134 is any amino acid
  Variant (137)..(137): Xaa in position 137 is any amino acid
  Variant (142)..(142): Xaa in position 142 is any amino acid
  Variant (144)..(144): Xaa in position 144 is any amino acid
  Variant (147)..(151): Xaa in position 147 to 151 is any amino acid
  Variant (153)..(153): Xaa in position 153 is any amino acid
  Variant (155)..(160): Xaa in position 155 to 160 is any amino acid
  Variant (162)..(163): Xaa in position 162 to 163 is any amino acid
  Variant (165)..(165): Xaa in position 165 is any amino acid
  Variant (168)..(168): Xaa in position 168 is any amino acid
  Variant (170)..(171): Xaa in position 170 to 171 is any amino acid
  Variant (173)..(175): Xaa in position 173 to 175 is any amino acid
  Variant (177)..(177): Xaa in position 177 is any amino acid
  Variant (181)..(183): Xaa in position 181 to 183 is any amino acid
  Variant (186)..(187): Xaa in position 186 to 187 is any amino acid
  Variant (190)..(190): Xaa in position 190 is any amino acid
  Variant (192)..(193): Xaa in position 192 to 193 is any amino acid
  Variant (196)..(197): Xaa in position 196 to 197 is any amino acid
  Variant (199)..(201): Xaa in position 199 to 201 is any amino acid
  Variant (203)..(208): Xaa in position 203 to 208 is any amino acid
  Variant (210)..(215): Xaa in position 210 to 215 is any amino acid
  Variant (219)..(224): Xaa in position 219 to 224 is any amino acid
  Variant (226)..(228): Xaa in position 226 to 228 is any amino acid
  Variant (230)..(233): Xaa in position 230 to 233 is any amino acid
  Variant (235)..(244): Xaa in position 235 to 244 is any amino acid
  Variant (246)..(246): Xaa in position 246 is any amino acid
  Variant (248)..(248): Xaa in position 248 is any amino acid
  Variant (254)..(256): Xaa in position 254 to 256 is any amino acid
  Variant (258)..(266): Xaa in position 258 to 266 is any amino acid
  Variant (269)..(272): Xaa in position 269 to 272 is any amino acid
  Variant (275)..(276): Xaa in position 275 to 276 is any amino acid
  Variant (278)..(278): Xaa in position 278 is any amino acid
  Variant (280)..(283): Xaa in position 280 to 283 is any amino acid
  Variant (285)..(287): Xaa in position 285 to 287 is any amino acid
  Variant (290)..(290): Xaa in position 290 is any amino acid
  Variant (293)..(293): Xaa in position 293 is any amino acid
  Variant (297)..(300): Xaa in position 297 to 300 is any amino acid
  Variant (303)..(307): Xaa in position 303 to 307 is any amino acid
  Variant (311)..(314): Xaa in position 311 to 314 is any amino acid
  Variant (316)..(317): Xaa in position 316 to 317 is any amino acid
  Variant (319)..(319): Xaa in position 319 is any amino acid
  Variant (324)..(324): Xaa in position 324 is any amino acid
  Variant (327)..(330): Xaa in position 327 to 330 is any amino acid
  Variant (332)..(334): Xaa in position 332 to 334 is any amino acid
  Variant (336)..(336): Xaa in position 336 is any amino acid
  Variant (338)..(338): Xaa in position 338 is any amino acid
  Variant (340)..(340): Xaa in position 340 is any amino acid
  Variant (343)..(344): Xaa in position 343 to 344 is any amino acid
  Variant (346)..(350): Xaa in position 346 to 350 is any amino acid
  Variant (352)..(352): Xaa in position 352 is any amino acid
  Variant (357)..(357): Xaa in position 357 is any amino acid
  Variant (360)..(360): Xaa in position 360 is any amino acid
  Variant (364)..(369): Xaa in position 364 to 369 is any amino acid
  Variant (374)..(375): Xaa in position 374 to 375 is any amino acid
  Variant (378)..(379): Xaa in position 378 to 379 is any amino acid
  Variant (381)..(381): Xaa in position 381 is any amino acid
  Variant (383)..(383): Xaa in position 383 is any amino acid
  Variant (386)..(386): Xaa in position 386 is any amino acid
  Variant (390)..(391): Xaa in position 390 to 391 is any amino acid
  Variant (393)..(394): Xaa in position 393 to 394 is any amino acid
  Variant (396)..(397): Xaa in position 396 to 397 is any amino acid
  Variant (405)..(406): Xaa in position 405 to 406 is any amino acid
  Variant (408)..(408): Xaa in position 408 is any amino acid
  Variant (410)..(411): Xaa in position 410 to 411 is any amino acid
  Variant (412)..(412): Xaa in position 412 is any or no amino acid
  Variant (414)..(414): Xaa in position 414 is any amino acid
  Variant (416)..(429): Xaa in position 416 to 429 is any amino acid
  Variant (431)..(431): Xaa in position 431 is any amino acid
  Variant (434)..(434): Xaa in position 434 is any amino acid
  Variant (440)..(442): Xaa in position 440 to 442 is any amino acid
  Variant (445)..(450): Xaa in position 445 to 450 is any amino acid
  Variant (452)..(452): Xaa in position 452 is any amino acid
  Variant (454)..(454): Xaa in position 454 is any amino acid
  Variant (456)..(460): Xaa in position 456 to 460 is any amino acid
  Variant (464)..(465): Xaa in position 464 to 465 is any amino acid
  Variant (470)..(471): Xaa in position 470 to 471 is any amino acid
  Variant (474)..(474): Xaa in position 474 is any amino acid
  Variant (478)..(480): Xaa in position 478 to 480 is any amino acid
  Variant (482)..(483): Xaa in position 482 to 483 is any amino acid
  Variant (486)..(487): Xaa in position 486 to 487 is any amino acid
  Variant (491)..(491): Xaa in position 491 is any amino acid
  Variant (494)..(496): Xaa in position 494 to 496 is any amino acid
  Variant (499)..(500): Xaa in position 499 to 500 is any amino acid
  Variant (502)..(506): Xaa in position 502 to 506 is any amino acid
  Variant (508)..(508): Xaa in position 508 is any amino acid
  Variant (510)..(510): Xaa in position 510 is any amino acid
  Variant (513)..(514): Xaa in position 513 to 514 is any amino acid
  Variant (516)..(516): Xaa in position 516 is any amino acid
  Variant (520)..(520): Xaa in position 520 is any amino acid
  Variant (523)..(525): Xaa in position 523 to 525 is any amino acid
  Variant (527)..(528): Xaa in position 527 to 528 is any amino acid
  Variant (533)..(533): Xaa in position 533 is any amino acid
  Variant (535)..(536): Xaa in position 535 to 536 is any amino acid
  Variant (543)..(543): Xaa in position 543 is any amino acid
  Variant (545)..(547): Xaa in position 545 to 547 is any amino acid
  Variant (558)..(559): Xaa in position 558 to 559 is any amino acid
  Variant (563)..(564): Xaa in position 563 to 564 is any amino acid
  Variant (568)..(568): Xaa in position 568 is any amino acid
  Variant (570)..(570): Xaa in position 570 is any amino acid
  Variant (575)..(575): Xaa in position 575 is any amino acid
  Variant (578)..(578): Xaa in position 578 is any amino acid
  Variant (580)..(586): Xaa in position 580 to 586 is any amino acid
  Variant (589)..(590): Xaa in position 589 to 590 is any amino acid
  Variant (592)..(598): Xaa in position 592 to 598 is any amino acid
  Variant (600)..(600): Xaa in position 600 is any amino acid
  Variant (602)..(603): Xaa in position 602 to 603 is any amino acid
  Variant (605)..(607): Xaa in position 605 to 607 is any amino acid
  Variant (611)..(613): Xaa in position 611 to 613 is any amino acid
  Variant (615)..(621): Xaa in position 615 to 621 is any amino acid
  Variant (622)..(622): Xaa in position 622 is any or no amino acid
  Variant (624)..(627): Xaa in position 624 to 627 is any amino acid
  Variant (630)..(630): Xaa in position 630 is any amino acid
  Variant (633)..(634): Xaa in position 633 to 634 is any amino acid
  Variant (638)..(638): Xaa in position 638 is any amino acid
  Variant (640)..(643): Xaa in position 640 to 643 is any amino acid
  Variant (651)..(654): Xaa in position 651 to 654 is any amino acid
  Variant (656)..(660): Xaa in position 656 to 660 is any amino acid
  Variant (663)..(664): Xaa in position 663 to 664 is any amino acid
  Variant (666)..(667): Xaa in position 666 to 667 is any amino acid
MXXXXXXXXXXXXXXXXXXXXXXXXXXXFXPPXXRXXXXXEXPWXXNXXXXIXXHXVEDXXADQRXXXVRXSALXEQFXWLRXNGYXXVSXXQIXXAXXGGXXLPXKAVXLTFDDGYXSFYXRVXPXLXAXXWXAVXAPVGXWXDTXXXXXVXFXXXXXXRXXFXTWXQXXEXXXSXLVEXXXHTXXSHXGXXANXXGXXXPXXXXXXYXXXXXXYETXXXXXXRXXXDXXXXTXXXXXXXXXXPXVXVWPYGXXXGXXXXXXXXXGYXXXXTLXXGXAXXXXLXXXPRXLIXNNPXXXXFAXXXXXVQEXXXXRXXHXDLDYXYDXXXXQXXXNXDXLXQRXXDXXXXXVXLQAFXDPXGDGXXXXXXFPNRXXPMXXDXFXRVXWQLXXRXXVXXYAWMPVLXXDXDXXXLXRXXXXXXXXXXXXXXPXQYXRLSPFXXXVRXXXXXXYXDXAXXXXXDGIXXHDDAXXSDXEDAXXXAXXAYXXAGFXGSXXXIRXXPXXXXXWXRXKSXXLXDFTXELXXXVXXIRGPXVXXARNIFAXPXXXPESEAWFAQNXXDFLXXYDWXAXMAMPXMEXVXXXXXXXWLXXLXXXXXXXPXAXXKXXXELQXXXWXXXXXXXXIXXXXLAXWMXXLQLXGXXXXGYYPDNFXXXXPXXXXXRPXXSXXWYP

SEQ ID NO: 36895 - protein, 61 aa, Artificial sequence
  protein pattern
  Variant (3)..(3): Xaa in position 3 is any amino acid
  Variant (6)..(6): Xaa in position 6 is any amino acid
  Variant (7)..(7): Xaa in position 7 is any or no amino acid
  Variant (9)..(9): Xaa in position 9 is any or no amino acid
  Variant (11)..(11): Xaa in position 11 is His, Lys or Arg
  Variant (12)..(12): Xaa in position 12 is Ala, Asp or Glu
  Variant (17)..(17): Xaa in position 17 is any amino acid
  Variant (18)..(18): Xaa in position 18 is Ile or Val
  Variant (19)..(19): Xaa in position 19 is any amino acid
  Variant (20)..(20): Xaa in position 20 is Ser or Thr
  Variant (27)..(27): Xaa in position 27 is Leu or Met
  Variant (29)..(29): Xaa in position 29 is Ile or Val
  Variant (30)..(30): Xaa in position 30 is Ile or Leu
  Variant (31)..(31): Xaa in position 31 is Glu or Gln
  Variant (39)..(39): Xaa in position 39 is Ala or Ser
  Variant (42)..(42): Xaa in position 42 is any amino acid
  Variant (43)..(43): Xaa in position 43 is Ala or Asp
  Variant (47)..(47): Xaa in position 47 is any amino acid
  Variant (48)..(48): Xaa in position 48 is Ala, Asn or Ser
  Variant (52)..(52): Xaa in position 52 is Thr or Val
  Variant (54)..(54): Xaa in position 54 is Ile or Pro
  Variant (59)..(59): Xaa in position 59 is any amino acid
  Variant (60)..(60): Xaa in position 60 is Leu or Met
FTXELXXRXVXXIRGPXXXXARNIFAXPXXXPESEAWFXQNXXDFLXXYDWXAXMAMPXXE

SEQ ID NO: 36896 - protein, 58 aa, Artificial sequence
  protein pattern
  Variant (3)..(3): Xaa in position 3 is Ser or Thr
  Variant (7)..(7): Xaa in position 7 is Asn or Arg
  Variant (9)..(9): Xaa in position 9 is any amino acid
  Variant (11)..(11): Xaa in position 11 is Ala or Val
  Variant (15)..(15): Xaa in position 15 is Asp or Glu
  Variant (19)..(19): Xaa in position 19 is any amino acid
  Variant (20)..(20): Xaa in position 20 is Pro or Val
  Variant (21)..(21): Xaa in position 21 is Ile or Val
  Variant (23)..(23): Xaa in position 23 is Ile or Val
  Variant (24)..(24): Xaa in position 24 is Ala or Asp
  Variant (25)..(25): Xaa in position 25 is Asp or Gln
  Variant (27)..(27): Xaa in position 27 is any amino acid
  Variant (28)..(28): Xaa in position 28 is Ala or Glu
  Variant (30)..(30): Xaa in position 30 is any amino acid
  Variant (31)..(31): Xaa in position 31 is Asn, Arg or Ser
  Variant (34)..(34): Xaa in position 34 is any amino acid
  Variant (35)..(35): Xaa in position 35 is Pro or Thr
  Variant (38)..(38): Xaa in position 38 is Asp or Glu
  Variant (39)..(39): Xaa in position 39 is Lys or Arg
  Variant (42)..(42): Xaa in position 42 is Leu or Val
  Variant (50)..(50): Xaa in position 50 is Gln or Ser
  Variant (54)..(54): Xaa in position 54 is any amino acid
  Variant (57)..(57): Xaa in position 57 is Phe or Tyr
VRXSALXEXFXWLRXNGYXXXSXXXIXXAXXGGXXLPXXAVXLTFDDGYXSFYXRVXP

SEQ ID NO: 36897 - protein, 57 aa, Artificial sequence
  protein pattern
  Variant (5)..(5): Xaa in position 5 is Ala or Ser
  Variant (8)..(8): Xaa in position 8 is Asp or Lys
  Variant (12)..(12): Xaa in position 12 is any amino acid
  Variant (13)..(13): Xaa in position 13 is Ile or Val
  Variant (14)..(14): Xaa in position 14 is His, Lys or Arg
  Variant (15)..(15): Xaa in position 15 is Glu, Gln or Ser
  Variant (16)..(16): Xaa in position 16 is Leu or Val
  Variant (17)..(17): Xaa in position 17 is Trp or Tyr
  Variant (22)..(22): Xaa in position 22 is any amino acid
  Variant (23)..(23): Xaa in position 23 is Ile or Leu
  Variant (26)..(26): Xaa in position 26 is Lys or Arg
  Variant (27)..(27): Xaa in position 27 is Ala or Gln
  Variant (29)..(29): Xaa in position 29 is Ile or Leu
  Variant (31)..(31): Xaa in position 31 is Asp, Asn or Ser
  Variant (34)..(34): Xaa in position 34 is Ala or Val
  Variant (38)..(38): Xaa in position 38 is any amino acid
  Variant (39)..(39): Xaa in position 39 is Ser or Thr
  Variant (41)..(41): Xaa in position 41 is Ala, Pro or Ser
  Variant (42)..(42): Xaa in position 42 is any amino acid
  Variant (44)..(44): Xaa in position 44 is any amino acid
  Variant (45)..(45): Xaa in position 45 is Ile or Val
  Variant (46)..(46): Xaa in position 46 is Phe or Tyr
  Variant (53)..(53): Xaa in position 53 is Ala or Ser
  Variant (54)..(54): Xaa in position 54 is Phe or Trp
  Variant (55)..(55): Xaa in position 55 is Asp or Glu
  Variant (56)..(56): Xaa in position 56 is Leu or Met
LQAFXDPXGDGXXXXXXFPNRXXPMXXDXFXRVXWQLXXRXXVXXXAWMPVLXXXXD

SEQ ID NO: 36898 - protein, 58 aa, Artificial sequence
  protein pattern
  Variant (2)..(3): Xaa in position 2 to 3 is any amino acid
  Variant (8)..(8): Xaa in position 8 is Ser or Thr
  Variant (10)..(10): Xaa in position 10 is Ile or Val
  Variant (13)..(13): Xaa in position 13 is Ala or Pro
  Variant (14)..(14): Xaa in position 14 is any amino acid
  Variant (15)..(15): Xaa in position 15 is Asp or Asn
  Variant (16)..(17): Xaa in position 16 to 17 is any amino acid
  Variant (19)..(19): Xaa in position 19 is Asp or Lys
  Variant (21)..(21): Xaa in position 21 is Ala or Gly
  Variant (22)..(22): Xaa in position 22 is Asp or Gly
  Variant (23)..(25): Xaa in position 23 to 25 is any amino acid
  Variant (26)..(26): Xaa in position 26 is Asp or Pro
  Variant (28)..(28): Xaa in position 28 is Asp, Glu or Ser
  Variant (29)..(29): Xaa in position 29 is any amino acid
  Variant (31)..(31): Xaa in position 31 is Ala or Leu
  Variant (34)..(34): Xaa in position 34 is any amino acid
  Variant (36)..(36): Xaa in position 36 is Ile or Val
  Variant (37)..(37): Xaa in position 37 is any amino acid
  Variant (39)..(39): Xaa in position 39 is Ile, Met or Val
  Variant (40)..(40): Xaa in position 40 is Ala or Ser
  Variant (41)..(41): Xaa in position 41 is any amino acid
  Variant (43)..(43): Xaa in position 43 is any amino acid
  Variant (47)..(47): Xaa in position 47 is Ile, Leu or Val
  Variant (48)..(48): Xaa in position 48 is Ala or Gly
  Variant (49)..(49): Xaa in position 49 is Ala or Ser
  Variant (52)..(52): Xaa in position 52 is any amino acid
  Variant (53)..(53): Xaa in position 53 is Ala or Asn
  Variant (56)..(56): Xaa in position 56 is any amino acid
  Variant (58)..(58): Xaa in position 58 is Ile or Val
AXXAPVGXWXDTXXXXXVXFXXXXXXRXXFXTWXQXXEXXXSXLVEXXXHTXXSHXGX

SEQ ID NO: 36899 - protein, 58 aa, Artificial sequence
  protein pattern
  Variant (4)..(4): Xaa in position 4 is Ile or Leu
  Variant (5)..(5): Xaa in position 5 is Phe or Tyr
  Variant (10)..(10): Xaa in position 10 is Leu or Val
  Variant (11)..(11): Xaa in position 11 is Leu or Met
  Variant (14)..(14): Xaa in position 14 is Phe or Tyr
  Variant (18)..(18): Xaa in position 18 is any amino acid
  Variant (19)..(19): Xaa in position 19 is any or no amino acid
  Variant (21)..(21): Xaa in position 21 is any or no amino acid
  Variant (23)..(23): Xaa in position 23 is Ile or Leu
  Variant (24)..(24): Xaa in position 24 is any amino acid
  Variant (27)..(27): Xaa in position 27 is Glu, Gln or Thr
  Variant (28)..(28): Xaa in position 28 is any amino acid
  Variant (29)..(29): Xaa in position 29 is Ala or Gln
  Variant (31)..(31): Xaa in position 31 is Phe or Leu
  Variant (32)..(32): Xaa in position 32 is Pro or Ser
  Variant (35)..(35): Xaa in position 35 is Ile or Leu
  Variant (36)..(36): Xaa in position 36 is Ala, Ser or Thr
  Variant (37)..(37): Xaa in position 37 is Ala, Glu or Thr
  Variant (38)..(38): Xaa in position 38 is Ile or Leu
  Variant (40)..(40): Xaa in position 40 is Asp or Gln
  Variant (41)..(41): Xaa in position 41 is Asp or Asn
  Variant (43)..(43): Xaa in position 43 is Ala or Glu
  Variant (44)..(44): Xaa in position 44 is any amino acid
  Variant (45)..(45): Xaa in position 45 is Phe or Met
  Variant (46)..(46): Xaa in position 46 is any amino acid
  Variant (47)..(47): Xaa in position 47 is Gln or Arg
  Variant (49)..(49): Xaa in position 49 is Ala or Thr
  Variant (51)..(51): Xaa in position 51 is Phe or Tyr
  Variant (54)..(54): Xaa in position 54 is Lys or Arg
  Variant (55)..(55): Xaa in position 55 is any amino acid
  Variant (57)..(57): Xaa in position 57 is any amino acid
DGIXXHDDAXXSDXEDAXXPXAXXAYXXXGXXGSXXXXRXXPXXXXXWXRXKSXXLXD

SEQ ID NO: 36900 - protein, 59 aa, Artificial sequence
  protein pattern
  Variant (2)..(2): Xaa in position 2 is His or Arg
  Variant (4)..(4): Xaa in position 4 is Phe or Trp
  Variant (10)..(10): Xaa in position 10 is any or no amino acid
  Variant (12)..(12): Xaa in position 12 is any amino acid
  Variant (13)..(13): Xaa in position 13 is any or no amino acid
  Variant (15)..(15): Xaa in position 15 is any amino acid
  Variant (16)..(16): Xaa in position 16 is Ala or Val
  Variant (17)..(17): Xaa in position 17 is Ile or Leu
  Variant (18)..(18): Xaa in position 18 is Glu, Asn or Ser
  Variant (19)..(19): Xaa in position 19 is any amino acid
  Variant (20)..(20): Xaa in position 20 is Leu or Val
  Variant (21)..(21): Xaa in position 21 is Lys or Arg
  Variant (22)..(23): Xaa in position 22 to 23 is any amino acid
  Variant (26)..(26): Xaa in position 26 is Asp or Gln
  Variant (27)..(27): Xaa in position 27 is Leu or Met
  Variant (28)..(28): Xaa in position 28 is any amino acid
  Variant (29)..(29): Xaa in position 29 is Phe, Leu or Met
  Variant (32)..(32): Xaa in position 32 is Asp, Glu or Gly
  Variant (33)..(33): Xaa in position 33 is Pro or Ser
  Variant (35)..(35): Xaa in position 35 is Leu, Pro or Val
  Variant (37)..(37): Xaa in position 37 is Asn or Ser
  Variant (38)..(38): Xaa in position 38 is Ala or Ile
  Variant (39)..(39): Xaa in position 39 is Asp, Asn or Ser
  Variant (40)..(40): Xaa in position 40 is Asp, Gln or Ser
  Variant (41)..(41): Xaa in position 41 is Leu or Pro
  Variant (42)..(42): Xaa in position 42 is any amino acid
  Variant (43)..(43): Xaa in position 43 is Asn or Ser
  Variant (44)..(44): Xaa in position 44 is Ile or Val
  Variant (47)..(47): Xaa in position 47 is Ile or Val
  Variant (50)..(50): Xaa in position 50 is Ala, Asn or Ser
  Variant (54)..(54): Xaa in position 54 is Asp or Ser
  Variant (55)..(55): Xaa in position 55 is Leu or Val
  Variant (56)..(56): Xaa in position 56 is any amino acid
  Variant (57)..(57): Xaa in position 57 is Asp, Glu or Arg
PXVXVWPYGXAXXGXXXXXXXXXGYXXXXTLXXGXAXXXXXXXXPRXLIXNNPXXXXFA

SEQ ID NO: 36901 - protein, 48 aa, Artificial sequence
  protein pattern
  Variant (2)..(3): Xaa in position 2 to 3 is any amino acid
  Variant (4)..(8): Xaa in position 4 to 8 is any or no amino acid
  Variant (11)..(11): Xaa in position 11 is Arg or Ser
  Variant (12)..(12): Xaa in position 12 is any amino acid
  Variant (16)..(16): Xaa in position 16 is Asn or Ser
  Variant (18)..(18): Xaa in position 18 is Ala, Gly or Val
  Variant (19)..(19): Xaa in position 19 is any amino acid
  Variant (20)..(20): Xaa in position 20 is Asn or Ser
  Variant (21)..(21): Xaa in position 21 is Phe or Tyr
  Variant (27)..(27): Xaa in position 27 is Asp or Asn
  Variant (29)..(29): Xaa in position 29 is Ile or Leu
  Variant (30)..(30): Xaa in position 30 is any amino acid
  Variant (31)..(31): Xaa in position 31 is Gly or Asn
  Variant (32)..(32): Xaa in position 32 is Glu, Gln or Thr
  Variant (34)..(34): Xaa in position 34 is Glu or Pro
  Variant (35)..(35): Xaa in position 35 is Ile or Leu
  Variant (36)..(36): Xaa in position 36 is Asp, Glu or Lys
  Variant (37)..(37): Xaa in position 37 is any amino acid
  Variant (38)..(38): Xaa in position 38 is Ile or Val
  Variant (41)..(41): Xaa in position 41 is any amino acid
  Variant (42)..(42): Xaa in position 42 is Phe, Ile or Leu
  Variant (44)..(44): Xaa in position 44 is Ser or Thr
  Variant (45)..(45): Xaa in position 45 is Ala or Glu
LXXXXXXXWMXXLQLXGXXXXGYYPDXFXXXXPXXXXXRPXXSXXWYP

SEQ ID NO: 36902 - protein, 35 aa, Artificial sequence
  protein pattern
  Variant (2)..(2): Xaa in position 2 is any amino acid
  Variant (3)..(5): Xaa in position 3 to 5 is any or no amino acid
  Variant (7)..(7): Xaa in position 7 is Ile or Val
  Variant (12)..(12): Xaa in position 12 is Leu or Val
  Variant (15)..(15): Xaa in position 15 is any amino acid
  Variant (16)..(16): Xaa in position 16 is Asp or Asn
  Variant (17)..(17): Xaa in position 17 is any amino acid
  Variant (18)..(18): Xaa in position 18 is Ala, Gln or Thr
  Variant (20)..(21): Xaa in position 20 to 21 is any amino acid
  Variant (22)..(22): Xaa in position 22 is Glu or Arg
  Variant (24)..(24): Xaa in position 24 is Ile, Leu or Met
  Variant (26)..(26): Xaa in position 26 is any amino acid
  Variant (28)..(28): Xaa in position 28 is Ile or Val
  Variant (31)..(31): Xaa in position 31 is Ile or Val
  Variant (32)..(32): Xaa in position 32 is any amino acid
  Variant (34)..(34): Xaa in position 34 is Leu or Met
  Variant (35)..(35): Xaa in position 35 is Gln or Arg
IXXXXHXDLDYXYDXXXXQXXXNXDXLXQRXXDXX

SEQ ID NO: 36903 - protein, 35 aa, Artificial sequence
  protein pattern
  Variant (2)..(2): Xaa in position 2 is any or no amino acid
  Variant (5)..(9): Xaa in position 5 to 9 is any amino acid
  Variant (10)..(11): Xaa in position 10 to 11 is any or no amino acid
  Variant (13)..(13): Xaa in position 13 is Asp or Glu
  Variant (16)..(16): Xaa in position 16 is His, Lys or Arg
  Variant (22)..(22): Xaa in position 22 is Asp or Asn
  Variant (23)..(23): Xaa in position 23 is Asp or Pro
  Variant (24)..(24): Xaa in position 24 is Glu or Arg
  Variant (27)..(28): Xaa in position 27 to 28 is any amino acid
  Variant (29)..(29): Xaa in position 29 is Ile or Val
  Variant (30)..(30): Xaa in position 30 is Gly or Ile
  Variant (31)..(31): Xaa in position 31 is any amino acid
  Variant (32)..(32): Xaa in position 32 is Ile or Leu
  Variant (34)..(34): Xaa in position 34 is Glu or Arg
PXTGXXXXXXXPXQYXRLSPFXXXVRXXXXXXYXD

SEQ ID NO: 36904 - protein, 28 aa, Artificial sequence
  protein pattern
  Variant (3)..(4): Xaa in position 3 to 4 is any amino acid
  Variant (6)..(6): Xaa in position 6 is Thr or Val
  Variant (7)..(7): Xaa in position 7 is Asn or Gln
  Variant (8)..(8): Xaa in position 8 is any amino acid
  Variant (9)..(9): Xaa in position 9 is Ile or Val
  Variant (10)..(10): Xaa in position 10 is any amino acid
  Variant (11)..(11): Xaa in position 11 is Asn, Gln or Arg
  Variant (12)..(12): Xaa in position 12 is any amino acid
  Variant (14)..(14): Xaa in position 14 is Gly or Gln
  Variant (16)..(16): Xaa in position 16 is any amino acid
  Variant (17)..(17): Xaa in position 17 is Asp or Glu
  Variant (19)..(19): Xaa in position 19 is Ser or Thr
  Variant (20)..(20): Xaa in position 20 is Ile or Val
  Variant (21)..(21): Xaa in position 21 is Phe or Leu
  Variant (25)..(25): Xaa in position 25 is Ala or Ser
  Variant (26)..(26): Xaa in position 26 is any amino acid
  Variant (27)..(27): Xaa in position 27 is Asp or Asn
WLXXLXXXXXXXPXAXXKXXXELQXXXW

SEQ ID NO: 36905 - protein, 21 aa, Artificial sequence
  protein pattern
  Variant (2)..(2): Xaa in position 2 is Gln or Arg
  Variant (5)..(6): Xaa in position 5 to 6 is any amino acid
  Variant (8)..(9): Xaa in position 8 to 9 is any amino acid
  Variant (10)..(10): Xaa in position 10 is any or no amino acid
  Variant (12)..(12): Xaa in position 12 is any or no amino acid
  Variant (14)..(14): Xaa in position 14 is Ala or Ser
  Variant (15)..(15): Xaa in position 15 is Trp or Tyr
  Variant (17)..(17): Xaa in position 17 is Asp or Asn
  Variant (19)..(19): Xaa in position 19 is Ala or Glu
  Variant (21)..(21): Xaa in position 21 is Asp or Glu
EXPWXXNXXXVXIXXHXVXDX

SEQ ID NO: 36906 - protein, 41 aa, Artificial sequence
  protein pattern
  Variant (2)..(4): Xaa in position 2 to 4 is any amino acid
  Variant (6)..(6): Xaa in position 6 is Asn or Ser
  Variant (7)..(8): Xaa in position 7 to 8 is any amino acid
  Variant (10)..(10): Xaa in position 10 is Ala or Val
  Variant (11)..(11): Xaa in position 11 is any amino acid
  Variant (12)..(12): Xaa in position 12 is Ala, Ser or Val
  Variant (13)..(13): Xaa in position 13 is Asn or Thr
  Variant (14)..(15): Xaa in position 14 to 15 is any amino acid
  Variant (17)..(17): Xaa in position 17 is any amino acid
  Variant (18)..(18): Xaa in position 18 is Pro or Thr
  Variant (19)..(19): Xaa in position 19 is Asp, Glu or Lys
  Variant (20)..(21): Xaa in position 20 to 21 is any amino acid
  Variant (22)..(22): Xaa in position 22 is Gln or Arg
  Variant (26)..(26): Xaa in position 26 is any amino acid
  Variant (27)..(27): Xaa in position 27 is Ala, Asp or Glu
  Variant (28)..(28): Xaa in position 28 is Ala or Glu
  Variant (29)..(29): Xaa in position 29 is Phe or Tyr
  Variant (30)..(30): Xaa in position 30 is Lys or Arg
  Variant (31)..(31): Xaa in position 31 is Glu or Gln
  Variant (33)..(33): Xaa in position 33 is Phe, Ile or Met
  Variant (34)..(35): Xaa in position 34 to 35 is any amino acid
  Variant (37)..(37): Xaa in position 37 is Ala, Thr or Val
  Variant (38)..(38): Xaa in position 38 is Ala, Asp or Val
  Variant (39)..(39): Xaa in position 39 is any amino acid
  Variant (40)..(40): Xaa in position 40 is Ile or Met
AXXXGXXXPXXXXXXYXXXXXXYETXXXXXXRXXXDXXXXT

SEQ ID NO: 36907 - DNA, 2424 bp, Escherichia coli
  CDS (1)..(2424): transl_table=11
atgtattcaagtagcagaaaaaggtgcccgaaaaccaaatgggctttgaaacttcttactgccgcatttttagcagcgagtcccgcggcgaagagtgctgttaataacgcctatgatgcattgattattgaagctcgcaagggtaatactcagccagctttgtcatggtttgcactaaaatcagcactcagcaataaccaaattgctgactggttacagattgccttatgggccgggcaagataaacaggttattaccgtttacaaccgctaccgtcatcagcaattaccagcgcgtggttatgcagctgtcgccgtcgcttatcgtaacctgcaacaatggcaaaactcgcttacactgtggcaaaaggcgctctctctggagccgcaaaataaggattatcaacggggacaaattttaaccctggcagatgctggtcactatgatactgcgctggttaaacttaagcagcttaactctggagcaccggacaaagccaatttactcgcagaagcctatatctataaactggcggggcgtcatcaggatgaattacgggcgatgacagagtcattacctgaaaatgcatctacgcaacaatatcccacagaatacgtgcaggcattacgtaataatcaacttgctgccgcgattgacgatgccaatttaacgccagatattcgcgctgatattcatgccgaactggtcagactgtcgtttatgcctacgcgcagtgaaagtgaacgttatgccattgccgatcgcgccctcgcccaatacgctgcattagaaattctgtggcacgataacccagaccgcactgcccagtaccagcgtattcaggttgatcatcttggcgcgttattaactcgcgatcgttataaagacgttatttctcactatcagcgattaaaaaagacggggcaaattattccgccctgggggcaatattgggttgcatcggcttatctcaaagatcatcagccgaaaaaagcacagtcaataatgaccgagctcttttatcacaaggagaccattgccccggatttatccgatgaagaacttgcggatctcttttacagccacctggagagtgaaaattatccgggcgcgctaactgtcacccaacataccattaatacttcgccgcctttccttcggttaatgggcacgcctacgagcatcccgaatgatacctggttacaggggcattcgtttctctcaaccgtagcaaaatatagtaatgatcttcctcaggctgaaatgacagccagagagcttgcttataacgcaccaggaaatcagggactgcgcattgattacgcgagtgtgttacaagcccgcggttggcctcgtgcagcagaaaatgaattaaaaaaagcagaagtgatcgagccacgtaatattaatctggaggttgaacaagcctggacagcattaacgttacaagaatggcagcaggcagctgtcttaacgcacgatgttgtcgaacgtgaaccgcaagatcccggcgttgtacgattaaaacgtgcggttgatgtacataatcttgcagagcttcgtatcgctggctcaacaggaattgatgccgaaggcccggatagtggtaaacatgatgtcgacttaaccaccatcgtttattcaccaccgctgaaggataactggcgcggttttgctggattcggttatgccgatggacaatttagcgaaggaaaagggattgttcgcgactggcttgcgggtgttgagtggcggtcacgtaatatctggctcgaggcagagtacgctgaacgcgttttcaatcatgagcataaacccggcgcgcgcctgtctggctggtatgattttaatgataactggcgtattggttcgcaactggaacgcctctctcaccgcgttccattacgggcaatgaaaaatggtgttacaggcaacagtgctcaggcttatgttcgctggtatcaaaatgagcggcgtaagtacggtgtctcctgggctttcactgatttttccgacagtaaccagcgtcatgaagtctcacttgagggtcaggaacgcatctggtcttcaccatatttgattgtcgatttcctacccagtctgtattacgaacaaaatacagaacacgataccccatactacaaccctataaaaacgttcgatattgttccggcatttgaggcaagccatttgttatggcgaagctatgaaaatagctgggagcaaatattcagcgcaggtgttggtgcctcctggcaaaaacattatggcacggatgtcgtcacccaactcggctacgggcaacgcattagttggaatgacgtgattgatgctggcgcaacgctacgctgggaaaaacgaccttatgacggtgacagagaacacaacttatacgttgaattcgatatgacattcagattttaa

SEQ ID NO: 36908 - protein, 807 aa, Escherichia coli
MYSSSRKRCPKTKWALKLLTAAFLAASPAAKSAVNNAYDALIIEARKGNTQPALSWFALKSALSNNQIADWLQIALWAGQDKQVITVYNRYRHQQLPARGYAAVAVAYRNLQQWQNSLTLWQKALSLEPQNKDYQRGQILTLADAGHYDTALVKLKQLNSGAPDKANLLAEAYIYKLAGRHQDELRAMTESLPENASTQQYPTEYVQALRNNQLAAAIDDANLTPDIRADIHAELVRLSFMPTRSESERYAIADRALAQYAALEILWHDNPDRTAQYQRIQVDHLGALLTRDRYKDVISHYQRLKKTGQIIPPWGQYWVASAYLKDHQPKKAQSIMTELFYHKETIAPDLSDEELADLFYSHLESENYPGALTVTQHTINTSPPFLRLMGTPTSIPNDTWLQGHSFLSTVAKYSNDLPQAEMTARELAYNAPGNQGLRIDYASVLQARGWPRAAENELKKAEVIEPRNINLEVEQAWTALTLQEWQQAAVLTHDVVEREPQDPGVVRLKRAVDVHNLAELRIAGSTGIDAEGPDSGKHDVDLTTIVYSPPLKDNWRGFAGFGYADGQFSEGKGIVRDWLAGVEWRSRNIWLEAEYAERVFNHEHKPGARLSGWYDFNDNWRIGSQLERLSHRVPLRAMKNGVTGNSAQAYVRWYQNERRKYGVSWAFTDFSDSNQRHEVSLEGQERIWSSPYLIVDFLPSLYYEQNTEHDTPYYNPIKTFDIVPAFEASHLLWRSYENSWEQIFSAGVGASWQKHYGTDVVTQLGYGQRISWNDVIDAGATLRWEKRPYDGDREHNLYVEFDMTFRF

SEQ ID NO: 36909 - DNA, 2424 bp, Escherichia coli O157:H7 EDL933
  CDS (1)..(2424): transl_table=11
  misc_feature (175)..(175): y is t or c
  misc_feature (187)..(187): y is t or c
atgtattcaagtagcagaaaaaggtgcccgaaaaccaaatgggctttgaaacttcttactgccgcatttttagcagcgagtcccgcggcgaagagtgctgttaataacgcctatgatgcattgattattgaagctcgcaagggtaatactcagccagctttgtcatggtttgcaytaaaatcagcaytcagcaataaccaaattgctgactggttacagattgccttatgggccgggcaagataaacaggttattaccgtttacaaccgctaccgtcatcagcaattaccagcgcgtggttatgcagctgtcgccgtcgcttatcgtaacctgcaacaatggcaaaactcgcttacactgtggcaaaaggcgctctctctggagccgcaaaataaggattatcaacggggacaaattttaaccctggcagatgctggtcactatgatactgcgctggttaaacttaagcagcttaactctggagcaccggacaaagccaatttactcgcagaagcctatatctataaactggcggggcgtcatcaggatgaattacgggcgatgacagagtcattacctgaaaatgcatctacgcaacaatatcccacagaatacgtgcaggcattacgtaataatcaacttgctgccgcgattgacgatgccaatttaacgccagatattcgcgctgatattcatgccgaactggtcagactgtcgtttatgcctacgcgcagtgaaagtgaacgttatgccattgccgatcgcgccctcgcccaatacgctgcattagaaattctgtggcacgataacccagaccgtactgcccagtaccagcgtattcaggttgatcatcttggcgcgttattaactcgcgatcgttataaagacgttatttctcactatcagcgattaaaaaagacggggcaaattattccgccctgggggcaatattgggttgcatcggcttatctcaaagatcatcagccgaaaaaagcacagtcaataatgaccgagctcttttatcacaaggagaccattgccccggatttatccgatgaagaacttgcggatctcttttacagccacctggagagtgaaaattatccgggcgcgctaactgtcacccaacataccattaatacttcgccgcctttccttcggttaatgggcacgcctacgagcatcccgaatgatacctggttacaggggcattcgtttctctcaaccgtagcaaaatatagtaatgatcttcctcaggctgaaatgacagccagagagcttgcttataacgcaccaggaaatcagggactgcgcattgattacgcgagtgtgttacaagcccgcggttggcctcgtgcagcagaaaatgaattaaaaaaagcagaagtgatcgagccacgtaatattaatctggaggttgaacaagcctggacagcattaacgttacaagaatggcagcaggcagctgtcttaacgcacgatgttgtcgaacgtgaaccgcaagatcccggcgttgtacgattaaaacgtgcggttgatgtacataatcttgcagagcttcgtatcgctggctcaacaggaattgatgccgaaggcccggatagtggtaaacatgatgtcgacttaaccaccatcgtttattcaccaccgctgaaggataactggcgcggttttgctggattcggttatgccgatggacaatttagcgaaggaaaagggattgttcgcgactggcttgcgggtgttgagtggcggtcacgtaatatctggctcgaggcagagtacgctgaacgcgttttcaatcatgagcataaacccggcgcgcgcctgtctggctggtatgattttaatgataactggcgtattggttcgcaactggaacgcctctctcaccgcgttccattacgggcaatgaaaaatggtgttacaggcaacagtgctcaggcttatgttcgctggtatcaaaatgagcggcgtaagtacggtgtctcctgggctttcactgatttttccgacagtaaccagcgtcatgaagtctcacttgagggtcaggaacgcatctggtcttcaccatatttgattgtcgatttcctacccagtctgtattacgaacaaaatacagaacacgataccccatactacaaccctataaaaacgttcgatattgttccggcatttgaggcaagccatttgttatggcgaagctatgaaaatagctgggagcaaatattcagcgcaggtgttggtgcctcctggcaaaaacattatggcacggatgtcgtcacccaactcggctacgggcaacgcattagctggaatgacgtgattgatgctggcgcaacgctacgctgggaaaaacgaccttatgacggtgacagagaacacaacttatacgttgaattcgatatgacattcagattttaa

SEQ ID NO: 36910 - protein, 807 aa, Escherichia coli O157:H7 EDL933
  misc_feature (63)..(63): The Xaa at location 63 stands for Leu, or Phe.
MYSSSRKRCPKTKWALKLLTAAFLAASPAAKSAVNNAYDALIIEARKGNTQPALSWFALKSAXSNNQIADWLQIALWAGQDKQVITVYNRYRHQQLPARGYAAVAVAYRNLQQWQNSLTLWQKALSLEPQNKDYQRGQILTLADAGHYDTALVKLKQLNSGAPDKANLLAEAYIYKLAGRHQDELRAMTESLPENASTQQYPTEYVQALRNNQLAAAIDDANLTPDIRADIHAELVRLSFMPTRSESERYAIADRALAQYAALEILWHDNPDRTAQYQRIQVDHLGALLTRDRYKDVISHYQRLKKTGQIIPPWGQYWVASAYLKDHQPKKAQSIMTELFYHKETIAPDLSDEELADLFYSHLESENYPGALTVTQHTINTSPPFLRLMGTPTSIPNDTWLQGHSFLSTVAKYSNDLPQAEMTARELAYNAPGNQGLRIDYASVLQARGWPRAAENELKKAEVIEPRNINLEVEQAWTALTLQEWQQAAVLTHDVVEREPQDPGVVRLKRAVDVHNLAELRIAGSTGIDAEGPDSGKHDVDLTTIVYSPPLKDNWRGFAGFGYADGQFSEGKGIVRDWLAGVEWRSRNIWLEAEYAERVFNHEHKPGARLSGWYDFNDNWRIGSQLERLSHRVPLRAMKNGVTGNSAQAYVRWYQNERRKYGVSWAFTDFSDSNQRHEVSLEGQERIWSSPYLIVDFLPSLYYEQNTEHDTPYYNPIKTFDIVPAFEASHLLWRSYENSWEQIFSAGVGASWQKHYGTDVVTQLGYGQRISWNDVIDAGATLRWEKRPYDGDREHNLYVEFDMTFRF

SEQ ID NO: 36911 - DNA, 2532 bp, Yersinia pestis KIM
  CDS (1)..(2532): transl_table=11
atgtacgttcaggaagtcgctttccttgatcatcaaacaagttgctggcttaagggttatataatgtataacgcatttacaacactactgcgcccgttgcactggcacagaatgactttattagcgctatttatttctggctttgtcgttaatcctgctatggcggatacgcagtatgactcattaattattcgtgccagagccggtgatactgcgccagtcttggactatttacaggaagaatctaaagcgggtccattgcagagtgggcaggttgatgactggctgcaaattgcaggttgggcagggcgcgatcaagaagtgattgatgtttatgaacgatatcaatcttccatgaatatctcttccagaggtttggcttctgccgctcgagcttaccgcaacgaaaagcgctgggatcaggctttggccttgtggcaaagcagcttaaagaaagaccccaccaatcctgatcttatcagcggtatgatcatgactcaggctgatgctggacgcggtggggttgttttaaaacaggcaacagagttagccgagcgtgatcccacggtacaaaattacatgacgctgtcttatttaaaccgggctactgaccgtaattatgatgctttgcaagcctccagcgaagcggtgcgattggcaccaacatctgaagaagtgctcaaaaatcatctcgaaatattacagagaaaccgtattgttgagccagcgttacggcttgctaaagagaacccaaatttggtttctgctgagcattatcgccaacttgagcgcgatgctgctgcggaacaagttcggatggcggtgttgccaacgcgcagcgaaaccgagcgttttgacatagcggataaggcgttagcggattatcagaatttattgacccgttggggcaaagatccagaggcacaggctgactaccaacgcgcacgcattgaccgattaggggcgttattggtccgtcatcagacggctgatctgatcaaagagtatgaagcgatggaggctgagggctataaaatgcctgattatgcccgccgttgggcggcttctgcctatattgaccgaaggttgccggaaaaagcagcgcctatcctctccagcctctattattcagacggtaaaaccttccgtaacagcgacgatttgcttgatgccgatgatctttactattcactgaatgaaagcgaacaacttgataaagcctaccaatttgcggtcaattatagcgagcaaacgccgtatcaggttggggtttatggcctgccgggcaaagaaccgaatgatgattggattgaaggccaaacgctattggttcaatcattggtggcattgaatgatctgcccaccgcacaaaaaaaattggaagatttatccagtactgcacccgctaatcagaatttaaggatcgcattagccagtatttatctggcccgggatttaccgcgtaaagcggagcaagaattgaaggccgtggaatcattagcaccacgcagccttattctggaacgtgcgcaggctgaaactgcgatggcgctacaagaatggcatcagatggagttactgactgatgatgtgattagccgttccccagaagatatcccctctcaagaattagatcgccaacgtaaagtccataacatgtatgaactacgggtgagtggtaaccgcgttatctcctccaacagcccggtgagcggcaataaagattatggggtcgaaactctcctttacagcccacctattgcagagaattggcgcgtatttggtggcggcagttataacaatgggcagtttgaagaggggacggggattagccggattctgcgcttaggtggtgaatggacctcccgtgaccattgggttgaaggggaaatttccaatcagaattatggcaatggcaataaagtcggggcccgtttatcaacctggtacgaccttaatgaccactggcgtgtaggggggcaggttgaacgtttagctaaagacacaccactacgggcactgaagaataaagtgaccgcgaatagcgcgtctgcttatgttttctggaaagcagatgataagcgtgatgctgaacttagcgtgacgccgtcgcgtttttctgacggtaacaaccgttgggaatatgaatttaacgggcgtcagcgtatctggactgggccttacctaacggcagattttaatctggggttggcagccagccaaaacagtaaagaagatgtgatttactacaacccgaaacgtgattttgcttacgttccggcagtgactctcaatcacattatgtaccggcggtacaaaaccatctggagccagcaagtccaactgggtgtgggagggtactgggagaaaaattacggtaatggcttggtgaccacggcgggctatggccaacgtgttcaatggaatgatgttatcgataccggtgttgctgtggtttatgacaagcgtccttacgatggtaaacgtgagcacgatgttacgctttctttcgatttaaattatcgtttttaa

SEQ ID NO: 36912 - protein, 843 aa, Yersinia pestis KIM
MYVQEVAFLDHQTSCWLKGYIMYNAFTTLLRPLHWHRMTLLALFISGFVVNPAMADTQYDSLIIRARAGDTAPVLDYLQEESKAGPLQSGQVDDWLQIAGWAGRDQEVIDVYERYQSSMNISSRGLASAARAYRNEKRWDQALALWQSSLKKDPTNPDLISGMIMTQADAGRGGVVLKQATELAERDPTVQNYMTLSYLNRATDRNYDALQASSEAVRLAPTSEEVLKNHLEILQRNRIVEPALRLAKENPNLVSAEHYRQLERDAAAEQVRMAVLPTRSETERFDIADKALADYQNLLTRWGKDPEAQADYQRARIDRLGALLVRHQTADLIKEYEAMEAEGYKMPDYARRWAASAYIDRRLPEKAAPILSSLYYSDGKTFRNSDDLLDADDLYYSLNESEQLDKAYQFAVNYSEQTPYQVGVYGLPGKEPNDDWIEGQTLLVQSLVALNDLPTAQKKLEDLSSTAPANQNLRIALASIYLARDLPRKAEQELKAVESLAPRSLILERAQAETAMALQEWHQMELLTDDVISRSPEDIPSQELDRQRKVHNMYELRVSGNRVISSNSPVSGNKDYGVETLLYSPPIAENWRVFGGGSYNNGQFEEGTGISRILRLGGEWTSRDHWVEGEISNQNYGNGNKVGARLSTWYDLNDHWRVGGQVERLAKDTPLRALKNKVTANSASAYVFWKADDKRDAELSVTPSRFSDGNNRWEYEFNGRQRIWTGPYLTADFNLGLAASQNSKEDVIYYNPKRDFAYVPAVTLNHIMYRRYKTIWSQQVQLGVGGYWEKNYGNGLVTTAGYGQRVQWNDVIDTGVAVVYDKRPYDGKREHDVTLSFDLNYRF

SEQ ID NO: 36913 - DNA, 2463 bp, Erwinia carotovora subsp. atroseptica SCRI1043
  CDS (1)..(2463): transl_table=11
atgagttttgttaattctcattcaagcagactcaatccaatattgtttaacttacttaaatcattagtttatttttccgtttctggcggcgtagtggcggcagaatctcgttacgacacattaatcatcaacgcccagcagggcgatatctccgcggcgacgtcatggcttgatgggcaatccagaaatcgcgtactgaccgctgccgaggtgaccgactggctgctaattaacggttgggcgggaaaggatgctgacgtgagacgaatttgggaaacttattcgccagtgatgtcattgcccgatcctgccttgagagcggcggctaaatcctaccgtaacctccggcagtggccgtcgtcagtagaattatggagccgggttttgcaacgctcgccacgggatgacgatgcacgtagtggtttgatactcaccctcgccgatgccggacagacaaaaagagcgctggaactcgctgcgtctcgcgttaagcaggagccaacggcaaaccattggcgtgaattagcgtgggtgcaacgcattgcgggaaagcatactgactccctcttttctatcattcaagccatgcgtcatgcaccacaggataaagcgctgttttatgagtatagcgacattctctccaataataagattagcgcacctgcgttaacagccctggaaaacggcaaaccttacagcttccagattgatgaaacgcaacgccagcgagagctggggcgggcggctgagtgggttcgtcttgcgtttatcacgtcgacaacggaaaacgaacgcttcgttgtggcggatcgcgcgttggcgcgttatgacatcttgatgactcaatggcgaaggctcccatcggcaaaaatcagctatcgccaggctcgaattgatcggttaggcgcattgctcgttcgctatcgcatggaagagattatttcggaataccaatcacttctcaaagaaggggagatacccatttatgctcggcgctgggtcgcttctgcttatctttattcgaagcagccggagaaagcagagcaaattctcagtgcggtaatacaaaaagagccttctcaacactttcaggtagcgctgcaaggcgattttttctacagcattttggagagtgagaaaattgaacaagcaacacagttgtcagttcaggctggagaaaaaacaccttataaaaaaagtgtttatggtttaccaacattcatacctaacgacgattggattgacatcaaatacctgcgcatacaatcgctgatttcccataacgaccttccggctgcgcaacgactggcggaacgtctggcctttagtgggccgggaaaccaagatctaaacctacgtttggcgggggtttatctaaccagagggtggccacgtcgtgccgaagcgttattaaagcgagcagagttgctggaaccgacattcttccgattggaaacccagcaagggcttacggccttggaattgcaggaatggcgccagcttgagcagttgactgacgatacggtagctcgctatccggaagatttctctgtgaaacgattagcgcgtttgcgccaggtacatcacatggcggagctgcgtgttgcgggtactcagggcctcaaatctgacagtcctgccaagggaatgaacgacacggatattgatgccgtgctctatagcccaccctttgccgaccattggcgagtgttctctgggggcgcttttaatcaaagtgatttcagtgacggacgcgccattaatcgcagtattcgcggcggtgtggaatttaccgaccgtgatcattgggttgaggctgagctttcacaccgaaattttggatttggctctgatatcggtgggcgtttctcctatcggcgtgatgttaatgatttttggcgtgtcggccttaatgccgaacggctaatgcgcagcacaccgctacaggcacttaaaaatggcgtaacggcgaatggcggtggagggtatgtccgctggcggcaaagtgaacggcgttcatggcaagcagatctatcgaacgggtggttttctgatggtaacagacgtcaggagtacggactgagtgggcaagaacgaattttttcatcaccgactttagccatagatttcaccccgtcgctaagtttgggatcaaacagtaaacagaacacctcgtattacaacccgcagagttatgtagctgtgctacccgctttagccatcgatcacttgctttatcgacattaccagacggagtggcatcaagagataaatgcgggtgtcgggcgttactggcaaaaaggcgagtccgctggggctatcaccacgctcggatacgggcaacgggtacggtggaatgacgtactggatatgggcgcgagcgttcagtgggataagcggccttatgacggcaagcgggagcaaaatgtgtcgctgtctttcgatttgaattatcgattttga

SEQ ID NO: 36914 - protein, 820 aa, Erwinia carotovora subsp. atroseptica SCRI1043
MSFVNSHSSRLNPILFNLLKSLVYFSVSGGVVAAESRYDTLIINAQQGDISAATSWLDGQSRNRVLTAAEVTDWLLINGWAGKDADVRRIWETYSPVMSLPDPALRAAAKSYRNLRQWPSSVELWSRVLQRSPRDDDARSGLILTLADAGQTKRALELAASRVKQEPTANHWRELAWVQRIAGKHTDSLFSIIQAMRHAPQDKALFYEYSDILSNNKISAPALTALENGKPYSFQIDETQRQRELGRAAEWVRLAFITSTTENERFVVADRALARYDILMTQWRRLPSAKISYRQARIDRLGALLVRYRMEEIISEYQSLLKEGEIPIYARRWVASAYLYSKQPEKAEQILSAVIQKEPSQHFQVALQGDFFYSILESEKIEQATQLSVQAGEKTPYKKSVYGLPTFIPNDDWIDIKYLRIQSLISHNDLPAAQRLAERLAFSGPGNQDLNLRLAGVYLTRGWPRRAEALLKRAELLEPTFFRLETQQGLTALELQEWRQLEQLTDDTVARYPEDFSVKRLARLRQVHHMAELRVAGTQGLKSDSPAKGMNDTDIDAVLYSPPFADHWRVFSGGAFNQSDFSDGRAINRSIRGGVEFTDRDHWVEAELSHRNFGFGSDIGGRFSYRRDVNDFWRVGLNAERLMRSTPLQALKNGVTANGGGGYVRWRQSERRSWQADLSNGWFSDGNRRQEYGLSGQERIFSSPTLAIDFTPSLSLGSNSKQNTSYYNPQSYVAVLPALAIDHLLYRHYQTEWHQEINAGVGRYWQKGESAGAITTLGYGQRVRWNDVLDMGASVQWDKRPYDGKREQNVSLSFDLNYRF

SEQ ID NO: 36915 - DNA, 2469 bp, Yersinia pseudotuberculosis IP 32953
  CDS (1)..(2469): transl_table=11
atgtataacgcatttacaacactactgcgcccgttgcactggcacagaatgactttattagcgctatttatttctggctttgtcgttaatcctgctatggcggatacgcagtatgactcattaattattcgtgccagagccggtgatactgcgccagtcttggactatttacaggaagaatctaaagcgggtccattgcagagtgggcaggttgatgactggctgcaaattgcaggttgggcagggcgcgatcaagaagtgattgatgtttatgaacgatatcaatcttccatgaatatctcttccagaggtttggcttctgccgctcgagcttaccgcaacgaaaagcgctgggatcaggctttggccttgtggcaaagcagcttaaagaaagaccccaccaatcctgatcttatcagcggtatgatcatgactcaggctgatgctggacgcggtggggttgttttaaaacaggcaacagagttagccgagcgtgatcccacggtacaaaattacatgacgctgtcttatttaaaccgggctactgaccgtaattatgatgctttgcaagcctccagcgaagcggtgcgattggcaccaacgtctgaagacgtgctcaaaaatcatctcgaaatcttacagagaaaccgtattgttgagccagcgttacggcttgctaaagagaacccaaatttggtttctgctgagcattatcgccaacttgagcgcgatgctgctgcggaacaagttcggatggcggtgttgccaacgcgcagcgaaaccgagcgttttgacatagcggataaggcgttagcggattatcagaatttattgacccgttggggcaaagatccagaggcacaggctgactaccaacgcgcacgcattgaccgattaggggcgttattggtccgtcatcagacggctgatctgatcaaagagtatgaagcgatggaggctgagggctataaaatgcctgattatgcccgccgttgggcggcttctgcctatattgaccgaaggttgccggaaaaagcagcgcctatcctctccagcctctattattcagacggtaaaaccttccgtaacagcgacgatttgcttgatgccgatgatctttactattcactgaatgaaagcgaacaacttgataaagcctaccaatttgcggtcaattatagcgagcaaacgccgtatcaggttggggtttatggcctgccgggcaaagaaccgaatgatgattggattgaaggccaaacgctattggttcaatcattggtggcattgaatgatctgcccaccgcacaaaaaaaattggaagatttatccagtactgcacccgctaatcagaatttaaggatcgcattagccagtatttatctggcccgggatttaccgcgtaaagcggagcaagaattgaaggccgtggaatcattagcaccacgcagccttattctggaacgtgcgcaggctgaaactgcgatggcgctacaagaatggcatcagatggagttactgactgatgatgtgattagccgttccccagaagatatcccctctcaagaattagatcgccaacgtaaagtccataacatgtatgaactacgggtgagtggtaaccgcgttatctcctccaacagcccggtgagcggcaataaagattatggggtcgaaactctcctttacagcccacctattgcagagaattggcgcgtatttggtggcggcagttataacaatgggcagtttgaagaggggacggggattagccggattctgcgcttaggtggtgaatggacctcccgtgaccattgggttgaaggggaaatttccaatcagaattatggcaatggcaataaagtcggggcccgtttatcaacctggtacgaccttaatgaccactggcgtgtaggggggcaggttgaacgtttagctaaagacacaccactacgggcactgaagaataaagtgaccgcgaatagcgcgtctgcttatgttttctggaaagcagatgataagcgtgatgctgaacttagcgtgacgccgtcgcgtttttctgacggtaacaaccgttgggaatatgaatttaacgggcgtcagcgtatctggactgggccttacctaacggcagattttaatctggggttggcagccagccaaaacagtaaagaagatgtgatttactacaacccgaaacgtgattttgcttacgttccggcagtgactctcaatcacattatgtaccggcggtacaaaaccatctggagccagcaagtccaactgggtgtgggagggtactgggagaaaaattacggtaatggcttggtgaccacggcgggctatggccaacgtgttcaatggaatgatgttatcgataccggtgttgctgtggtttatgacaagcgtccttacgatggtaaacgtgagcacgatgttacgctttctttcgatttaaattatcgtttttaa

SEQ ID NO: 36916 - protein, 822 aa, Yersinia pseudotuberculosis IP 32953
MYNAFTTLLRPLHWHRMTLLALFISGFVVNPAMADTQYDSLIIRARAGDTAPVLDYLQEESKAGPLQSGQVDDWLQIAGWAGRDQEVIDVYERYQSSMNISSRGLASAARAYRNEKRWDQALALWQSSLKKDPTNPDLISGMIMTQADAGRGGVVLKQATELAERDPTVQNYMTLSYLNRATDRNYDALQASSEAVRLAPTSEDVLKNHLEILQRNRIVEPALRLAKENPNLVSAEHYRQLERDAAAEQVRMAVLPTRSETERFDIADKALADYQNLLTRWGKDPEAQADYQRARIDRLGALLVRHQTADLIKEYEAMEAEGYKMPDYARRWAASAYIDRRLPEKAAPILSSLYYSDGKTFRNSDDLLDADDLYYSLNESEQLDKAYQFAVNYSEQTPYQVGVYGLPGKEPNDDWIEGQTLLVQSLVALNDLPTAQKKLEDLSSTAPANQNLRIALASIYLARDLPRKAEQELKAVESLAPRSLILERAQAETAMALQEWHQMELLTDDVISRSPEDIPSQELDRQRKVHNMYELRVSGNRVISSNSPVSGNKDYGVETLLYSPPIAENWRVFGGGSYNNGQFEEGTGISRILRLGGEWTSRDHWVEGEISNQNYGNGNKVGARLSTWYDLNDHWRVGGQVERLAKDTPLRALKNKVTANSASAYVFWKADDKRDAELSVTPSRFSDGNNRWEYEFNGRQRIWTGPYLTADFNLGLAASQNSKEDVIYYNPKRDFAYVPAVTLNHIMYRRYKTIWSQQVQLGVGGYWEKNYGNGLVTTAGYGQRVQWNDVIDTGVAVVYDKRPYDGKREHDVTLSFDLNYRF

SEQ ID NO: 36917 - DNA, 2481 bp, Pseudomonas fluorescens PfO-1
  CDS (1)..(2481): transl_table=11
atgccgcgtattgatggtcctgtattacatcgtggtttacgccctttgtttcgagtcgcgctgtgcagccagttgctctggccggcgttcgcgttcgccgacacggcctacgatcaaatggtgcttgacgcccgggccgggcattacacgcccgcgctgagcgtgttgcgtcaggtgccgccggcccaggccagcaccggccaagtcagcgatcacctgcaaatcgccagttgggccgggctcgacgccgaagtggtgcaggtctacgagactcagggccgtgagcgtgcactgccggttcaggcgctgaccgccaccgcccgggcctaccgcaacctgaaacgctgggatcaggcgatccaggtctacaacaaggccctgacgctggagccggacaacgctgacctgcaactcggtctggcgctgacccaggccgactccggcaagcctgacgaaggcgtgatccgcgcccgttcgctggtcgccgccaaacccgatgatccttcccgccgactggcgctgggctacgccctgaatcgcgccggcaagccgtacgacgcgctgttcgaatacgaccaggccttcatccgcgccggcaacaaacccgaggtcgcccgcgaatacgtggtcgccctgcaaaaggcgcgtctgccggagccggcgctgcgtcttgccagacagcgtccggggttgatcgatccggtcaccttgcggcgtctggcaggcgatctggccgctgaacgcgtgcgcctcgccgaactggccacccgcagcgaaaaagaacgctacgtgatcgccgaccgcgccctggccgactacgaccagctcctcgccacctggactccggacgccaccgcccacgacgacgtgacccgctggcgcatcgaccgcttgggcgcactcaaggcccgagcgcgcaccgccgaagtcatcagcgaatatcagaagctgcaagccgaaggcgtgaagatcccgacctacgccctgcgctgggtggcggcgtcctatctggatcagcgccagccggaaatcgccaccgatctctaccgtcaggtgctggcagcgccagatgccgatgtcggtgaccgactcgaagacaccacggcgctgtattactcgctgctggaaagcgaccgcgctgaagaggcgcgcaaagtcgctgaagatcaggccagtgcgcagaagccgcgcgtcgaactcaagggcctgccgatcggcaaccccaacgacgaatggatggacgcccagcaactggcggcacaggccggcacctatggctccgacctgcctcacggcgaggagcgcttgcagaccttggtggatcaggcgccgggcaacatcggcctgcgcctggcccaggccgatctgtacctggcccgaaactggccgcgccgcgctgaaaaccagctcaaggaaaccgagagcatcgcgccgcgcgacacgggtttggaagtcgcgcaggctcgcaccgcgatggacttgcaggaatggcggcaaatggatgcgctgaccgatgacgtggtggcgcgcttcctcgacaaccgtcaggtccagcgtctggcccgcgagcgtgaagtgcacgacatgtccgagctgcgtgtcgaagcctatggcggcaaggctaacggaggcagcggtggcgatgccggcgcggtctccggtagccgggatttcggcatccagaccaccctttacagcccgccgatcgatgaggactggcgagtgttcgccggggccggatacgccaccggcgattttgccgaaggcaccggccaccaccgcttccagcgtgtcggcctggagcgtcgcacccgcgacatgaccctcgaagccgaagtgtcgaatcattcctacggtttcggcgacaaacagggcgcgcgtctggcgattgcccgcgatatcaacgaccactggcaatacggcggcagccttgaatacctctcggccgaaactccgctgcgggcattgaacagcgacatcaaggccaacggcggcagcggtttcatccgttggcgcgccaacgagagccgcgagtggcggctggcggtcagcccgtcgcacttcagcgacggcaacaaccgcgtcgaagccttgctgaccggaaaagagggcgtctacagcgcgccgaacctgcaagtcgacgcgggcctggaagtgggcaccagccacaactccaagtccgatgacgtgccgtacttcaacccgaagtcggacttcagtgtcatgccgctgctcaacgtcaatcacgtgctgtaccaccgctacgaaaccgcctggagccagcagttccaggccggtgcggggacttacagccagcgtgatcacggcaccggcggcatggcattgctcggttacggccagcgctacgcctggaacgacgtgttcgaggtgggcggtttgttcagcgtgatcaaccggccctacgacggtgaccgggaaaccgatctgcgtctgctcgtcgacctcactttccgcttctag

SEQ ID NO: 36918 - protein, 826 aa, Pseudomonas fluorescens PfO-1
MPRIDGPVLHRGLRPLFRVALCSQLLWPAFAFADTAYDQMVLDARAGHYTPALSVLRQVPPAQASTGQVSDHLQIASWAGLDAEVVQVYETQGRERALPVQALTATARAYRNLKRWDQAIQVYNKALTLEPDNADLQLGLALTQADSGKPDEGVIRARSLVAAKPDDPSRRLALGYALNRAGKPYDALFEYDQAFIRAGNKPEVAREYVVALQKARLPEPALRLARQRPGLIDPVTLRRLAGDLAAERVRLAELATRSEKERYVIADRALADYDQLLATWTPDATAHDDVTRWRIDRLGALKARARTAEVISEYQKLQAEGVKIPTYALRWVAASYLDQRQPEIATDLYRQVLAAPDADVGDRLEDTTALYYSLLESDRAEEARKVAEDQASAQKPRVELKGLPIGNPNDEWMDAQQLAAQAGTYGSDLPHGEERLQTLVDQAPGNIGLRLAQADLYLARNWPRRAENQLKETESIAPRDTGLEVAQARTAMDLQEWRQMDALTDDVVARFLDNRQVQRLAREREVHDMSELRVEAYGGKANGGSGGDAGAVSGSRDFGIQTTLYSPPIDEDWRVFAGAGYATGDFAEGTGHHRFQRVGLERRTRDMTLEAEVSNHSYGFGDKQGARLAIARDINDHWQYGGSLEYLSAETPLRALNSDIKANGGSGFIRWRANESREWRLAVSPSHFSDGNNRVEALLTGKEGVYSAPNLQVDAGLEVGTSHNSKSDDVPYFNPKSDFSVMPLLNVNHVLYHRYETAWSQQFQAGAGTYSQRDHGTGGMALLGYGQRYAWNDVFEVGGLFSVINRPYDGDRETDLRLLVDLTFRF

SEQ ID NO: 36919 - DNA, 26 bp, Artificial sequence
  primer
atgtattcaagtagcagaaaaaggtg

SEQ ID NO: 36920 - DNA, 27 bp, Artificial sequence
  primer
ttaaaatctgaatgtcatatcgaattc

SEQ ID NO: 36921 - protein, 825 aa, Artificial sequence
  consensus sequence
  Variant (3)..(3): Xaa in position 3 is any amino acid
  Variant (4)..(13): Xaa in position 4 to 13 is any or no amino acid
  Variant (15)..(30): Xaa in position 15 to 30 is any amino acid
  Variant (33)..(33): Xaa in position 33 is any amino acid
  Variant (37)..(37): Xaa in position 37 is any amino acid
  Variant (40)..(40): Xaa in position 40 is any amino acid
  Variant (42)..(44): Xaa in position 42 to 44 is any amino acid
  Variant (46)..(46): Xaa in position 46 is any amino acid
  Variant (48)..(53): Xaa in position 48 to 53 is any amino acid
  Variant (55)..(59): Xaa in position 55 to 59 is any amino acid
  Variant (60)..(62): Xaa in position 60 to 62 is any or no amino acid
  Variant (64)..(65): Xaa in position 64 to 65 is any amino acid
  Variant (72)..(72): Xaa in position 72 is any amino acid
  Variant (76)..(76): Xaa in position 76 is any amino acid
  Variant (78)..(79): Xaa in position 78 to 79 is any amino acid
  Variant (81)..(82): Xaa in position 81 to 82 is any amino acid
  Variant (85)..(86): Xaa in position 85 to 86 is any amino acid
  Variant (88)..(100): Xaa in position 88 to 100 is any amino acid
  Variant (101)..(101): Xaa in position 101 is any or no amino acid
  Variant (103)..(103): Xaa in position 103 is any amino acid
  Variant (108)..(110): Xaa in position 108 to 110 is any amino acid
  Variant (112)..(116): Xaa in position 112 to 116 is any amino acid
  Variant (119)..(121): Xaa in position 119 to 121 is any amino acid
  Variant (123)..(125): Xaa in position 123 to 125 is any amino acid
  Variant (127)..(127): Xaa in position 127 is any amino acid
  Variant (129)..(129): Xaa in position 129 is any amino acid
  Variant (131)..(133): Xaa in position 131 to 133 is any amino acid
  Variant (135)..(135): Xaa in position 135 is any amino acid
  Variant (137)..(137): Xaa in position 137 is any amino acid
  Variant (139)..(139): Xaa in position 139 is any amino acid
  Variant (144)..(169): Xaa in position 144 to 169 is any amino acid
  Variant (170)..(170): Xaa in position 170 is any or no amino acid
  Variant (172)..(180): Xaa in position 172 to 180 is any amino acid
  Variant (182)..(182): Xaa in position 182 is any amino acid
  Variant (184)..(206): Xaa in position 184 to 206 is any amino acid
  Variant (208)..(209): Xaa in position 208 to 209 is any amino acid
  Variant (211)..(214): Xaa in position 211 to 214 is any amino acid
  Variant (215)..(215): Xaa in position 215 is any or no amino acid
  Variant (217)..(219): Xaa in position 217 to 219 is any amino acid
  Variant (221)..(223): Xaa in position 221 to 223 is any amino acid
  Variant (225)..(228): Xaa in position 225 to 228 is any amino acid
  Variant (229)..(239): Xaa in position 229 to 239 is any or no amino acid
  Variant (241)..(242): Xaa in position 241 to 242 is any amino acid
  Variant (245)..(245): Xaa in position 245 is any amino acid
  Variant (248)..(252): Xaa in position 248 to 252 is any amino acid
  Variant (257)..(257): Xaa in position 257 is any amino acid
  Variant (260)..(261): Xaa in position 260 to 261 is any amino acid
  Variant (265)..(265): Xaa in position 265 is any amino acid
  Variant (269)..(269): Xaa in position 269 is any amino acid
  Variant (271)..(272): Xaa in position 271 to 272 is any amino acid
  Variant (274)..(276): Xaa in position 274 to 276 is any amino acid
  Variant (278)..(280): Xaa in position 278 to 280 is any amino acid
  Variant (282)..(286): Xaa in position 282 to 286 is any amino acid
  Variant (288)..(288): Xaa in position 288 is any amino acid
  Variant (290)..(292): Xaa in position 290 to 292 is any amino acid
  Variant (294)..(294): Xaa in position 294 is any amino acid
  Variant (300)..(300): Xaa in position 300 is any amino acid
  Variant (302)..(307): Xaa in position 302 to 307 is any amino acid
  Variant (309)..(310): Xaa in position 309 to 310 is any amino acid
  Variant (312)..(317): Xaa in position 312 to 317 is any amino acid
  Variant (319)..(320): Xaa in position 319 to 320 is any amino acid
  Variant (321)..(321): Xaa in position 321 is any or no amino acid
  Variant (323)..(327): Xaa in position 323 to 327 is any amino acid
  Variant (329)..(329): Xaa in position 329 is any amino acid
  Variant (334)..(338): Xaa in position 334 to 338 is any amino acid
  Variant (340)..(340): Xaa in position 340 is any amino acid
  Variant (343)..(344): Xaa in position 343 to 344 is any amino acid
  Variant (346)..(364): Xaa in position 346 to 364 is any amino acid
  Variant (365)..(367): Xaa in position 365 to 367 is any or no amino acid
  Variant (370)..(370): Xaa in position 370 is any amino acid
  Variant (373)..(374): Xaa in position 373 to 374 is any amino acid
  Variant (378)..(381): Xaa in position 378 to 381 is any amino acid
  Variant (383)..(393): Xaa in position 383 to 393 is any amino acid
  Variant (395)..(400): Xaa in position 395 to 400 is any amino acid
  Variant (402)..(402): Xaa in position 402 is any amino acid
  Variant (404)..(406): Xaa in position 404 to 406 is any amino acid
  Variant (410)..(410): Xaa in position 410 is any amino acid
  Variant (412)..(425): Xaa in position 412 to 425 is any amino acid
  Variant (430)..(430): Xaa in position 430 is any amino acid
  Variant (432)..(437): Xaa in position 432 to 437 is any amino acid
  Variant (439)..(441): Xaa in position 439 to 441 is any amino acid
  Variant (444)..(444): Xaa in position 444 is any amino acid
  Variant (447)..(447): Xaa in position 447 is any amino acid
  Variant (450)..(452): Xaa in position 450 to 452 is any amino acid
  Variant (454)..(457): Xaa in position 454 to 457 is any amino acid
  Variant (460)..(461): Xaa in position 460 to 461 is any amino acid
  Variant (464)..(464): Xaa in position 464 is any amino acid
  Variant (467)..(468): Xaa in position 467 to 468 is any amino acid
  Variant (471)..(472): Xaa in position 471 to 472 is any amino acid
  Variant (474)..(476): Xaa in position 474 to 476 is any amino acid
  Variant (479)..(481): Xaa in position 479 to 481 is any amino acid
  Variant (484)..(485): Xaa in position 484 to 485 is any amino acid
  Variant (488)..(488): Xaa in position 488 is any amino acid
  Variant (491)..(492): Xaa in position 491 to 492 is any amino acid
  Variant (497)..(497): Xaa in position 497 is any amino acid
  Variant (499)..(501): Xaa in position 499 to 501 is any amino acid
  Variant (504)..(504): Xaa in position 504 is any amino acid
  Variant (507)..(508): Xaa in position 507 to 508 is any amino acid
  Variant (510)..(510): Xaa in position 510 is any amino acid
  Variant (512)..(512): Xaa in position 512 is any amino acid
  Variant (514)..(518): Xaa in position 514 to 518 is any amino acid
  Variant (520)..(520): Xaa in position 520 is any amino acid
  Variant (522)..(524): Xaa in position 522 to 524 is any amino acid
  Variant (527)..(529): Xaa in position 527 to 529 is any amino acid
  Variant (533)..(534): Xaa in position 533 to 534 is any amino acid
  Variant (536)..(543): Xaa in position 536 to 543 is any amino acid
  Variant (545)..(545): Xaa in position 545 is any amino acid
  Variant (546)..(551): Xaa in position 546 to 551 is any or no amino acid
  Variant (554)..(555): Xaa in position 554 to 555 is any amino acid
  Variant (557)..(560): Xaa in position 557 to 560 is any amino acid
  Variant (562)..(563): Xaa in position 562 to 563 is any amino acid
  Variant (568)..(571): Xaa in position 568 to 571 is any amino acid
  Variant (574)..(574): Xaa in position 574 is any amino acid
  Variant (576)..(576): Xaa in position 576 is any amino acid
  Variant (578)..(579): Xaa in position 578 to 579 is any amino acid
  Variant (581)..(582): Xaa in position 581 to 582 is any amino acid
  Variant (584)..(584): Xaa in position 584 is any amino acid
  Variant (586)..(586): Xaa in position 586 is any amino acid
  Variant (589)..(589): Xaa in position 589 is any amino acid
  Variant (592)..(592): Xaa in position 592 is any amino acid
  Variant (594)..(597): Xaa in position 594 to 597 is any amino acid
  Variant (599)..(599): Xaa in position 599 is any amino acid
  Variant (601)..(603): Xaa in position 601 to 603 is any amino acid
  Variant (605)..(606): Xaa in position 605 to 606 is any amino acid
  Variant (608)..(608): Xaa in position 608 is any amino acid
  Variant (610)..(610): Xaa in position 610 is any amino acid
  Variant (612)..(621): Xaa in position 612 to 621 is any amino acid
  Variant (623)..(623): Xaa in position 623 is any amino acid
  Variant (629)..(631): Xaa in position 629 to 631 is any amino acid
  Variant (633)..(633): Xaa in position 633 is any amino acid
  Variant (636)..(636): Xaa in position 636 is any amino acid
  Variant (639)..(639): Xaa in position 639 is any amino acid
  Variant (641)..(643): Xaa in position 641 to 643 is any amino acid
  Variant (647)..(650): Xaa in position 647 to 650 is any amino acid
  Variant (655)..(655): Xaa in position 655 is any amino acid
  Variant (658)..(658): Xaa in position 658 is any amino acid
  Variant (661)..(661): Xaa in position 661 is any amino acid
  Variant (663)..(666): Xaa in position 663 to 666 is any amino acid
  Variant (669)..(669): Xaa in position 669 is any amino acid
  Variant (671)..(675): Xaa in position 671 to 675 is any amino acid
  Variant (677)..(686): Xaa in position 677 to 686 is any amino acid
  Variant (690)..(690): Xaa in position 690 is any amino acid
  Variant (692)..(692): Xaa in position 692 is any amino acid
  Variant (694)..(694): Xaa in position 694 is any amino acid
  Variant (696)..(699): Xaa in position 696 to 699 is any amino acid
  Variant (701)..(702): Xaa in position 701 to 702 is any amino acid
  Variant (705)..(707): Xaa in position 705 to 707 is any amino acid
  Variant (709)..(709): Xaa in position 709 is any amino acid
  Variant (711)..(712): Xaa in position 711 to 712 is any amino acid
  Variant (715)..(717): Xaa in position 715 to 717 is any amino acid
  Variant (719)..(722): Xaa in position 719 to 722 is any amino acid
  Variant (724)..(726): Xaa in position 724 to 726 is any amino acid
  Variant (727)..(727): Xaa in position 727 is any or no amino acid
  Variant (729)..(730): Xaa in position 729 to 730 is any amino acid
  Variant (735)..(737): Xaa in position 735 to 737 is any amino acid
  Variant (739)..(741): Xaa in position 739 to 741 is any amino acid
  Variant (744)..(747): Xaa in position 744 to 747 is any amino acid
  Variant (749)..(751): Xaa in position 749 to 751 is any amino acid
  Variant (753)..(753): Xaa in position 753 is any amino acid
  Variant (755)..(757): Xaa in position 755 to 757 is any amino acid
  Variant (759)..(759): Xaa in position 759 is any amino acid
  Variant (761)..(764): Xaa in position 761 to 764 is any amino acid
  Variant (768)..(769): Xaa in position 768 to 769 is any amino acid
  Variant (771)..(771): Xaa in position 771 is any amino acid
  Variant (773)..(774): Xaa in position 773 to 774 is any amino acid
  Variant (776)..(779): Xaa in position 776 to 779 is any amino acid
  Variant (781)..(782): Xaa in position 781 to 782 is any amino acid
  Variant (788)..(789): Xaa in position 788 to 789 is any amino acid
  Variant (794)..(794): Xaa in position 794 is any amino acid
  Variant (796)..(796): Xaa in position 796 is any amino acid
  Variant (798)..(803): Xaa in position 798 to 803 is any amino acid
  Variant (810)..(810): Xaa in position 810 is any amino acid
  Variant (813)..(818): Xaa in position 813 to 818 is any amino acid
  Variant (821)..(823): Xaa in position 821 to 823 is any amino acid
LLXXXXXXXXXXXAXXXXXXXXXXXXXXXXYDXLIIXARXGXXXPXLXXXXXXSXXXXXXXXQXXDWLQIAXWAGXDXXVXXVYXXYXXXXXXXXXXXXXXAXAYRNXXXWXXXXXLWXXXLXXXPXNXDXXXGXIXTXADAGXXXXXXXXXXXXXXXXXXXXXXXXXXXYXXXXXXXXXDXLXXXXXXXXXXXXXXXXXXXXXXXLXXNXXXXXAXXXAXXXPXXXXXXXXXXXXXXXDXXAEXVRXXXXXTRSEXERXXIADXALAXYXXLXXXWXXXPXXXXXYXRXXXDXLGALLXRXXXXXXIXXYXXXXXXGXXXPXXXXXWXASAYXXXXXPXKAXXIXXXXXXXXXXXXXXXXXXXXXXDLXYSXXESEXXXXAXXXXXXXXXXXPXXXXXXGXPXXXPNDXWXXXXXXXXXXXXXXNDLPXAXXXXXXLXXXAPXNQXLRXXXAXXXXARXXPRXAEXXLKXXEXXXPRXXXLEXXQAXTAXXLQEWXQXXXLTXDVXXRXPXDXXXXXLXRXXXVHXXXELRXXGXXXXXXXXPXXXXXXXSGXXDXXXXTXXYSPPXXXXWRXFXGXXYXXGXFXEGXGIXRXXXXGXEXXXRXXWXEXEXXXXXXXXXXKXGARLSXXXDXNDXWRXGXXXERLXXXXPLRAXKNXVTXNXXXXYVXWXXXXXRXXXXXXXXXXFSDXNXRXEXXXXGXXRIXXXPXLXXDFXXXLXXXXNXXXXDXXYYNPXXXFXXXPAXXXXHXXXRXYXXXWXQXXXXGVGXXWXKXXGXXXXTXXGYGQRXXWNDVXDXGXXXXXXKRPYDGXREXXXXXXFDXXXRF

SEQ ID NO: 36922 - protein, 33 aa, Artificial sequence
  protein pattern
  Variant (2)..(2): Xaa in position 2 is any or no amino acid
  Variant (4)..(4): Xaa in position 4 is any amino acid
  Variant (5)..(5): Xaa in position 5 is any or no amino acid
  Variant (7)..(7): Xaa in position 7 is Glu or Gln
  Variant (9)..(10): Xaa in position 9 to 10 is any amino acid
  Variant (11)..(11): Xaa in position 11 is Gly or Ser
  Variant (12)..(12): Xaa in position 12 is Ala, Asn or Thr
  Variant (13)..(13): Xaa in position 13 is Asp or Gly
  Variant (14)..(14): Xaa in position 14 is Ala, Leu or Val
  Variant (15)..(15): Xaa in position 15 is Ile or Val
  Variant (17)..(17): Xaa in position 17 is Gln or Thr
  Variant (18)..(18): Xaa in position 18 is Ala or Leu
  Variant (24)..(24): Xaa in position 24 is Ile or Val
  Variant (25)..(25): Xaa in position 25 is Gln, Arg or Ser
  Variant (30)..(30): Xaa in position 30 is Ile or Leu
  Variant (32)..(32): Xaa in position 32 is any amino acid
VXGXXWXKXXXXXXXTXXGYGQRXXWNDVXDXG

SEQ ID NO: 36923 - protein, 60 aa, Artificial sequence
  protein pattern
  Variant (5)..(5): Xaa in position 5 is Ile or Leu
  Variant (6)..(6): Xaa in position 6 is any amino acid
  Variant (7)..(7): Xaa in position 7 is Asp or Glu
  Variant (8)..(8): Xaa in position 8 is Asp or Asn
  Variant (11)..(11): Xaa in position 11 is Gly or Val
  Variant (13)..(13): Xaa in position 13 is Ala or Gly
  Variant (15)..(15): Xaa in position 15 is any or no amino acid
  Variant (17)..(17): Xaa in position 17 is any or no amino acid
  Variant (19)..(19): Xaa in position 19 is Ala or Asn
  Variant (20)..(20): Xaa in position 20 is Asp, Asn or Thr
  Variant (22)..(22): Xaa in position 22 is Asp or Gln
  Variant (24)..(24): Xaa in position 24 is any or no amino acid
  Variant (27)..(27): Xaa in position 27 is any amino acid
  Variant (29)..(30): Xaa in position 29 to 30 is any amino acid
  Variant (32)..(34): Xaa in position 32 to 34 is any amino acid
  Variant (35)..(35): Xaa in position 35 is Ala, Leu or Val
  Variant (37)..(37): Xaa in position 37 is Gly, Leu or Val
  Variant (39)..(40): Xaa in position 39 to 40 is any amino acid
  Variant (41)..(41): Xaa in position 41 is Ser or Thr
  Variant (43)..(43): Xaa in position 43 is Asp or Asn
  Variant (44)..(45): Xaa in position 44 to 45 is any amino acid
  Variant (46)..(46): Xaa in position 46 is Leu or Val
  Variant (48)..(48): Xaa in position 48 is Ala or Gly
  Variant (50)..(50): Xaa in position 50 is any amino acid
  Variant (51)..(51): Xaa in position 51 is Ala or Ser
  Variant (52)..(52): Xaa in position 52 is Glu or Asn
  Variant (53)..(53): Xaa in position 53 is any amino acid
  Variant (54)..(54): Xaa in position 54 is Asn, Ser or Val
  Variant (55)..(55): Xaa in position 55 is Phe or Tyr
  Variant (56)..(56): Xaa in position 56 is Gly or Asn
  Variant (57)..(57): Xaa in position 57 is any amino acid
  Variant (58)..(58): Xaa in position 58 is Glu or Gly
  Variant (59)..(59): Xaa in position 59 is any amino acid
YSPPXXXXWRXFXGXGXYXXGXFXEGXGXXRXXXXGXEXXXRXXXXEXEXXXXXXXXXXK

SEQ ID NO: 36924 - protein, 60 aa, Artificial sequence
  protein pattern
  Variant (3)..(3): Xaa in position 3 is any amino acid
  Variant (6)..(6): Xaa in position 6 is Ile or Val
  Variant (8)..(8): Xaa in position 8 is any amino acid
  Variant (9)..(9): Xaa in position 9 is Asn or Gln
  Variant (10)..(10): Xaa in position 10 is Ala, Leu or Val
  Variant (14)..(14): Xaa in position 14 is any amino acid
  Variant (15)..(15): Xaa in position 15 is His, Lys or Arg
  Variant (16)..(16): Xaa in position 16 is Asp, Arg or Ser
  Variant (17)..(17): Xaa in position 17 is Thr or Val
  Variant (20)..(20): Xaa in position 20 is Gln or Arg
  Variant (22)..(22): Xaa in position 22 is Leu or Met
  Variant (25)..(25): Xaa in position 25 is any amino acid
  Variant (28)..(28): Xaa in position 28 is Ala or Gly
  Variant (30)..(30): Xaa in position 30 is Gly or Ser
  Variant (31)..(31): Xaa in position 31 is Ala or Gly
  Variant (32)..(32): Xaa in position 32 is Gly, Gln or Ser
  Variant (33)..(33): Xaa in position 33 is Ala or Gly
  Variant (36)..(36): Xaa in position 36 is any amino acid
  Variant (38)..(38): Xaa in position 38 is any amino acid
  Variant (39)..(39): Xaa in position 39 is Ala or Gln
  Variant (40)..(40): Xaa in position 40 is Asp, Asn or Ser
  Variant (41)..(41): Xaa in position 41 is Asp or Glu
  Variant (42)..(42): Xaa in position 42 is Lys or Arg
  Variant (44)..(45): Xaa in position 44 to 45 is any amino acid
  Variant (46)..(46): Xaa in position 46 is Glu, Gly or Gln
  Variant (47)..(47): Xaa in position 47 is Ala, Leu or Val
  Variant (48)..(48): Xaa in position 48 is Asp or Ser
  Variant (49)..(49): Xaa in position 49 is any amino acid
  Variant (50)..(50): Xaa in position 50 is Ala, Ser or Thr
  Variant (51)..(51): Xaa in position 51 is any amino acid
  Variant (52)..(52): Xaa in position 52 is Gly, Ser or Thr
  Variant (53)..(53): Xaa in position 53 is any amino acid
  Variant (57)..(57): Xaa in position 57 is Gly or Ser
  Variant (59)..(59): Xaa in position 59 is Asn, Gln or Arg
NDXWRXGXXXERLXXXXPLXAXKNXVTXNXXXXYVXWXXXXXRXXXXXXXXXXFSDXNXR

SEQ ID NO: 36925 - protein, 58 aa, Artificial sequence
  protein pattern
  Variant (2)..(7): Xaa in position 2 to 7 is any or no amino acid
  Variant (10)..(10): Xaa in position 10 is any amino acid
  Variant (11)..(11): Xaa in position 11 is Ala or Glu
  Variant (14)..(14): Xaa in position 14 is any amino acid
  Variant (17)..(17): Xaa in position 17 is Leu or Met
  Variant (18)..(18): Xaa in position 18 is Ala, Asp or Thr
  Variant (23)..(23): Xaa in position 23 is any amino acid
  Variant (25)..(25): Xaa in position 25 is any amino acid
  Variant (26)..(26): Xaa in position 26 is Ala, Asp or Glu
  Variant (27)..(27): Xaa in position 27 is Ala, Leu or Val
  Variant (30)..(30): Xaa in position 30 is Asp or His
  Variant (33)..(33): Xaa in position 33 is Ile or Val
  Variant (34)..(34): Xaa in position 34 is Ala, Glu or Ser
  Variant (36)..(36): Xaa in position 36 is any amino acid
  Variant (37)..(37): Xaa in position 37 is Leu or Pro
  Variant (38)..(38): Xaa in position 38 is Asp, Glu or Gln
  Variant (39)..(39): Xaa in position 39 is Asp or Asn
  Variant (40)..(41): Xaa in position 40 to 41 is any amino acid
  Variant (42)..(42): Xaa in position 42 is Ser or Val
  Variant (43)..(43): Xaa in position 43 is any amino acid
  Variant (44)..(44): Xaa in position 44 is Glu or Arg
  Variant (46)..(46): Xaa in position 46 is any amino acid
  Variant (48)..(48): Xaa in position 48 is Ala, Glu or Gln
  Variant (49)..(49): Xaa in position 49 is any amino acid
  Variant (50)..(50): Xaa in position 50 is Asp, Glu or Lys
  Variant (53)..(53): Xaa in position 53 is Asp or Asn
  Variant (54)..(54): Xaa in position 54 is Leu or Met
  Variant (55)..(55): Xaa in position 55 is any amino acid
IXXXXXXLEXXQAXTAXXLQEWXQXXXLTXDVXXRXXXXXXXXXLXRXXXVHXXXELR

SEQ ID NO: 36926 - protein, 40 aa, Artificial sequence
  protein pattern
  Variant (2)..(2): Xaa in position 2 is Pro or Thr
  Variant (3)..(3): Xaa in position 3 is Glu or Lys
  Variant (4)..(4): Xaa in position 4 is any amino acid
  Variant (6)..(14): Xaa in position 6 to 14 is any or no amino acid
  Variant (16)..(16): Xaa in position 16 is Ala, Asp or Ser
  Variant (17)..(17): Xaa in position 17 is any amino acid
  Variant (18)..(18): Xaa in position 18 is Met or Val
  Variant (20)..(20): Xaa in position 20 is Ala or Leu
  Variant (21)..(21): Xaa in position 21 is Phe, Leu or Val
  Variant (22)..(22): Xaa in position 22 is Glu, Asn or Thr
  Variant (23)..(23): Xaa in position 23 is Ala, Leu or Val
  Variant (24)..(24): Xaa in position 24 is Asn or Ser
  Variant (26)..(26): Xaa in position 26 is Ile, Leu or Val
  Variant (27)..(27): Xaa in position 27 is Leu or Met
  Variant (28)..(28): Xaa in position 28 is Trp or Tyr
  Variant (29)..(29): Xaa in position 29 is His or Arg
  Variant (30)..(30): Xaa in position 30 is Arg or Ser
  Variant (32)..(32): Xaa in position 32 is Glu or Lys
  Variant (33)..(33): Xaa in position 33 is Asn or Thr
  Variant (34)..(34): Xaa in position 34 is any amino acid
  Variant (36)..(36): Xaa in position 36 is Glu or Ser
  Variant (38)..(38): Xaa in position 38 is any amino acid
  Variant (39)..(39): Xaa in position 39 is Phe or Val
  Variant (40)..(40): Xaa in position 40 is Gln or Ser
NXXXDXXXXXXXXXFXXXPXXXXXHXXXXXYXXXWXQXXX

SEQ ID NO: 36927 - protein, 40 aa, Artificial sequence
  protein pattern
  Variant (2)..(3): Xaa in position 2 to 3 is any amino acid
  Variant (4)..(4): Xaa in position 4 is any or no amino acid
  Variant (7)..(7): Xaa in position 7 is Leu or Met
  Variant (8)..(8): Xaa in position 8 is Ala or Ser
  Variant (9)..(9): Xaa in position 9 is any amino acid
  Variant (10)..(10): Xaa in position 10 is Leu or Met
  Variant (11)..(11): Xaa in position 11 is Ala or Pro
  Variant (16)..(16): Xaa in position 16 is any amino acid
  Variant (19)..(19): Xaa in position 19 is Phe or Tyr
  Variant (20)..(20): Xaa in position 20 is Ala, Asp or Val
  Variant (24)..(24): Xaa in position 24 is Lys or Arg
  Variant (28)..(28): Xaa in position 28 is Asp or Gln
  Variant (30)..(30): Xaa in position 30 is Ala, Asp or Gln
  Variant (31)..(31): Xaa in position 31 is Ala, Asn or Gln
  Variant (33)..(35): Xaa in position 33 to 35 is any amino acid
  Variant (37)..(37): Xaa in position 37 is any amino acid
  Variant (38)..(38): Xaa in position 38 is any or no amino acid
  Variant (40)..(40): Xaa in position 40 is Ala, Asn or Pro
AXXXVRXXXXXTRSEXERXXIADXALAXYXXLXXXWXXDX

SEQ ID NO: 36928 - protein, 33 aa, Artificial sequence
  protein pattern
  Variant (2)..(2): Xaa in position 2 is any amino acid
  Variant (3)..(3): Xaa in position 3 is any or no amino acid
  Variant (6)..(7): Xaa in position 6 to 7 is any or no amino acid
  Variant (9)..(9): Xaa in position 9 is His or Arg
  Variant (15)..(15): Xaa in position 15 is Thr or Val
  Variant (17)..(17): Xaa in position 17 is any amino acid
  Variant (18)..(18): Xaa in position 18 is Gln or Arg
  Variant (19)..(20): Xaa in position 19 to 20 is any amino acid
  Variant (21)..(21): Xaa in position 21 is Asp or Glu
  Variant (22)..(22): Xaa in position 22 is Ile, Leu or Val
  Variant (24)..(24): Xaa in position 24 is any amino acid
  Variant (25)..(25): Xaa in position 25 is Glu or His
  Variant (27)..(27): Xaa in position 27 is Glu or Gln
  Variant (28)..(28): Xaa in position 28 is any amino acid
  Variant (29)..(29): Xaa in position 29 is Leu or Met
  Variant (30)..(31): Xaa in position 30 to 31 is any amino acid
  Variant (32)..(32): Xaa in position 32 is Glu or Thr
QXXRIXXDXLGALLXRXXXXXXIXXYXXXXXXG

SEQ ID NO: 36929 - protein, 60 aa, Artificial sequence
  protein pattern
  Variant (2)..(2): Xaa in position 2 is any amino acid
  Variant (4)..(4): Xaa in position 4 is Asp or Thr
  Variant (6)..(6): Xaa in position 6 is Ile or Leu
  Variant (7)..(7): Xaa in position 7 is Asp, Glu or Gln
  Variant (8)..(8): Xaa in position 8 is Gly or Ile
  Variant (9)..(10): Xaa in position 9 to 10 is any amino acid
  Variant (11)..(11): Xaa in position 11 is Phe or Leu
  Variant (12)..(13): Xaa in position 12 to 13 is any amino acid
  Variant (14)..(14): Xaa in position 14 is Gln or Thr
  Variant (15)..(15): Xaa in position 15 is Ser or Val
  Variant (16)..(16): Xaa in position 16 is Ala or Leu
  Variant (17)..(19): Xaa in position 17 to 19 is any amino acid
  Variant (24)..(24): Xaa in position 24 is Ala, Gln or Thr
  Variant (26)..(26): Xaa in position 26 is Glu or Gln
  Variant (27)..(28): Xaa in position 27 to 28 is any amino acid
  Variant (29)..(29): Xaa in position 29 is Ala or Leu
  Variant (30)..(30): Xaa in position 30 is Glu or Arg
  Variant (31)..(31): Xaa in position 31 is Asp, Glu or Arg
  Variant (33)..(33): Xaa in position 33 is Ala or Ser
  Variant (34)..(34): Xaa in position 34 is any amino acid
  Variant (35)..(35): Xaa in position 35 is Asn, Ser or Thr
  Variant (36)..(36): Xaa in position 36 is Ala or Gly
  Variant (38)..(38): Xaa in position 38 is Ala or Gly
  Variant (41)..(41): Xaa in position 41 is Asp, Gly or Asn
  Variant (43)..(43): Xaa in position 43 is Asn or Arg
  Variant (44)..(44): Xaa in position 44 is Ile or Leu
  Variant (45)..(46): Xaa in position 45 to 46 is any amino acid
  Variant (48)..(48): Xaa in position 48 is Gly or Ser
  Variant (49)..(49): Xaa in position 49 is Ile or Val
  Variant (50)..(51): Xaa in position 50 to 51 is any amino acid
  Variant (52)..(52): Xaa in position 52 is Ala or Thr
  Variant (54)..(54): Xaa in position 54 is Asp or Gly
  Variant (55)..(55): Xaa in position 55 is any amino acid
  Variant (58)..(58): Xaa in position 58 is any amino acid
PXDXWXXXXXXXXXXXXXXNDLPXAXXXXXXLXXXXPXNQXLXXXXAXXXXXRXXPRXAE

SEQ ID NO: 36930 - protein, 51 aa, Artificial sequence
  protein pattern
  Variant (2)..(2): Xaa in position 2 is Ala, Pro or Thr
  Variant (3)..(3): Xaa in position 3 is Ala or Ser
  Variant (4)..(4): Xaa in position 4 is any amino acid
  Variant (5)..(5): Xaa in position 5 is Ala or Gly
  Variant (6)..(6): Xaa in position 6 is any amino acid
  Variant (8)..(12): Xaa in position 8 to 12 is any or no amino acid
  Variant (16)..(17): Xaa in position 16 to 17 is any amino acid
  Variant (18)..(18): Xaa in position 18 is Gln or Arg
  Variant (20)..(20): Xaa in position 20 is Asp or Gln
  Variant (21)..(21): Xaa in position 21 is Asn or Gln
  Variant (22)..(22): Xaa in position 22 is Ala or Ser
  Variant (23)..(23): Xaa in position 23 is Ile or Leu
  Variant (24)..(24): Xaa in position 24 is Ala, Gln or Thr
  Variant (25)..(25): Xaa in position 25 is Leu or Val
  Variant (26)..(26): Xaa in position 26 is Trp or Tyr
  Variant (27)..(27): Xaa in position 27 is Asn or Gln
  Variant (28)..(28): Xaa in position 28 is any amino acid
  Variant (29)..(29): Xaa in position 29 is Ala or Ser
  Variant (31)..(32): Xaa in position 31 to 32 is any amino acid
  Variant (33)..(33): Xaa in position 33 is Asp or Glu
  Variant (35)..(35): Xaa in position 35 is Asp, Gln or Thr
  Variant (37)..(37): Xaa in position 37 is any amino acid
  Variant (39)..(41): Xaa in position 39 to 41 is any amino acid
  Variant (43)..(43): Xaa in position 43 is any amino acid
  Variant (44)..(44): Xaa in position 44 is Ala or Ile
  Variant (45)..(45): Xaa in position 45 is Leu or Met
  Variant (47)..(47): Xaa in position 47 is any amino acid
  Variant (50)..(50): Xaa in position 50 is Ala or Ser
LXXXXXAXXXXXYRNXXXWXXXXXXXXXXLXXXPXNXDXXXGXXXTXADXG

SEQ ID NO: 36931 - protein, 21 aa, Artificial sequence
  protein pattern
  Variant (6)..(6): Xaa in position 6 is Asp or Lys
  Variant (9)..(9): Xaa in position 9 is any amino acid
  Variant (10)..(15): Xaa in position 10 to 15 is any or no amino acid
  Variant (17)..(17): Xaa in position 17 is Leu, Met or Val
  Variant (19)..(19): Xaa in position 19 is Phe or Leu
  Variant (20)..(20): Xaa in position 20 is Arg or Ser
RPYDGXREXXXXXXXDXTXXF

SEQ ID NO: 36932 - protein, 26 aa, Artificial sequence
  protein pattern
  Variant (2)..(6): Xaa in position 2 to 6 is any or no amino acid
  Variant (8)..(8): Xaa in position 8 is Ala or Val
  Variant (13)..(13): Xaa in position 13 is Ile or Leu
  Variant (14)..(14): Xaa in position 14 is any amino acid
  Variant (15)..(15): Xaa in position 15 is Asp, Arg or Ser
  Variant (16)..(16): Xaa in position 16 is His, Lys or Arg
  Variant (17)..(17): Xaa in position 17 is any amino acid
  Variant (19)..(19): Xaa in position 19 is Glu or Lys
  Variant (22)..(22): Xaa in position 22 is Ala, Glu or Gln
  Variant (23)..(23): Xaa in position 23 is Pro, Gln or Ser
  Variant (25)..(25): Xaa in position 25 is Leu or Met
  Variant (26)..(26): Xaa in position 26 is Ser or Thr
PXXXXXWXASAYXXXXXPXKAXXIXX

SEQ ID NO: 36933 - protein, 20 aa, Artificial sequence
  protein pattern
  Variant (2)..(2): Xaa in position 2 is any amino acid
  Variant (3)..(3): Xaa in position 3 is any or no amino acid
  Variant (5)..(5): Xaa in position 5 is any amino acid
  Variant (6)..(6): Xaa in position 6 is any or no amino acid
  Variant (11)..(11): Xaa in position 11 is any amino acid
  Variant (15)..(15): Xaa in position 15 is any amino acid
  Variant (17)..(17): Xaa in position 17 is any amino acid
  Variant (18)..(18): Xaa in position 18 is Glu or Gln
  Variant (20)..(20): Xaa in position 20 is Ile or Val
QXXDXXLQIAXWAGXDXXVX

SEQ ID NO: 36934 - protein, 29 aa, Artificial sequence
  protein pattern
  Variant (2)..(4): Xaa in position 2 to 4 is any amino acid
  Variant (5)..(6): Xaa in position 5 to 6 is any or no amino acid
  Variant (8)..(8): Xaa in position 8 is any amino acid
  Variant (12)..(12): Xaa in position 12 is Glu, Asn or Arg
  Variant (14)..(14): Xaa in position 14 is Gln or Arg
  Variant (15)..(15): Xaa in position 15 is any amino acid
  Variant (17)..(17): Xaa in position 17 is Asp or Asn
  Variant (18)..(18): Xaa in position 18 is any amino acid
  Variant (19)..(19): Xaa in position 19 is Ala, Gln or Ser
  Variant (20)..(20): Xaa in position 20 is Ala or Pro
  Variant (21)..(21): Xaa in position 21 is Ala or Val
  Variant (22)..(22): Xaa in position 22 is any amino acid
  Variant (23)..(23): Xaa in position 23 is Asp or Ser
  Variant (24)..(24): Xaa in position 24 is Trp or Tyr
  Variant (25)..(25): Xaa in position 25 is Phe or Leu
  Variant (26)..(26): Xaa in position 26 is Ala, Asp or Gln
  Variant (27)..(28): Xaa in position 27 to 28 is any amino acid
AXXXXXDXLIIXAXXGXXXXXXXXXXXXS

SEQ ID NO: 36935 - protein, 21 aa, Artificial sequence
  protein pattern
  Variant (2)..(2): Xaa in position 2 is any amino acid
  Variant (3)..(3): Xaa in position 3 is Glu, Gly or Ser
  Variant (4)..(4): Xaa in position 4 is Phe or Leu
  Variant (5)..(5): Xaa in position 5 is Glu, Asn or Ser
  Variant (7)..(7): Xaa in position 7 is any or no amino acid
  Variant (9)..(9): Xaa in position 9 is any or no amino acid
  Variant (12)..(12): Xaa in position 12 is Phe or Trp
  Variant (13)..(13): Xaa in position 13 is Ser or Thr
  Variant (14)..(14): Xaa in position 14 is Gly or Ser
  Variant (16)..(16): Xaa in position 16 is any amino acid
  Variant (18)..(18): Xaa in position 18 is any amino acid
  Variant (19)..(19): Xaa in position 19 is Ala, Ile or Val
EXXXXGXQXRIXXXPXLXXDF

SEQ ID NO: 36936 - protein, 20 aa, Artificial sequence
  protein pattern
  Variant (2)..(2): Xaa in position 2 is Phe or Leu
  Variant (3)..(3): Xaa in position 3 is Phe or Tyr
  Variant (6)..(6): Xaa in position 6 is any or no amino acid
  Variant (8)..(8): Xaa in position 8 is any or no amino acid
  Variant (12)..(13): Xaa in position 12 to 13 is any amino acid
  Variant (14)..(14): Xaa in position 14 is Asp, Glu or Pro
  Variant (15)..(15): Xaa in position 15 is any amino acid
  Variant (17)..(17): Xaa in position 17 is any amino acid
  Variant (18)..(18): Xaa in position 18 is Gln or Thr
  Variant (19)..(19): Xaa in position 19 is Phe, Leu or Val
  Variant (20)..(20): Xaa in position 20 is Ala, Ser or Thr
DXXYSXLXESEXXXXAXXXX

SEQ ID NO: 36937 - DNA, 600 bp, Escherichia coli
  CDS (1)..(600): transl_table=11
atgaacgctggcaggaagagaaagcaggtcactaaccctggcttatgtgaggaagcgatgattatctatttacacggttttgactctaacagtccgggtaaccacgagaaagtcttacaattgcagtttattgacccggatgtacgcttgataagctacagtacgcggcatccgaaacatgatatgcagcatctgcttaaagaagtggacaaaatgttgcaactgaacgttgacgagcgtccgctaatttgcggcgttggcttgggcggatactgggcggaacggattggttttctttgcgacatccgccaggtgatcttcaaccctaatttgttcccttatgagaacatggaaggcaagattgatcgcccggaagagtatgccgatattgccactaagtgtgtgaccaacttccgtgagaagaatcgcgatcgttgcctggtgattttgtcgcgtaatgatgaagcgcttaacagccagcggacatctgaagagttgcatcattattacgagattgtctgggacgaagagcagacgcacaaattcaagaatatctccccgcatttacagcgcattaaagcgttcaaaaccctcgggtaa

SEQ ID NO: 36938 - protein, 199 aa, Escherichia coli
MNAGRKRKQVTNPGLCEEAMIIYLHGFDSNSPGNHEKVLQLQFIDPDVRLISYSTRHPKHDMQHLLKEVDKMLQLNVDERPLICGVGLGGYWAERIGFLCDIRQVIFNPNLFPYENMEGKIDRPEEYADIATKCVTNFREKNRDRCLVILSRNDEALNSQRTSEELHHYYEIVWDEEQTHKFKNISPHLQRIKAFKTLG

SEQ ID NO: 36939 - DNA, 600 bp, Escherichia coli O157:H7 EDL933
  CDS (1)..(600): transl_table=11
  misc_feature (259)..(259): k is g or t
atgaacgctggcaggaagagaaagcaggtcactaaccctggcttatgtgaggaagcgatgattatctatttacacggttttgactctaacagtccgggtaaccacgagaaagtcttacaattgcagtttattgacccggatgtacgcttgataagctacagtacgcggcatccgaaacatgatatgcagcatctgctcaaagaagtggacaaaatgttgcaactgaacgtcgacgagcgtcccctgatttgcggcgttkgtctgggcggatactgggcggaacggattggttttctttgcgatatccgccaggtgatcttcaaccctaatttgttcccttatgagaacatggaaggcaagattgatcgcccggaagagtatgccgatattgccactaagtgtgtgaccaacttccgcgagaagaatcgcgatcgttgcctggtgattttgtcgcgtaatgatgaagcgcttaacagccagcggacatctgaagagttgcatcattattacgagattgtctgggacgaagagcagacgcacaaattcaagaatatctccccgcatttgcagcgcattaaagcgttcaaaaccctcgggtaa

SEQ ID NO: 36940 - protein, 199 aa, Escherichia coli O157:H7 EDL933
  misc_feature (87)..(87): The Xaa at location 87 stands for Cys, or Gly.
MNAGRKRKQVTNPGLCEEAMIIYLHGFDSNSPGNHEKVLQLQFIDPDVRLISYSTRHPKHDMQHLLKEVDKMLQLNVDERPLICGVXLGGYWAERIGFLCDIRQVIFNPNLFPYENMEGKIDRPEEYADIATKCVTNFREKNRDRCLVILSRNDEALNSQRTSEELHHYYEIVWDEEQTHKFKNISPHLQRIKAFKTLG

SEQ ID NO: 36941 - DNA, 543 bp, Erwinia carotovora subsp. atroseptica SCRI1043
  CDS (1)..(543): transl_table=11
atgattatctatttacacggttttgactctaccagccccggtaaccatgaaaaagtcttgcagcttcagtttattgatgaagatgtacggctgattagctacagcacgctgcatccgcgtcatgacatgcaacatctgctaaagcaggtggataagatgattcagcattctgatgacgatcgttcactaatctgtggcgtgggattgggcggtttttgggccgaacgggtcggttttctgtgtgatatacgacaagtcatcgtcaatcctaaccttttcccgcaggaaaacatgagcgggaaaattgatcggccggaagagtatctggatattgccacgaagtgtgtggcaaatttccgtgaaaagaaccgcgatcgttgcatggtaatgctttctcgtcaggatgagatgctcgacagccagcgcagtgcgcagacgctgggagaatattatgagatcgtctgggatgatattcagacgcataaattcaaaagtatttctcctcatttacagcggataaaagccttcaaaacgctcggttaa

SEQ ID NO: 36942 - protein, 180 aa, Erwinia carotovora subsp. atroseptica SCRI1043
MIIYLHGFDSTSPGNHEKVLQLQFIDEDVRLISYSTLHPRHDMQHLLKQVDKMIQHSDDDRSLICGVGLGGFWAERVGFLCDIRQVIVNPNLFPQENMSGKIDRPEEYLDIATKCVANFREKNRDRCMVMLSRQDEMLDSQRSAQTLGEYYEIVWDDIQTHKFKSISPHLQRIKAFKTLG

SEQ ID NO: 36943 - DNA, 540 bp, Mannheimia succiniciproducens MBEL55E
  CDS (1)..(540): transl_table=11
atgattatatatttacatggtttctcatccagccgaccggatgattatgagaatgtgatgcagttaaaaatgattgatcctgatgtgcgagttatcagttatagtacggttcaccctcgccatgacatgacttatatcctgaatgagacccataaattagtttctgaaactcaagatgataaaccgatgatttgcggtgtaggtttgggcggttattgggctgagcgggtcggctttttgtgcggtgttaagcaaattattttgaatccgaatttatttccggaagaaaatatggaaggcaaaatagaccgtccggaagaatatcttgatattaaaaccaaatgtattgaagattttcgcgaaaaaaaccaaagccggtgccttgtattcttatcaaaaaatgacaaagtggtggatcctaaacgttccgaagccttgttatcccattattatgaagtgatttgggacgatacggatgcacatcaattcaaacatatcgcgccatatattcagcgcctaaaagaatttaaagcggcgtaa

SEQ ID NO: 36944 - protein, 179 aa, Mannheimia succiniciproducens MBEL55E
MIIYLHGFSSSRPDDYENVMQLKMIDPDVRVISYSTVHPRHDMTYILNETHKLVSETQDDKPMICGVGLGGYWAERVGFLCGVKQIILNPNLFPEENMEGKIDRPEEYLDIKTKCIEDFREKNQSRCLVFLSKNDKVVDPKRSEALLSHYYEVIWDDTDAHQFKHIAPYIQRLKEFKAA

SEQ ID NO: 36945 - DNA, 540 bp, Shewanella sp. ANA-3
  CDS (1)..(540): transl_table=11
atgattttttatcttcatggattcgatgcaactagccctggtaatcacgaaaaaatgcgtcagttgcagtttattgacccagatgtgcggcttatcagctacagcactttgcatcccaagcatgatatgcagcatttattgaaagaagtcgccaagcaaatgcagtattgcgccgatcccgcaccgttaatggtcggggtcggtctaggggcgtattgggctgagcgaattggctttttaaacggattaaaatcggtgttaatcaatcccaatcttcatcccgaagagacgatgcaagggaaaattgaccgcccggaagagtatgccgatatcgccaataagtgtgtctctgaattcaggttgaagaatacccacagagccatgtgtattttgtctcgtgtggatgaagtgctcgacagtgaggctactgccgaggcgcttaagccttattacaccatcgaatgggatgagacgcaggcccataaattcccgcagttagccgcccatttacctaagataaaagcctttaagttgagttaa

SEQ ID NO: 36946 - protein, 179 aa, Shewanella sp. ANA-3
MIFYLHGFDATSPGNHEKMRQLQFIDPDVRLISYSTLHPKHDMQHLLKEVAKQMQYCADPAPLMVGVGLGAYWAERIGFLNGLKSVLINPNLHPEETMQGKIDRPEEYADIANKCVSEFRLKNTHRAMCILSRVDEVLDSEATAEALKPYYTIEWDETQAHKFPQLAAHLPKIKAFKLS

SEQ ID NO: 36947 - DNA, 540 bp, Photobacterium sp. SKA34
  CDS (1)..(540): transl_table=11
atgattatttatttacatggctttgattcaacaagcccaggtaatcatgaaaaggttttacagttacagtttatcgattctgatatccgctttgttaattacagtaccctgcatccaaagcatgatatgcagcatttattaaaagaagttcataagttagtcgatgagaatacagatacaacgccaatgatctgtggggttgggttagggggctattgggctgaaagaattggcttcttatgtggcattaaacaagtcattttgaacccaaatcttcatccggaaaaaaatatggaaggacgcattgatcgcccagaagaatatactgacattatgacgaaatgcgttgaagattttcgtaaaaaaaatacaggtaattgtctttgcatactttcaactaatgacgaagtattagataatcaatctacaaaagatgagctagatcaattttatgatatagtgtgggacgaaagtgaaacacataaatttaaaaagatctcgcaacatctacaaaaaataaaagcgtttaaagcgcaataa

SEQ ID NO: 36948 - protein, 179 aa, Photobacterium sp. SKA34
MIIYLHGFDSTSPGNHEKVLQLQFIDSDIRFVNYSTLHPKHDMQHLLKEVHKLVDENTDTTPMICGVGLGGYWAERIGFLCGIKQVILNPNLHPEKNMEGRIDRPEEYTDIMTKCVEDFRKKNTGNCLCILSTNDEVLDNQSTKDELDQFYDIVWDESETHKFKKISQHLQKIKAFKAQ

SEQ ID NO: 36949 - DNA, 540 bp, Vibrio sp. Ex25
  CDS (1)..(540): transl_table=11
atgattatttacttacacggctttgacagtacaagcccgggtaaccacgaaaaagttcttcaactgcaattcatcgacgacgacgttcgttttatcaattacagcacccttcacccaaagcacgacatgcaacacttgttaaaagaggtgtctaaagttatcgatcaatcggatgatccaaacccgttaatctgtggggttggtttaggtggttattggtctgaacgaattggttttctatgcggtatcaaacaagtgatgtttaacccgaacttgcacccagaaaaaacgatggctggtcgaatcgatcgcccagaagagtacgaagatatcgcaacaaaatgtgttgatcagtttcgagcgaaaaatcaggcgcactgcttggtgattttatccaaagatgatgaagtgcatgacaatgcgaaaactgcagctgagttagaaaaatactatcaaatcatttgggacgaaacgcagtcccacaagttcaaaaagatctctcaccatttacaagcgatgaaggcatttaaaaatacttaa

SEQ ID NO: 36950 - protein, 179 aa, Vibrio sp. Ex25
MIIYLHGFDSTSPGNHEKVLQLQFIDDDVRFINYSTLHPKHDMQHLLKEVSKVIDQSDDPNPLICGVGLGGYWSERIGFLCGIKQVMFNPNLHPEKTMAGRIDRPEEYEDIATKCVDQFRAKNQAHCLVILSKDDEVHDNAKTAAELEKYYQIIWDETQSHKFKKISHHLQAMKAFKNT

SEQ ID NO: 36951 - DNA, 543 bp, Yersinia pestis
  CDS (1)..(543): transl_table=11
atgatcgtctatttacatggttttgattccaatagccccggcaatcacgagaaagttttacagctacaatttatcgatcctgatgtgcgctttatcagttacagcaccttacatccacggcatgacatgcaatatttgttgaaagaagtggataaagccattcagcaggggggcgatgaaaaatccttgatttgtggtgttggattaggcggtttttgggctgaacgtattggtttcttatgtggtattcgccaggtagcgttcaaccccaatctctatccgcaagaaaatatgagcggcaaaattgatcgtccggaagagtacattgatattgccagtaaatgtattgatggctttcgtgaaaaaaatcgggatcgctgcttggtggtgctctctcgccatgatgaaatgctcgacagtcagcgtactgcgggtgatttacatccttactatgagatcgtatgggatgataagcagaaccataaatttaaagatctctcaccgcatctacaacggatcaaagcatttaaaacgctgggttaa

SEQ ID NO: 36952 - protein, 180 aa, Yersinia pestis
MIVYLHGFDSNSPGNHEKVLQLQFIDPDVRFISYSTLHPRHDMQYLLKEVDKAIQQGGDEKSLICGVGLGGFWAERIGFLCGIRQVAFNPNLYPQENMSGKIDRPEEYIDIASKCIDGFREKNRDRCLVVLSRHDEMLDSQRTAGDLHPYYEIVWDDKQNHKFKDLSPHLQRIKAFKTLG

SEQ ID NO: 36953 - DNA, 540 bp, Vibrio cholerae
  CDS (1)..(540): transl_table=11
atgattatttacttacacggattcgattcaaatagcccgggtaaccatgaaaaagtgctgcaattgcaattcattgatagcgatgtgcgtttcattaattacagcaccttacatcccaaacatgatatgcaacatctactgaaagaggtgcataaggcgatcgagcagtctggcgatccaaatccactgatttgcggtgtcgggctcggtggttattggtctgagcggattggttttttgtgtggaataaagcaggttatctttaatcctaacttgcatcctgaattgacgatgcaggggcgcattgatcgcccagaagagtacgaagacatctccaccaaatgcgttgaaaaattccgagcgaagaatcaaggtcgttgtctggtgatcctgtcccgtcaggatgaaattcacgataaccagaaaaccgcgcaagagctacaagactattacgacattgtttgggatgacactcaaacgcataaattcaaaaaaatctctcatcatttgcaagcgatgaaagccttcaaagcggcttag

SEQ ID NO: 36954 - protein, 179 aa, Vibrio cholerae
MIIYLHGFDSNSPGNHEKVLQLQFIDSDVRFINYSTLHPKHDMQHLLKEVHKAIEQSGDPNPLICGVGLGGYWSERIGFLCGIKQVIFNPNLHPELTMQGRIDRPEEYEDISTKCVEKFRAKNQGRCLVILSRQDEIHDNQKTAQELQDYYDIVWDDTQTHKFKKISHHLQAMKAFKAA

SEQ ID NO: 36955 - DNA, 543 bp, Vibrio vulnificus
  CDS (1)..(543): transl_table=11
atgattatctaccttcacggtttcgactcaacaagcccaggtaaccacgaaaaagtattgcagctgcagtttatcgatccagacgtgcgtttcatcaactacagcacgcttcatccgaagcacgatatgcagcacttgttaaaagaagttcataaagcgattgaacaatcaaacgatcctgaaccgattatttgtggcgttggtctcggtggttattggtcagaacgcatcggttttctttgcggtatcaagcaagtcatttttaaccctaatcttcatccagaaaacaatatggcaggtcgcattgaccgtccggaagagtatgaagatattgcaaccaaatgtgtcgaacagtttcgtatgaagaacaaagggcgctgtttagtgatcttgtcacgtgatgatgaaatccacgacaacagtaaaacagcacaagcgcttgagaattactacgaagtggtttgggatgacaaagaaacccataaattcaaaaagatatctcagcacttgcagaagatgaaagcatttaaagaaaacaactga

SEQ ID NO: 36956 - protein, 180 aa, Vibrio vulnificus
MIIYLHGFDSTSPGNHEKVLQLQFIDPDVRFINYSTLHPKHDMQHLLKEVHKAIEQSNDPEPIICGVGLGGYWSERIGFLCGIKQVIFNPNLHPENNMAGRIDRPEEYEDIATKCVEQFRMKNKGRCLVILSRDDEIHDNSKTAQALENYYEVVWDDKETHKFKKISQHLQKMKAFKENN

SEQ ID NO: 36957 - DNA, 540 bp, Shewanella oneidensis
  CDS (1)..(540): transl_table=11
atgattttttatcttcatggattcgatgctactagccctggtaatcacgaaaaaatgcgtcagttgcagtttattgacccagacgttcgtctgattagttacagtaccttgcatcctaagcacgatatgcagtacttgttgaaggaagttgctaagcaaatgcagcatagcgacgatcctgcaccattgatggttggcgtgggtttaggcgcttattgggccgagcgaattggctttttgaatggacttaagtcagtgttgatcaatcccaatttacatcctgagaacaccatgcaggggaaaattgatcgacctgaagaatatgctgatattgccaataagtgcgtctctgagtttaggatgaagaatacccataaagccatgtgtattctgtctcgttttgacgaagtgcttgaaagtcagctaagtgctgatgaactcagccgttattacgcaatcgaatgggatgagactcagccccataaattcccccagttggcagctcacttgcccaaaattaaagcctttaagctgggctaa

SEQ ID NO: 36958 - protein, 179 aa, Shewanella oneidensis
MIFYLHGFDATSPGNHEKMRQLQFIDPDVRLISYSTLHPKHDMQYLLKEVAKQMQHSDDPAPLMVGVGLGAYWAERIGFLNGLKSVLINPNLHPENTMQGKIDRPEEYADIANKCVSEFRMKNTHKAMCILSRFDEVLESQLSADELSRYYAIEWDETQPHKFPQLAAHLPKIKAFKLG

SEQ ID NO: 36959 - DNA, 537 bp, Photobacterium profundum
  CDS (1)..(537): transl_table=11
atgattatttatctgcatggctttgattcaaatagcccaggtaatcacgagaaagtgttacaactgcaattcattgaccctgatgttcgtttcgttaactacagtactttgcatcctaagcatgatatgcagcatttaattaaggaagtgcataaactaatagaagagtcagatgatactaagccattaatttgtggggttgggctgggtggatattgggctgagcgtattggttttttatgcggtattaagcaggttatttttaacccaaacttaaaccctagcgtcaatatggaagggaggatcgatcgccctgaagaatatatcgatatcggcactaagtgtgttgccgattttcgtgaaaaaaatgcaggtaattgcctctgtgtactttcaactaatgatgaagtgttagataatcagctcacaagtgatgcgctcagtgatttctataaaatcatttgggatgagacacaaaatcataaatttaaaaagatctcgcagcatctacaagctatgaaagcgtttaaagaatag

SEQ ID NO: 36960 - protein, 178 aa, Photobacterium profundum
MIIYLHGFDSNSPGNHEKVLQLQFIDPDVRFVNYSTLHPKHDMQHLIKEVHKLIEESDDTKPLICGVGLGGYWAERIGFLCGIKQVIFNPNLNPSVNMEGRIDRPEEYIDIGTKCVADFREKNAGNCLCVLSTNDEVLDNQLTSDALSDFYKIIWDETQNHKFKKISQHLQAMKAFKE

SEQ ID NO: 36961 - DNA, 540 bp, Pasteurella multocida
  CDS (1)..(540): transl_table=11
atgattatttatttacatgggtttgattcaagtagcccgggcaatcatgaaaaagtgatgcaactgaaatttattgatgaggatgtccgttttgttaattacagtacgttgcatccacgtcatgacatgcaatttcttttgaacgaagtacataaattggtttcggaaagtaaggatccagcgcctttaatttgtggtgtgggactaggtggctattggtctgaacggattggtttcttgtgtggtatcaaacaggcaatttttaatccgaatcttttcccttatgaaaatatgacagggaaaattgatcgccctgaagaatataaagatattgaaacaaaatgtgtagaaaatttccgagaaaaaaataagggaaaatgcttagtttttctttctaaagaagatgggatactcgattctcaacggagtgctgcactcttgtcgccattttatgagatagtttgggatgatgttgaaacccataaattcaaaaaaatttcccaccatttacaacgtattaaagcctttaaacaacgttaa

SEQ ID NO: 36962 - protein, 179 aa, Pasteurella multocida
MIIYLHGFDSSSPGNHEKVMQLKFIDEDVRFVNYSTLHPRHDMQFLLNEVHKLVSESKDPAPLICGVGLGGYWSERIGFLCGIKQAIFNPNLFPYENMTGKIDRPEEYKDIETKCVENFREKNKGKCLVFLSKEDGILDSQRSAALLSPFYEIVWDDVETHKFKKISHHLQRIKAFKQR

SEQ ID NO: 36963 - DNA, 540 bp, Vibrio parahaemolyticus
  CDS (1)..(540): transl_table=11
atgattatttacttgcacggctttgatagtacaagcccaggtaaccacgaaaaagttcttcaactacagttcatcgatgacgatgttcgtttcattaattacagtacgcttcatcctaaacatgacatgcagcacctgctaaaagaagtgtcaaaggtcatcgatcagtctgatgatcctaatccacttatctgtggggttggccttggtgggtattggtctgagcgtattggtttcttgtgtggtattaagcaagtgatgttcaatccgaacttacatccagaaaacaccatggctggtcgcatcgatcgcccagaagaatacgaagatattgcaacgaagtgtgtagatcagttcagagctaaaaaccaagggcgctgtttagtgattttgtcgaaagaagatgaaattcatgacaatacaaaaacggcttctgagttagaaaagcactacgacattatctgggatgaatcgcagtcacataagttcaagaaaatctctcagcatcttcaagcgatgaaagagttcaaaaatacctag

SEQ ID NO: 36964 - protein, 179 aa, Vibrio parahaemolyticus
MIIYLHGFDSTSPGNHEKVLQLQFIDDDVRFINYSTLHPKHDMQHLLKEVSKVIDQSDDPNPLICGVGLGGYWSERIGFLCGIKQVMFNPNLHPENTMAGRIDRPEEYEDIATKCVDQFRAKNQGRCLVILSKEDEIHDNTKTASELEKHYDIIWDESQSHKFKKISQHLQAMKEFKNT

SEQ ID NO: 36965 - DNA, 21 bp, Artificial sequence
  primer
atgaacgctggcaggaagaga

SEQ ID NO: 36966 - DNA, 23 bp, Artificial sequence
  primer
ttacccgagggttttgaacgctt

SEQ ID NO: 36967 - protein, 177 aa, Artificial sequence
  consensus sequence
  Variant (3)..(3): Xaa in position 3 is any amino acid
  Variant (11)..(11): Xaa in position 11 is any amino acid
  Variant (20)..(20): Xaa in position 20 is any amino acid
  Variant (27)..(27): Xaa in position 27 is any amino acid
  Variant (31)..(33): Xaa in position 31 to 33 is any amino acid
  Variant (37)..(37): Xaa in position 37 is any amino acid
  Variant (40)..(40): Xaa in position 40 is any amino acid
  Variant (45)..(45): Xaa in position 45 is any amino acid
  Variant (51)..(51): Xaa in position 51 is any amino acid
  Variant (53)..(58): Xaa in position 53 to 58 is any amino acid
  Variant (60)..(61): Xaa in position 60 to 61 is any amino acid
  Variant (63)..(63): Xaa in position 63 is any amino acid
  Variant (74)..(74): Xaa in position 74 is any amino acid
  Variant (82)..(84): Xaa in position 82 to 84 is any amino acid
  Variant (87)..(88): Xaa in position 87 to 88 is any amino acid
  Variant (93)..(93): Xaa in position 93 is any amino acid
  Variant (95)..(97): Xaa in position 95 to 97 is any amino acid
  Variant (99)..(99): Xaa in position 99 is any amino acid
  Variant (101)..(101): Xaa in position 101 is any amino acid
  Variant (109)..(109): Xaa in position 109 is any amino acid
  Variant (112)..(113): Xaa in position 112 to 113 is any amino acid
  Variant (117)..(118): Xaa in position 117 to 118 is any amino acid
  Variant (121)..(121): Xaa in position 121 is any amino acid
  Variant (124)..(126): Xaa in position 124 to 126 is any amino acid
  Variant (128)..(130): Xaa in position 128 to 130 is any amino acid
  Variant (133)..(134): Xaa in position 133 to 134 is any amino acid
  Variant (137)..(146): Xaa in position 137 to 146 is any amino acid
  Variant (148)..(150): Xaa in position 148 to 150 is any amino acid
  Variant (152)..(152): Xaa in position 152 is any amino acid
  Variant (154)..(154): Xaa in position 154 is any amino acid
  Variant (157)..(160): Xaa in position 157 to 160 is any amino acid
  Variant (165)..(168): Xaa in position 165 to 168 is any amino acid
  Variant (172)..(173): Xaa in position 172 to 173 is any amino acid
MIXYLHGFDSXSPGNHEKVXQLQFIDXDVRXXXYSTXHPXHDMQXLLKEVXKXXXXXXDXXPXICGVGLGGYWXERIGFLCXXXQVXXNPNLXPXXXMXGXIDRPEEYXDIXXKCVXXFRXKNXXXCXXXLSXXDEXXXXXXXXXXLXXXYXIXWDXXXXHKFKXXXXHLQXXKAFK

SEQ ID NO: 36968 - protein, 60 aa, Artificial sequence
  protein pattern
  Variant (5)..(5): Xaa in position 5 is any amino acid
  Variant (9)..(9): Xaa in position 9 is Phe or Tyr
  Variant (11)..(11): Xaa in position 11 is Ala or Ser
  Variant (14)..(14): Xaa in position 14 is Ile or Val
  Variant (19)..(19): Xaa in position 19 is Asp or Gly
  Variant (20)..(20): Xaa in position 20 is Ile or Val
  Variant (21)..(21): Xaa in position 21 is Lys or Arg
  Variant (23)..(23): Xaa in position 23 is Ala, Ile or Val
  Variant (24)..(24): Xaa in position 24 is any amino acid
  Variant (25)..(25): Xaa in position 25 is Phe, Leu or Val
  Variant (30)..(30): Xaa in position 30 is any amino acid
  Variant (32)..(33): Xaa in position 32 to 33 is any amino acid
  Variant (34)..(34): Xaa in position 34 is Asn or Thr
  Variant (36)..(36): Xaa in position 36 is Ala, Glu, Gln, Ser or Thr
  Variant (38)..(38): Xaa in position 38 is Lys or Arg
  Variant (46)..(46): Xaa in position 46 is any amino acid
  Variant (49)..(49): Xaa in position 49 is any amino acid
  Variant (50)..(50): Xaa in position 50 is Ser or Thr
  Variant (53)..(53): Xaa in position 53 is Ile or Val
  Variant (54)..(54): Xaa in position 54 is Ala, Asp, Glu or Thr
  Variant (55)..(55): Xaa in position 55 is any amino acid
  Variant (58)..(58): Xaa in position 58 is any amino acid
ICGVXLGGXWXERXGFLCXXXQXXXNPNLXPXXXMXGXIDRPEEYXDIXXKCXXXFRXKN

SEQ ID NO: 36969 - protein, 61 aa, Artificial sequence
  protein pattern
  Variant (2)..(2): Xaa in position 2 is any or no amino acid
  Variant (4)..(4): Xaa in position 4 is any or no amino acid
  Variant (11)..(11): Xaa in position 11 is Ala or Ser
  Variant (12)..(12): Xaa in position 12 is Asn or Thr
  Variant (20)..(20): Xaa in position 20 is Met or Val
  Variant (21)..(21): Xaa in position 21 is any amino acid
  Variant (28)..(28): Xaa in position 28 is Asp, Glu, Pro or Ser
  Variant (30)..(30): Xaa in position 30 is Ile or Val
  Variant (32)..(32): Xaa in position 32 is Phe or Leu
  Variant (33)..(33): Xaa in position 33 is Ile or Val
  Variant (34)..(34): Xaa in position 34 is Asn or Ser
  Variant (38)..(38): Xaa in position 38 is any amino acid
  Variant (41)..(41): Xaa in position 41 is Lys or Arg
  Variant (46)..(46): Xaa in position 46 is His or Tyr
  Variant (48)..(48): Xaa in position 48 is Ile or Leu
  Variant (50)..(50): Xaa in position 50 is Glu or Gln
  Variant (52)..(52): Xaa in position 52 is any amino acid
  Variant (54)..(54): Xaa in position 54 is any amino acid
  Variant (55)..(55): Xaa in position 55 is Ile, Leu, Met or Val
  Variant (56)..(56): Xaa in position 56 is Asp, Glu or Gln
  Variant (57)..(57): Xaa in position 57 is any amino acid
  Variant (58)..(58): Xaa in position 58 is Cys, Gly, Asn or Ser
  Variant (59)..(59): Xaa in position 59 is Ala, Asp, Gly, Asn, Thr or Val
  Variant (61)..(61): Xaa in position 61 is Asp, Glu, Pro or Thr
MXIXYLHGFDXXSPGNHEKXXQLQFIDXDXRXXXYSTXHPXHDMQXLXKXVXKXXXXXXDX

SEQ ID NO: 36970 - protein, 40 aa, Artificial sequence
  protein pattern
  Variant (2)..(4): Xaa in position 2 to 4 is any amino acid
  Variant (5)..(13): Xaa in position 5 to 13 is any or no amino acid
  Variant (15)..(15): Xaa in position 15 is any amino acid
  Variant (17)..(17): Xaa in position 17 is any amino acid
  Variant (20)..(20): Xaa in position 20 is Asp or Glu
  Variant (21)..(21): Xaa in position 21 is any amino acid
  Variant (22)..(22): Xaa in position 22 is Glu or Gln
  Variant (23)..(23): Xaa in position 23 is Ala, Asn, Pro, Ser or Thr
  Variant (27)..(28): Xaa in position 27 to 28 is any amino acid
  Variant (29)..(29): Xaa in position 29 is Ile or Leu
  Variant (30)..(30): Xaa in position 30 is Ala or Ser
  Variant (31)..(31): Xaa in position 31 is any amino acid
  Variant (34)..(34): Xaa in position 34 is Pro or Gln
  Variant (35)..(35): Xaa in position 35 is any amino acid
  Variant (36)..(36): Xaa in position 36 is Ile or Met
  Variant (38)..(38): Xaa in position 38 is Ala or Glu
LXXXXXXXXXXXXYXIXWDXXXXHKFXXXXXHLXXXKXFK

SEQ ID NO: 36971 - DNA, 1251 bp, Escherichia coli
  CDS (1)..(1251)
atggaaagtaaagtagttgttccggcacaaggcaagaagatcaccctgcaaaacggcaaactcaacgttcctgaaaatccgattatcccttacattgaaggtgatggaatcggtgtagatgtaaccccagccatgctgaaagtggtcgacgctgcagtcgagaaagcctataaaggcgagcgtaaaatctcctggatggaaatttacaccggtgaaaaatccacacaggtttatggtcaggacgtctggctgcctgctgaaactcttgatctgattcgtgaatatcgcgttgccattaaaggtccgctgaccactccggttggtggcggtattcgctctctgaacgttgccctgcgccaggaactggatctctacatctgcctgcgtccggtacgttactatcagggcactccaagcccggttaaacaccctgaactgaccgatatggttatcttccgtgaaaactcggaagacatttatgcgggtatcgaatggaaagcagactctgccgacgccgagaaagtgattaaattcctgcgtgaagagatgggggtgaagaaaattcgcttcccggaacattgtggtatcggtattaagccgtgttcggaagaaggcaccaaacgtctggttcgtgcagcgatcgaatacgcaattgctaacgatcgtgactctgtgactctggtgcacaaaggcaacatcatgaagttcaccgaaggagcgtttaaagactggggctaccagctggcgcgtgaagagtttggcggtgaactgatcgacggtggcccgtggctgaaagttaaaaacccgaacactggcaaagagatcgtcattaaagacgtgattgctgatgcattcctgcaacagatcctgctgcgtccggctgaatatgatgttatcgcctgtatgaacctgaacggtgactacatttctgacgccctggcagcgcaggttggcggtatcggtatcgcccctggtgcaaacatcggtgacgaatgcgccctgtttgaagccacccacggtactgcgccgaaatatgccggtcaggacaaagtaaatcctggctctattattctctccgctgagatgatgctgcgccacatgggttggaccgaagcggctgacttaattgttaaaggtatggaaggcgcaatcaacgcgaaaaccgtaacctatgacttcgagcgtctgatggatggcgctaaactgctgaaatgttcagagtttggtgacgcgatcatcgaaaacatgtaa

SEQ ID NO: 36972 - protein, 416 aa, Escherichia coli
MESKVVVPAQGKKITLQNGKLNVPENPIIPYIEGDGIGVDVTPAMLKVVDAAVEKAYKGERKISWMEIYTGEKSTQVYGQDVWLPAETLDLIREYRVAIKGPLTTPVGGGIRSLNVALRQELDLYICLRPVRYYQGTPSPVKHPELTDMVIFRENSEDIYAGIEWKADSADAEKVIKFLREEMGVKKIRFPEHCGIGIKPCSEEGTKRLVRAAIEYAIANDRDSVTLVHKGNIMKFTEGAFKDWGYQLAREEFGGELIDGGPWLKVKNPNTGKEIVIKDVIADAFLQQILLRPAEYDVIACMNLNGDYISDALAAQVGGIGIAPGANIGDECALFEATHGTAPKYAGQDKVNPGSIILSAEMMLRHMGWTEAADLIVKGMEGAINAKTVTYDFERLMDGAKLLKCSEFGDAIIENM

SEQ ID NO: 36973 - DNA, 1545 bp, Sorghum bicolor
  CDS (100)..(1197)
ctctccttccacccctcctcgccgccgcagacgaccgccgccgccgccgctgcagcgaacccttgcgaatcttcgttgtccgggctgtggggggcaggcatggcgctccggaggctgctgcaggggagtgtcctgccgcgggtaaccggcagggctttggcaccggccgtggcgccgttttcaacggagtccggggagaccatccgtgccacgctctttcccggcgatggcatcgggccagagatcgccgagtctgtcaagcaggtattcaatgttgcaggggtaccaatagaatgggaagaacactatgtcggtacagaagttgatcccagaacagagagttttttgacttgggaaagcctggagtcggtgcgtagaaacaaagttggcttgaaaggacctatggctacacctattggaaagggtcatcgatctttgaatcttacattaaggaaagaacttgggctctatgccaatgtcagaccttgcaacagcctcccaggctacaagaccagatatgatgatgttaaccttgtgacaattcgtgaaaatactgaaggagaatatagtggtcttgagcatcaggttgtgagaggtgttgtggaaagtttgaaaattattacccgccaagcaagtttgagagtggcagagtatgctttccattatgccaaggccaatggccgggaaagggtctctgcgatccacaaagccaatattatgaggaagacagatggtcttttcctcaagtgttgccgtgaagtggctgcgaagtaccctgaaattcaatatgaggaagtcatcatagataattgctgtatgacgcttgtgaagaatcctggtctttttgatgttctagtgatgccaaatctctatggtgacattattagcgatctatgtgctggtttgatcgggggcttgggcctaacacccagttgcaatattggtgaaggcggcatttgtctggcagaagctgttcatggttctgctcctgatattgctggcaagaacctcgcgaacccgactgctcttatgctgagtgctgtcatgatgttgcgccacttgcaattcaacgacaaagcagaccggatccacaacgccatccttcagaccatcgctgagggaaagtacaggactgctgatcttggtggaaaggcatcgacatcagagtttacaaacgcagtctgtgaacacatctgagaatcggatgtgattctttccttctgattgttttgtcttcctaattttttttgtcgcatatggagaggagctttagctttaagaggttaactggcagcacctcaaacttttgtgggtgtttaacacggtttgagaccgtcaaataattttgtcacatttcttgctgttcagagattctttcaactccggaaacgagtctataattgtctgtaataatcaacagcagcattatagcagtaagtaaggtctatttcattcacgttcttgaaatattgggccaactggttggaatgccagttagggcatgttaaaccttgttttccctttatgctgaaaagaaccaaattc

SEQ ID NO: 36974 - protein, 365 aa, Sorghum bicolor
MALRRLLQGSVLPRVTGRALAPAVAPFSTESGETIRATLFPGDGIGPEIAESVKQVFNVAGVPIEWEEHYVGTEVDPRTESFLTWESLESVRRNKVGLKGPMATPIGKGHRSLNLTLRKELGLYANVRPCNSLPGYKTRYDDVNLVTIRENTEGEYSGLEHQVVRGVVESLKIITRQASLRVAEYAFHYAKANGRERVSAIHKANIMRKTDGLFLKCCREVAAKYPEIQYEEVIIDNCCMTLVKNPGLFDVLVMPNLYGDIISDLCAGLIGGLGLTPSCNIGEGGICLAEAVHGSAPDIAGKNLANPTALMLSAVMMLRHLQFNDKADRIHNAILQTIAEGKYRTADLGGKASTSEFTNAVCEHI

SEQ ID NO: 36975 - DNA, 1533 bp, Triticum aestivum
  CDS (122)..(1237)
ctctttcggtcttggaatccttcctccctcccttccctccgtgtcgcccgcgctccgcctaccggatcgcaattccgcatcgccccgccgcagccccagccccagccccggccaggcccccatggcgaggcgatccgccccgctcctccgccgcctggtctcctccgcgccgcccctcccgggccacggcggcggcgcgcgccgcacggtcacctacatgccccgcccgggcgatggcaccccgcgccccgtcacgctcatcccgggcgacggcatcggacccctcgtcaccggcgccgtggagcaggtcatggaggccatgcacgcgcccgtctacttcgagtcctacgacgtccacggcgacatgcccgccgtgccgcccgccgtcatcgaatccatccgccgcaacaaggtctgcctcaagggcggcctcgccacccccgtcggcgggggcgtctcctccctcaacatgcagctccgcaaggagctcgacctcttcgcctccctcgtcaactgcgccaacgtccccggcctgcccaccaggcaccagaacgtcgacatcgtcgtcatcagggagaacaccgagggcgagtactcgggcctcgagcacgaggtcgtcccgggggtcgtcgagagcctcaaggtgatcacgaagttttgctccgagaggattgccaaatatgccttcgagtatgcttaccttaactaccggaagaaagtcacagcagtgcataaagcaaacatcatgaaacttgctgatggtttgttcttggagtcttgccgtgagattgctgctaaatatccaagtattgagtataatgaaatcattgttgacaactgctgcatgcaacttgtttcaaggcctgagcaatttgatgttatggttacgcctaacctttacggcaatttggttgccaacacagctgcaggtcttgttggaggaacaggtgtcatgccaggaggtaatgtaggtcaggatcatgccatcttcgagcaaggtgcttctgcaggaaatgtgggaaatgacaatcttgtagagcagcagaaagcaaaccctgtcgccctgctcctgtcgtctgctatgatgttgaggcatttgcagttcccgtcgttcgctgaccgtctggaaactgcggtgaagcgggtcattgcagatggcaagtacaggacaaaggatctgggcggcaccagcaccacccaggaagttactgatgcagtgatcgctaatctggattaggtacctgatgcacgcctgaagaatcgattcttttggaggactggtttaaaggtcccaactcctgagtgctattttttccgtacagcattagatcggcaattatgtttgagaaataattgaggaacccacgaggattattcttcccactatactttgtagcaaggcaaaacaccttgtgttgcagaggggatagctggctaccttaaatttaaacggcatgtattgaaagtttattctcagttcttattcgtggttatcactcccatggaaccggaaatctggtcctctttttcagt

SEQ ID NO: 36976 - protein, 371 aa, Triticum aestivum
MARRSAPLLRRLVSSAPPLPGHGGGARRTVTYMPRPGDGTPRPVTLIPGDGIGPLVTGAVEQVMEAMHAPVYFESYDVHGDMPAVPPAVIESIRRNKVCLKGGLATPVGGGVSSLNMQLRKELDLFASLVNCANVPGLPTRHQNVDIVVIRENTEGEYSGLEHEVVPGVVESLKVITKFCSERIAKYAFEYAYLNYRKKVTAVHKANIMKLADGLFLESCREIAAKYPSIEYNEIIVDNCCMQLVSRPEQFDVMVTPNLYGNLVANTAAGLVGGTGVMPGGNVGQDHAIFEQGASAGNVGNDNLVEQQKANPVALLLSSAMMLRHLQFPSFADRLETAVKRVIADGKYRTKDLGGTSTTQEVTDAVIANLD

SEQ ID NO: 36977 - DNA, 1533 bp, Triticum aestivum; identical to SEQ ID NO: 36975
  CDS (218)..(1237)

SEQ ID NO: 36978 - protein, 339 aa, Triticum aestivum
MPRPGDGTPRPVTLIPGDGIGPLVTGAVEQVMEAMHAPVYFESYDVHGDMPAVPPAVIESIRRNKVCLKGGLATPVGGGVSSLNMQLRKELDLFASLVNCANVPGLPTRHQNVDIVVIRENTEGEYSGLEHEVVPGVVESLKVITKFCSERIAKYAFEYAYLNYRKKVTAVHKANIMKLADGLFLESCREIAAKYPSIEYNEIIVDNCCMQLVSRPEQFDVMVTPNLYGNLVANTAAGLVGGTGVMPGGNVGQDHAIFEQGASAGNVGNDNLVEQQKANPVALLLSSAMMLRHLQFPSFADRLETAVKRVIADGKYRTKDLGGTSTTQEVTDAVIANLD

SEQ ID NO: 36979 - DNA, 1269 bp, Staphylococcus aureus
  CDS (1)..(1269): transl_table=11
atgactgcagaaaaaattactcaaggaactgaaggattaaacgtacctaacgaaccaattatcccatttattatcggtgatggaattggaccggatatttggaaggcagcaagccgagttatagatgctgctgttgagaaagcctataatggcgaaaaacgcattgaatggaaagaagtgctagctggccaaaaagcatttgatacaactggcgaatggttacctcaagaaacacttgatacaattaaagaatatttaattgctgttaaaggacctttaacaacaccaattggtggtggtattagatcattaaatgtagctttacgccaagaattagatttatttacttgtttaagaccggtacgttggtttaaaggagtaccatcacctgttaaacgtccacaagatgttgatatggttattttccgtgaaaatactgaagacatttatgctggtattgaatttaaagaaggtacaacagaagttaaaaaggtaattgacttcttacaaaacgaaatgggtgcgacaaacattcgattcccagaaacttcaggtattggtattaaaccagtttctaaagaaggtactgagcgattagttagagcagctattcaatatgctatcgataataaccgtaaatcagttactttagttcataaaggtaatattatgaaatttacagaaggctcatttaagcagtggggttacgatttagcattaactgaatttggtgatcaagtattcacttggcaacaatatgacgaaattgttgaaaatgaaggcagagatgctgctaatgctgcacaagaaaaagctgaaaaagaaggcaagattatcattaaagattctattgctgacattttcttacaacaaattttaactcgcccagctgagcatgatgttgtagcaactatgaacttgaatggtgactatatttcagatgctttagctgcacaagttggtggtattggtattgcgccaggtgcaaacattaattatgaaacaggtcatgctatttttgaagcaacacatggtacagctccaaaatatgcaggtttaaataaagtgaatccatcttcagtaattttaagttctgtattaatgttagaacatttaggatggcaagaagcggcagataagattacagattcaattgaagatacaattgcttcaaaagttgttacttatgactttgcccgtttaatggatggtgctgaagaagtttctacatcagcatttgcagatgaattgattaaaaatttaaaataa

SEQ ID NO: 36980 - protein, 422 aa, Staphylococcus aureus
MTAEKITQGTEGLNVPNEPIIPFIIGDGIGPDIWKAASRVIDAAVEKAYNGEKRIEWKEVLAGQKAFDTTGEWLPQETLDTIKEYLIAVKGPLTTPIGGGIRSLNVALRQELDLFTCLRPVRWFKGVPSPVKRPQDVDMVIFRENTEDIYAGIEFKEGTTEVKKVIDFLQNEMGATNIRFPETSGIGIKPVSKEGTERLVRAAIQYAIDNNRKSVTLVHKGNIMKFTEGSFKQWGYDLALTEFGDQVFTWQQYDEIVENEGRDAANAAQEKAEKEGKIIIKDSIADIFLQQILTRPAEHDVVATMNLNGDYISDALAAQVGGIGIAPGANINYETGHAIFEATHGTAPKYAGLNKVNPSSVILSSVLMLEHLGWQEAADKITDSIEDTIASKVVTYDFARLMDGAEEVSTSAFADELIKNLK

SEQ ID NO: 36981 - DNA, 1239 bp, Lactococcus lactis; IL1403
  CDS (1)..(1239)
atgaaaattgagatgaaaaatggaaaattagttgtgccagattatccagcaattggttatattagaggagatggtgttggcgaagatatttttcctcaggcgcaaaaagtttttgatgctgcggttctaaaaatttatggtcaaaaaaagaaaatagaatggcaaaaattattggcaggaggagaagcatttgagacttgtggagaatatctgcccaaagaaactctcgctcatattaatgaaaatttaattgcgataaagggaccactaatgaccccggtcggtgaaagctttcgttcaattaatgttactttaagacaaaaaatggatttatatgcttgcgtaagaccagttgaatattttaaagggataaaatccccagttaaggcgccagaaaaagttgacatgacaatttttcgagaaaatacagaagatatttatgcaggtattgaatttgctagtgaaacaaatgagtctcacaacttattaaaatttttagaaaaagaattgaatgtccattctattcgctttccaaaaacttcagcactaggaataaaacctgttagtcctgaaggaagtaaacgactggttaatgcggcttttgagtacgctctgaaaatgaacaaaaaaagagtgacctttgttcataagggaaatattatgaaatttactgaaggaggatttagaaattgggcctatgaggttgctagggaatatccaacttttacaaaactagaatacgatgaaatcaaaaatgaaagaggaagtttacaagctgaaaatgagaaaaaagcagcattaaaatcaggaaaaatttatgtagatgatgtaattgctgacaacttcctccaacagattattttaaatcctgaaaattttgaagtaattgccactcttaatttaaatggtgattatatttcagatgcacttgccgcacaggttggaggaattggaattgcaccaggagcgaatattaattataaaagcggtcatgctatttttgaagcaactcatggaacagctccagatatcgctggaaaaaatatagcaaatccttctagtctaattttatctggagtgatgatgtttgagtatttaggctggcaagaggtagctgaattaatcaaaattgctctttcattttcattcaggaatggaaatttgacagctgatttaggtggaaaactttcaacttcaaaattttccgacgttttaattgattttataaaaacatattaa

SEQ ID NO: 36982 - protein, 412 aa, Lactococcus lactis; IL1403
MKIEMKNGKLVVPDYPAIGYIRGDGVGEDIFPQAQKVFDAAVLKIYGQKKKIEWQKLLAGGEAFETCGEYLPKETLAHINENLIAIKGPLMTPVGESFRSINVTLRQKMDLYACVRPVEYFKGIKSPVKAPEKVDMTIFRENTEDIYAGIEFASETNESHNLLKFLEKELNVHSIRFPKTSALGIKPVSPEGSKRLVNAAFEYALKMNKKRVTFVHKGNIMKFTEGGFRNWAYEVAREYPTFTKLEYDEIKNERGSLQAENEKKAALKSGKIYVDDVIADNFLQQIILNPENFEVIATLNLNGDYISDALAAQVGGIGIAPGANINYKSGHAIFEATHGTAPDIAGKNIANPSSLILSGVMMFEYLGWQEVAELIKIALSFSFRNGNLTADLGGKLSTSKFSDVLIDFIKTY

SEQ ID NO: 36983 - DNA, 1257 bp, Legionella pneumophila
  CDS (1)..(1257): transl_table=11
atgacatacgataaaatcaaagtgcctgcccaaggcgaagctattactgttgctgctgaccattcacttcatgttcctgataatccaattattccttttattgagggtgatggtatcggtgttgatgtaacacctccgatgatccgtgttgttgatgctgcagttcaaaaagcatatggcaacaagagaaaaatttcctggatggaggtttatgccggggaaaaggctactaaggtttatggtggcgatcaatggcttcccaaagagactctggatgccatgaaaaaatatgtggtttcaattaaaggtcctttaactactcctgttggtggcggtatacgttcattgaatgtcgctattcgccaagacatggatctctatgtttgtttacgtccaattcgctattttaatggtgttccaagtccggttcgggagccatggaaaaccgatatggtcattttcagggaaaattctgaagatatttatgccggtattgaatggcaggcagataccccggaagctaaaaaagtgattcaatttttaactaaggaaatgggtgttaagaaaattcgttttcctgagcattgtggtataggtgtgaagcctgtttccagagaaggtaccactcgacttgtcaaagcggccattcagtatgcgatagataatgaccgcagtacagtgactttggtacataaaggcaatatcatgaagtttactgaaggggcttttaaagattggggatatcaagttgctcgcgattcttttggagcaaaagaatatcaaggtgggccatggatggaatttaaaaatcctaaaaccggtaagcagattatcattaatgatgtgatcgctgatgcctttttgcaacaaatcctgttaagacctgaagactatagtgtcattgctacattaaatttgaatggtgattatatttctgatgctttggctgctcaggttggtggaataggtatagctcccggagcgaacattagtgatcaaatggctgtgtttgaagcaactcatggaactgcgcctaaatatgctgggcagaataaagtgaaccccggttctattattctttctgccgaaatgatgttacgtcatatggggtggtatgaagcagctgatttgattatcagaggtatggaaggcgcgatagaagccaaaaccgtaacttatgattttgaacgtggtatgcaaggagcaacgttagtcagcagctctggttttgcagatgccatgattaagcatatgtaa

SEQ ID NO: 36984 - protein, 418 aa, Legionella pneumophila
MTYDKIKVPAQGEAITVAADHSLHVPDNPIIPFIEGDGIGVDVTPPMIRVVDAAVQKAYGNKRKISWMEVYAGEKATKVYGGDQWLPKETLDAMKKYVVSIKGPLTTPVGGGIRSLNVAIRQDMDLYVCLRPIRYFNGVPSPVREPWKTDMVIFRENSEDIYAGIEWQADTPEAKKVIQFLTKEMGVKKIRFPEHCGIGVKPVSREGTTRLVKAAIQYAIDNDRSTVTLVHKGNIMKFTEGAFKDWGYQVARDSFGAKEYQGGPWMEFKNPKTGKQIIINDVIADAFLQQILLRPEDYSVIATLNLNGDYISDALAAQVGGIGIAPGANISDQMAVFEATHGTAPKYAGQNKVNPGSIILSAEMMLRHMGWYEAADLIIRGMEGAIEAKTVTYDFERGMQGATLVSSSGFADAMIKHM

SEQ ID NO: 36985 - DNA, 1089 bp, Oryza sativa (japonica cultivar-group)
  CDS (1)..(1089)
atggcgctacggaggctgctccaggggagcgtcctgccgcggatggcgggcagagccgccgcggcgccgttctcgacggcgtccggggagaccgtccgcgccacgctcttcccaggcgacggcatcgggccggagatcgccgagtcggtcaagcaggtattcaatgttgcaggggtaccaatagaatgggaagaacactatgttggtacagaagttgatcccagaacagagagttttctgacttgggaaagcttggagtcggtgcggagaaacaaagttggcttgaaaggtcctatggctacgcctattggaaaaggccaccgttcattgaatcttacactaaggaaagagcttggtctttatgcaaatgttagaccttgcaacagcctcccaggatacaagactcgatatgatgatgtgaaccttgtgactattcgtgaaaataccgagggagaatatagtggccttgagcatcaggttgtgaggggtgttgtggaaagcttaaaaattatcactcgccaagcaagtttaagagtggcagagtatgctttccactatgccaagaccaatggccgggagagggtctctgcgatacacaaggccaatatcatgaggaagaccgatggtcttttcctcaagtgctgtcgtgaagtggctgagaagtaccctgaaattgtatacgaggaggtcatcattgacaattgttgtatgacgcttgtgaagaatcctggtctttttgatgtactggtgatgccaaatctttatggtgatattattagtgatctttgtgctggtctgattggaggcttgggcttgacacccagctgcaacattggtgaaggtggcatttgtctggcagaagctgttcacggttctgctcctgatattgctggcaagaaccttgcaaacccgaccgctcttatgctgagtgctgttatgatgttgcgccacttgcaattcaataaccaagcagaccggatccacaacgccatcctccagaccatctccgaggggaaattcaggactgctgatctcggcggaaaggcgtcgacttcagacttcacgaaggcagtctgtgatcatatctga

SEQ ID NO: 36986 - protein, 362 aa, Oryza sativa (japonica cultivar-group)
MALRRLLQGSVLPRMAGRAAAAPFSTASGETVRATLFPGDGIGPEIAESVKQVFNVAGVPIEWEEHYVGTEVDPRTESFLTWESLESVRRNKVGLKGPMATPIGKGHRSLNLTLRKELGLYANVRPCNSLPGYKTRYDDVNLVTIRENTEGEYSGLEHQVVRGVVESLKIITRQASLRVAEYAFHYAKTNGRERVSAIHKANIMRKTDGLFLKCCREVAEKYPEIVYEEVIIDNCCMTLVKNPGLFDVLVMPNLYGDIISDLCAGLIGGLGLTPSCNIGEGGICLAEAVHGSAPDIAGKNLANPTALMLSAVMMLRHLQFNNQADRIHNAILQTISEGKFRTADLGGKASTSDFTKAVCDHI

SEQ ID NO: 36987 - DNA, 1218 bp, Thermoplasma volcanium GSS1
  CDS (1)..(1218): transl_table=11
atggcatacatacaggtgagagaggatggaacacttctcgttcctgacaaagttacgataggctacattgagggggatggtataggccccgatatcacgaagaccacgataaatgtaataaatgctgcccttgaggtcgcctatggtggaaagagatcaatagaatggcacaaagtccttgcgggcgatgaagcatatgataagactggaaataggcttccagattcttcgctcgaagagcttaagaagtgcgttgtttcaataaagggcccgctcactactcctattggcgaagggtttaggagcctcaacgtcacgctcaggcagtaccttgatctgtatgctaacataaggcccgtccgttacttccctggagtcccatctcctgttctccatccggaatacatgaacatggttgtcttcagagaaaatactgaggatctttacgctggcattgagtggaggtatgattctgaggacgcggaaaaggttagggcttttctatcatctacattcaacataaatcttacgccagatacgggcataggcataaagcctataagcaagttcaagtcgacaaggttggtgcggaaggcgatacagtatgcaatagctaacggcaggaagagtgttacgctagtccacaaaggaaatataatgaagtacacagagggtgcattcagggactggggctatgaggtagccagaactgagtttggggattataccgtaacggaagccgaatacctgaaagaccctgagaaatacgcaaacaagatagtgataaaggacagaatcacggacaatatgttccagcaggtccttacaagaacccaggaatacgacgttattgctactccgaacttgaacggagactacctttccgatgccctcgctgcccaagttggtggaataggccttgccccaggagcaaacataggcgaccactatgctgtattcgaagcggttcacggtacagctccaaagtatgccggcctagacgttgcaaatccaacttccttgatactgtcagcggagatgatgctcgatcacataggctggaaggaagcatccaagatactcgatgatgctataatgcagacgtaccgcgaccaaaaattgacacaggatatagccaggctccttaatctaaaggccctaaaatgctctgagtttggcgaagaaataatcaacaggatgaagcctataaaaagctaa

SEQ ID NO: 36988 - protein, 405 aa, Thermoplasma volcanium GSS1
MAYIQVREDGTLLVPDKVTIGYIEGDGIGPDITKTTINVINAALEVAYGGKRSIEWHKVLAGDEAYDKTGNRLPDSSLEELKKCVVSIKGPLTTPIGEGFRSLNVTLRQYLDLYANIRPVRYFPGVPSPVLHPEYMNMVVFRENTEDLYAGIEWRYDSEDAEKVRAFLSSTFNINLTPDTGIGIKPISKFKSTRLVRKAIQYAIANGRKSVTLVHKGNIMKYTEGAFRDWGYEVARTEFGDYTVTEAEYLKDPEKYANKIVIKDRITDNMFQQVLTRTQEYDVIATPNLNGDYLSDALAAQVGGIGLAPGANIGDHYAVFEAVHGTAPKYAGLDVANPTSLILSAEMMLDHIGWKEASKILDDAIMQTYRDQKLTQDIARLLNLKALKCSEFGEEIINRMKPIKS

SEQ ID NO: 36989 - DNA, 1299 bp, Aeropyrum pernix K1
  CDS (1)..(1299): transl_table=11
atggcttcccctccttgcactaccgaggagctctcgcctcccccagggggttctctagtcgagtatagcggcggcagccttagggtccccgataaccctgttgttgcgttcataaggggcgacggcgtgggccccgaggttgttgagagcgctctaaaggttgtggacgccgccgtgaagaaggtttacggggggtctaggaggatagtctggtgggagctcctggctggccatctcgcccgggagaagtgcggcgagctgcttcccaaggcgacgctggagggtataaggcttgccagggtcgcgctcaaggggcccttggagactcccgtgggcacgggctatagaagccttaacgtggctatacgccaggcgctagacctctacgctaacataaggcctgtgaggtactacggccagccagccccccacaagtatgcggatagggttgacatggtgatattcagggagaacacggaggacgtgtacgccggtatagagtggcctcatgacagccctgaggctgcgaggattaggaggttcctcgcagaggagttcgggatatcgataagggaggacgccggcataggggttaagccgataagcaggtttgcaactaggcgtcttatggagagggctctcgagtgggccctcaggaacggcaacacagtagtcactataatgcacaagggcaacataatgaagtacactgaaggggctttcatgaggtgggcctatgaggtggcgctggagaagtttagggagcatgtggttacggagcaggaggtccaggagaagtatgggggggttaggcccgagggcaagatacttgttaacgacaggatagccgacaacatgctgcagcagattataaccaggccctgggactaccaggtcatagtggcgccaaacctcaacggcgactacataagcgacgctgcgagcgccctcgtcggaggcataggcatggccgcggggatgaacatgggcgacggcatagctgtcgccgagccggttcacggcaccgcgccgaagtacgcgggcaaggacctgataaacccctccgcggagatactgagcgcctcactactgataggagagttcatgggctggagggaggtgaagagcatagtagagtatgccattaggaaggcggtgcagagcaagaaggtcacccaggacctggccaggcacatgcccggggtccagccgctgaggacaagcgagtacacggagacgctgatagcatacatagacgaggcggacctgaacgaggtcctcgccgggaagaggggctag

SEQ ID NO: 36990 - protein, 432 aa, Aeropyrum pernix K1
MASPPCTTEELSPPPGGSLVEYSGGSLRVPDNPVVAFIRGDGVGPEVVESALKVVDAAVKKVYGGSRRIVWWELLAGHLAREKCGELLPKATLEGIRLARVALKGPLETPVGTGYRSLNVAIRQALDLYANIRPVRYYGQPAPHKYADRVDMVIFRENTEDVYAGIEWPHDSPEAARIRRFLAEEFGISIREDAGIGVKPISRFATRRLMERALEWALRNGNTVVTIMHKGNIMKYTEGAFMRWAYEVALEKFREHVVTEQEVQEKYGGVRPEGKILVNDRIADNMLQQIITRPWDYQVIVAPNLNGDYISDAASALVGGIGMAAGMNMGDGIAVAEPVHGTAPKYAGKDLINPSAEILSASLLIGEFMGWREVKSIVEYAIRKAVQSKKVTQDLARHMPGVQPLRTSEYTETLIAYIDEADLNEVLAGKRG

SEQ ID NO: 36991 - DNA, 1269 bp, Bacillus halodurans C-125
  CDS (1)..(1269): transl_table=11
atggcaaacggagagaaaattaaagtaagtgcaggggtacttgaagtaccaaacaatccaattatcccatttatcgaaggggatggaacaggtcctgatatttgggcggctgcacatcgggtgatcgatgcggctgtggagaaagcgtacaacggagaaaagaaaattgtctggaaagaaattttggcaggtgagaaagcgttcaatcaaacaggccaatggcttccagatgagacgcttgaaacgattcgcgagtatacaatcgctattaaaggaccgcttacgactccagttggaggaggcattcgttctttaaacgtggcattacgtcaagaacttgacctttatgtttgcttgcgtccagttcgttattttaatggggttccatctccagtcaaacgtccggaagatacgaacatggttattttccgtgaaaactctgaagacatctacgcaggaattgagtatcaggctggaacggatgaagtgaagaaagtaatcaacttcttacgggaagaaatgggcgttaagaaaattcgcttccctgaaacttctggtattggcatcaaacctgtttctcaagagggaacagaccgactagttcgtgcagcgattcaatatgcgattacagaaggacgtaagagcgtcaccctcgttcataaaggtaacattatgaagtttacagaaggtgcgttcaaaaactgggggtacgaagtagctgagcgcgagttcggtgataaagtattcacgtgggcacagtacgacaaaattgttgaagaacaaggaaaggaagctgcggataaagcgcaagcagaggcggaagcagcaggcaaaattatcgtcaaagattcaattgccgatattttcctccaacaaatcttaacgcgtccgaaagagttcgatgttgtagcaacaatgaacttgaacggtgactatatttccgatgcactcgcggctcaagtaggcggtatcggaattgcgccgggagcgaacattaactatgatacaggtcacgccatttttgaggccactcacggaacggcgccgaaatatgcaggcctcgacaaagtgaatccatcttctgtacttttatctggtgagctcatgcttcgtcaccttggttggaatgaagctgctgacttaattatggcttccatggacaaaacgatcgaaagtaaagttgtcacatacgactttgctcgattaatggatggggctacagaagtcaaatgctcagagtttgcgaatgaattgatcaagaacctttaa

SEQ ID NO: 36992 - protein, 422 aa, Bacillus halodurans C-125
MANGEKIKVSAGVLEVPNNPIIPFIEGDGTGPDIWAAAHRVIDAAVEKAYNGEKKIVWKEILAGEKAFNQTGQWLPDETLETIREYTIAIKGPLTTPVGGGIRSLNVALRQELDLYVCLRPVRYFNGVPSPVKRPEDTNMVIFRENSEDIYAGIEYQAGTDEVKKVINFLREEMGVKKIRFPETSGIGIKPVSQEGTDRLVRAAIQYAITEGRKSVTLVHKGNIMKFTEGAFKNWGYEVAEREFGDKVFTWAQYDKIVEEQGKEAADKAQAEAEAAGKIIVKDSIADIFLQQILTRPKEFDVVATMNLNGDYISDALAAQVGGIGIAPGANINYDTGHAIFEATHGTAPKYAGLDKVNPSSVLLSGELMLRHLGWNEAADLIMASMDKTIESKVVTYDFARLMDGATEVKCSEFANELIKNL

SEQ ID NO: 36993 - DNA, 1248 bp, Pasteurella multocida subsp. multocida str. Pm70
  CDS (1)..(1248): transl_table=11
atgcaatcaaaagtcgttatcccacaaggtgaaaaaattcaactggatgccaaaggagcattaattgtacctgatcatccgattatcccctttattgaaggcgatggtattggtgtggacgttaccccagcgatgcgcacagtcattgatgcggcggtggaaaaagcctatggcggcaaacgtaaaatttcgtggatggaaatctatgctggtggtaaagcaaatgaggtctatggcgaaaatacttggttacccgatgaaaccatgacatttatccgtgattatcatgtggcgattaaaggaccgcttatgacgccagtcggtggtggcattcgttccttgaatgtggcgatgcgtcaaggcttagatttatataattgcttacgtccaattcgttattatgacggtaccccaagccctgttaaacaccctgaattagtggacatggtgattttccgtgaaaactccgaagatatttatgcgggtgtagaatgggtggcaggatctgccgaagcgaataaagtgattgcgtttttacaacaagaaatgggggtgaaaaaaatccgtttcactgaagattgtggcattggtatcaaaccagtttctaaacaaggtacccaacgtttagttcgtgcggcactacaatatgtgattgataatgatcgcaaatcgcttactctagtgcacaaagggaacatcatgaaatttaccgaaggcgcattcaaagagtggggttatcaagtggcgcaagagtttggtgccgaattgctagatggtggtccatggatgacattaaaaaatccaaaaacaggcagagaaatcatcattaaagacagcattgccgatgcgtttttacaagaaattctgcttcacccaacggagtacgatgtgattgcgactttaaacctaaacggggattacatttctgacgcgttagccgcgcaggtggggggtatcgggatttcaccgggggcgaatattggtgcagaagctgcgatttttgaagccacccacggtaccgcaccaaaaattgcaggacaagataaaggtaatccgggttctttgattttgagtggtgaaatgatgttacgtcacttaggttggttagaagcggcggatttagtggtcaaagcagtatcgaaaaccattgctgataaaaccgttacctttgattttgctgaaatgttagaaggcgctaaattacgttccacttcggaatttgctcaagatattgtagcgaatatgtaa

SEQ ID NO: 36994 - protein, 415 aa, Pasteurella multocida subsp. multocida str. Pm70
MQSKVVIPQGEKIQLDAKGALIVPDHPIIPFIEGDGIGVDVTPAMRTVIDAAVEKAYGGKRKISWMEIYAGGKANEVYGENTWLPDETMTFIRDYHVAIKGPLMTPVGGGIRSLNVAMRQGLDLYNCLRPIRYYDGTPSPVKHPELVDMVIFRENSEDIYAGVEWVAGSAEANKVIAFLQQEMGVKKIRFTEDCGIGIKPVSKQGTQRLVRAALQYVIDNDRKSLTLVHKGNIMKFTEGAFKEWGYQVAQEFGAELLDGGPWMTLKNPKTGREIIIKDSIADAFLQEILLHPTEYDVIATLNLNGDYISDALAAQVGGIGISPGANIGAEAAIFEATHGTAPKIAGQDKGNPGSLILSGEMMLRHLGWLEAADLVVKAVSKTIADKTVTFDFAEMLEGAKLRSTSEFAQDIVANM

SEQ ID NO: 36995 - DNA, 1269 bp, Halobacterium sp. NRC-1
  CDS (1)..(1269): transl_table=11
atgagctacgacaagatcgaagtccccgagggcggggcgaaagtcagctacgacgaggccgccgacgaactcgacgtccccgacaccccgatcatccccatcattcacggggacggcatcggcaaggacgtcggtcccatcgcccaggacgtgctgagcgcggccgccgaggccaccggccacgacatcgagtggatggaagtgtacgccggcgagtccgcccgggagatgtacgacgagaacctccccgaggagaccgtcgaggccatccgcgagcaccgcgtcgcgatcaaggggccgctcacgacgccggtcggtgccgggttccgcagcctcaacgtggcgctgcgccagacgcttgacctctacgcgaacgtgcggccgacctactacctggacggcgtcccgtcacccatgaaggcccccgaggagatggacatggtgaccttccgggagaacaccgaggacgtctacgcgggcatcgagtgggaggccggcaccgacgaggcggagcaggtgcgttcgttcgtcgaggacgagatggacttcgacgacgtgatgcacgacggcgacatcgggatcggcctcaagcccatctcggagaagggctccaagcgcttggtacgggaggccatcgactacgccatcgagaacgaccgtgacacggtcacgctcgtccacaagggcaacatcatgaagttcaccgaggggcagttcggtgactgggggatggaggtcgccgaggaggagtaccccgacgacgaggtgttcgccgcgcccgattcgctgtgggaggaacaggacgaggtcgacatcccggaggacgccgtcatggtcgaggagcgcctcgcggacgccatgctgcagtggatgcagctgcgcaccgacgagttcgacgtgctcgcgatgccgaacctcaacggcgactacctcagcgacgccgcgggcgcgcagatcggcggcctcggcatcgcgccgggcgcgaacttcggggcggggcggtgtctcgcggagccggtccacgggtccgcgccgaagcgcgccggccaggacaaggcgaacccgaccgcgctcatcctctcgggccgcctgctgttcgagtacatcggctgggacgacgccagcacgctcgtgcgcgacgccgtcgaggacaccatcgagtcgggcacggtcacctacgacctcgcgcgccagcgcgacgacgccgaggaagtgtccagcacgacgtacgccgaggccgtcatcgaccgcatcgaggacctcgcgtaa

SEQ ID NO: 36996 - protein, 422 aa, Halobacterium sp. NRC-1
MSYDKIEVPEGGAKVSYDEAADELDVPDTPIIPIIHGDGIGKDVGPIAQDVLSAAAEATGHDIEWMEVYAGESAREMYDENLPEETVEAIREHRVAIKGPLTTPVGAGFRSLNVALRQTLDLYANVRPTYYLDGVPSPMKAPEEMDMVTFRENTEDVYAGIEWEAGTDEAEQVRSFVEDEMDFDDVMHDGDIGIGLKPISEKGSKRLVREAIDYAIENDRDTVTLVHKGNIMKFTEGQFGDWGMEVAEEEYPDDEVFAAPDSLWEEQDEVDIPEDAVMVEERLADAMLQWMQLRTDEFDVLAMPNLNGDYLSDAAGAQIGGLGIAPGANFGAGRCLAEPVHGSAPKRAGQDKANPTALILSGRLLFEYIGWDDASTLVRDAVEDTIESGTVTYDLARQRDDAEEVSSTTYAEAVIDRIEDLA

SEQ ID NO: 36997 - DNA, 1251 bp, Escherichia coli O157:H7 EDL933
  CDS (1)..(1251): transl_table=11
atggaaagtaaagtagttgttccggcacaaggcaagaagatcaccctgcaaaacggcaaactcaacgttcctgaaaatccgattatcccttacattgaaggtgatggaatcggtgtagatgtaaccccagccatgctgaaagtggtcgacgctgcagtcgagaaagcctataaaggcgagcgtaaaatctcctggatggaaatttacaccggtgaaaaatccacacaggtttatggtcaggacgtctggctgcctgctgaaacccttgatctgattcgtgaatatcgcgttgccattaaaggcccgctgaccactccggttggtggcggtattcgctctctgaacgttgccctgcgccaggaactggatctctacatctgcctgcgtccggtacgttactatcagggcactccaagcccggttaaacaccctgaactgaccgatatggttatcttccgtgaaaactcggaagacatttatgcgggtatcgaatggaaagctgactctgccgacgccgagaaagtgattaaattcctgcgtgaagagatgggcgtgaagaaaattcgcttcccggaacattgcggtatcggtattaagccgtgttctgaagaaggcaccaaacgtctggttcgtgcagcgatcgaatacgcaattgctaacgatcgtgactctgtgactctggtgcacaaaggcaacatcatgaagttcaccgaaggcgcgtttaaagactggggctacgagctggcgcgtgaagagtttggcggtgaactgatcgacggcggcccgtggctgaaagttaaaaacccgaacaccggcaaagagatcgtcattaaagacgtgattgctgatgcattcctgcaacagatcctgctgcgtccggctgaatatgatgttatcgcctgtatgaacctgaacggtgactacatttctgacgccctggcagcgcaggttggcggtatcggtatcgcccctggcgcaaacatcggtgacgaatgcgccctgtttgaagccacccacggtactgcgccgaaatatgccggtcaggacaaagttaacccaggttctattattctctctgctgagatgatgttacgccatatgggttggactgaagcggctgacctgattgttaaaggtatggaaggcgcaatcaatgccaagaccgtaacctatgacttcgaacgtctgatggaaggcgctaaactgctgaaatgttcagagtttggtgacgcgatcatcaagaatatgtaa

SEQ ID NO: 36998 - protein, 416 aa, Escherichia coli O157:H7 EDL933
MESKVVVPAQGKKITLQNGKLNVPENPIIPYIEGDGIGVDVTPAMLKVVDAAVEKAYKGERKISWMEIYTGEKSTQVYGQDVWLPAETLDLIREYRVAIKGPLTTPVGGGIRSLNVALRQELDLYICLRPVRYYQGTPSPVKHPELTDMVIFRENSEDIYAGIEWKADSADAEKVIKFLREEMGVKKIRFPEHCGIGIKPCSEEGTKRLVRAAIEYAIANDRDSVTLVHKGNIMKFTEGAFKDWGYELAREEFGGELIDGGPWLKVKNPNTGKEIVIKDVIADAFLQQILLRPAEYDVIACMNLNGDYISDALAAQVGGIGIAPGANIGDECALFEATHGTAPKYAGQDKVNPGSIILSAEMMLRHMGWTEAADLIVKGMEGAINAKTVTYDFERLMEGAKLLKCSEFGDAIIKNM

SEQ ID NO: 36999 - DNA, 1293 bp, Deinococcus radiodurans R1
  CDS (1)..(1293): transl_table=11
ttggtcggacgaccggcgggggttggagtagagtgggcaagcatgagtaagcacatcaaggtgcccgaacagggcgaaaagatcacgatgcagaacggcaagctgaccgttcctaaccgccccatcattcccttcgtggaaggcgacggcaccggccccgacatctgggcggccagcgtgcgcgtgttcgacgcggcggtggaaaaggcctacgggagcgagcgcaagctcgagtggatggaagtctacgcgggcgaaaagtcgctggaggtctacggcgccaacgagtggctgccgcaggaaacgctgaccgcgttccgcgactacctcttcggcatcaagggcccgctgaccactccggtcggcactggcatccgcagcatcaacgtggcgctcaggcaggaactcgacctgtacgcctgcgtgcgcccggtgcagtacttcaacggcgtgccgagccccgtcaagcgccccgaagacatcgacatggtgatcttccgtgaaaacaccgaagacatctacgccggcatcgagtggaaggccggcaccgacgaagccgagaaggtgcgcggcttcctgatgcgcgaaatgaacgtcaccaagattcgtttccccgacacctcctcgttcggcgtcaagcccgtgtcgaaggagggcaccgagcgcctggtgcgcgccgccatcgagtacgccatcgaaaacggccgcaagagcgtgagcctggtccacaagggcaacatcatgaagttcaccgaaggtggcttccgcgactggggctatgaactcgccaagcgcgaattcggcgcggtggaaatcgacggcggcccctggtgccagctcccgaacggcatcgtcatcaaggacgtcatcgccgacaacttcctccagcagatcctgctgcgtcctaccgagtacgacgtgatcgccaccctgaacctcaacggcgactacatctccgacgcgctcgccgcgcaggtgggcggtatcggcatcgcccccggcgccaacattaactacgtgaccgggcacgccatcttcgaggcgacccacggcaccgcgcccaagtacgcgggcaaaaacgtcatcaacccttcttcggtgatcctctccggcgaaatgatgctgcgttacatgggctggaccgaagccgccgacctgatcctcaagggtctggacgccaccattcagcagcgcgtcgtgacctacgacttcgcccgtggcatggacgacgccaccgaagtcaagaccagcgagttcgctgacaagatcatcgagaacatgcgcaacgcctga

SEQ ID NO: 37000 - protein, 430 aa, Deinococcus radiodurans R1
MVGRPAGVGVEWASMSKHIKVPEQGEKITMQNGKLTVPNRPIIPFVEGDGTGPDIWAASVRVFDAAVEKAYGSERKLEWMEVYAGEKSLEVYGANEWLPQETLTAFRDYLFGIKGPLTTPVGTGIRSINVALRQELDLYACVRPVQYFNGVPSPVKRPEDIDMVIFRENTEDIYAGIEWKAGTDEAEKVRGFLMREMNVTKIRFPDTSSFGVKPVSKEGTERLVRAAIEYAIENGRKSVSLVHKGNIMKFTEGGFRDWGYELAKREFGAVEIDGGPWCQLPNGIVIKDVIADNFLQQILLRPTEYDVIATLNLNGDYISDALAAQVGGIGIAPGANINYVTGHAIFEATHGTAPKYAGKNVINPSSVILSGEMMLRYMGWTEAADLILKGLDATIQQRVVTYDFARGMDDATEVKTSEFADKIIENMRNA

SEQ ID NO: 37001 - DNA, 1242 bp, Sulfolobus solfataricus P2
  CDS (1)..(1242): transl_table=11
ttgatgcaaaagataccagaagatggagaagtaattaaatttgaaaatgggaaatggattgtaccaaaaaagccaataattctgtatgttgaaggggatggaatagggcatgaaataacacatgctgctatgaaggttataaacaaagcagtggaaaaagcttatggatctgatagagaaattaagtgggtagaagttctagcaggagataaggcagaaaagctaaccggaaatagatttcctaaagagtcagaggaattgatagagaagtatagagtcttattaaaaggtcccctagaaacaccaataggcaaaggctggaaatccatcaatgtagcaattagattaatgttggatctttatgcaaatataagaccagtaaaatacattccaggtatagaaagtccaattaagaacgcagataagattgaccttataatatttagggaaaatactgatgatttgtacagaggaatagagtatccttatgacagtgaacaagcaaagaaaattagagattttctaagaaaggagctaggagtggaagtggaagatgatactggaattggtataaaacttatcagtagatttaagacgcaaaggattgcgagaatggctataaaatacgctatagaccataaacgaaagaaagttacaataatgcataaaggtaatgtgatgaaatataccgaaggagcatttagagaatggtcatatgaagttgcaacaaaagaatttagagattatatagttactgaggaagaggtaacaaagaattataatggagtacctccttctgggaaggtcataataaatgataggatagctgataacatgttccaacagataattatcagaccagacgagtacgatataatattagcacctaacgtaaatggggattacatatcggatgctgcgggcgcactggtaggaaatattggtatgttaggcggtgcaaatataggagatactggaggtatgttcgaggcaatacatggtaccgcacctaagtatgctggtaagaatgttgcaaaccccactggaataataaaaggtggtgagttaatgttaagatttatgggatgggataaggctgctgagttaatagattctgcaatcatggaatctataagacagaagaaggttactcaggatttagctagatttatgggtgtaagagccttatcaactactgaatatactgacgagctaattgcgataatcgatacactatcataa

SEQ ID NO: 37002 - protein, 413 aa, Sulfolobus solfataricus P2
MMQKIPEDGEVIKFENGKWIVPKKPIILYVEGDGIGHEITHAAMKVINKAVEKAYGSDREIKWVEVLAGDKAEKLTGNRFPKESEELIEKYRVLLKGPLETPIGKGWKSINVAIRLMLDLYANIRPVKYIPGIESPIKNADKIDLIIFRENTDDLYRGIEYPYDSEQAKKIRDFLRKELGVEVEDDTGIGIKLISRFKTQRIARMAIKYAIDHKRKKVTIMHKGNVMKYTEGAFREWSYEVATKEFRDYIVTEEEVTKNYNGVPPSGKVIINDRIADNMFQQIIIRPDEYDIILAPNVNGDYISDAAGALVGNIGMLGGANIGDTGGMFEAIHGTAPKYAGKNVANPTGIIKGGELMLRFMGWDKAAELIDSAIMESIRQKKVTQDLARFMGVRALSTTEYTDELIAIIDTLS

SEQ ID NO: 37003 - DNA, 1005 bp, Clostridium acetobutylicum ATCC 824
  CDS (1)..(1005): transl_table=11
atgaaaaaaaatcacacaataactcttattcctggagatggaataggaccagaagtaacgggggcagctaaaaaggtaatagaggcagcaggagttagtataacttgggatatagttgaagcgggagcaaaggttatggatgagtatggaacacctcttccagagtatgtgttagaaagcataaaaaagaataaaatagcactcaaaggacctataacaactcctgttggaagtggatttagaagtgtaaatgttgcattaagacaaacttttaatttatatgcaaatgtaagacctataaagacatatgaaggaatacctacaagatacaaagatgtagatctaattatagttcgtgaaaatacagaagatttatatgcaggaattgaacacaaaattggtgattatgcagctgaaagtattaagataataactagagaagcaagtgaaagaattgctgattttgctttcgatatggcagttaaacaaaatagaaaaaaggtaacagcagtacataaggctaatataatgaaattttctgatggactgtttttagattgtgcaagaaaagtagcagaaggttataaggaaaaagaatttgaagatatgattgttgatgctatgagtatgaaattagttcaaaatcctgaaaagtatgatgttcttgtaatgcctaatctttatggagatatactgtcagatatggctgcaggacttgttggaggacttggagtagcgccaggagcaaatataggaaaagaaatttcgatatttgaatcaattcatggttcagcacctgatatagcaggtaagaacatagcaaatccaacagctgctatactttctggagtaatgatgcttagatatataggggaacttgaagcagcagataagatagataatgcaattaaagtggttttaaaagagggaactaaggttacatctgatttaggtggaaatgctacaactgatgaatttgctaatgaagttataaagaatatataa

SEQ ID NO: 37004 - protein, 334 aa, Clostridium acetobutylicum ATCC 824
MKKNHTITLIPGDGIGPEVTGAAKKVIEAAGVSITWDIVEAGAKVMDEYGTPLPEYVLESIKKNKIALKGPITTPVGSGFRSVNVALRQTFNLYANVRPIKTYEGIPTRYKDVDLIIVRENTEDLYAGIEHKIGDYAAESIKIITREASERIADFAFDMAVKQNRKKVTAVHKANIMKFSDGLFLDCARKVAEGYKEKEFEDMIVDAMSMKLVQNPEKYDVLVMPNLYGDILSDMAAGLVGGLGVAPGANIGKEISIFESIHGSAPDIAGKNIANPTAAILSGVMMLRYIGELEAADKIDNAIKVVLKEGTKVTSDLGGNATTDEFANEVIKNI

SEQ ID NO: 37005 - DNA, 1230 bp, Sulfolobus tokodaii str. 7
  CDS (1)..(1230): transl_table=11
atgttatacaaagaacccgaggatggagaaaaaatcaaattcgataagggaaaatggatagtaccaaataaacccgtgattttatatatagaaggagatggaataggtccagagataactaacgctgcaataaaggtgattaataaagctgtagaaagagcttatggtagctctagagagataaaatggttagaagtttatgctggtgaaaaagctgaaaaattagttaatgatagatttccaaaagaaactcaagagatgttacttaaatatagagtagttcttaaaggtccattagaaactccaataggaaaaggatggaaatctgttaatgtagctattagattaatgcttgacttatacgcaaatataagaccagtaaaatatattgagggactagaaagccccctaaaacatcccgaaaaagtagatatgataatttttagagaaaatactgatgatctatatagaggaatagaatatccatttaatagtgaggaggctaaaaaaattagagactttctaagaaaagaactaaaagtagaaatagaagacgataccggaatagggataaaggtaatgagtaaatataaaactcaaagaattactaggttagcaatacagtatgcaatagaacataaaaggaaaaaggttactattatgcataaaggtaatgttatgaaatatacagaaggagcttttagagaatgggcatatgaagttgctctaaaagaatatcgtgattttatagttacggaagaagaaataaaccagggtaaaccagatcaaggtaaaataattctaaatgatagaattgctgataatatgttccaacaaataataataagaccagaagaatatgatataattttagcaccaaacgtaaacggtgactatatttctgatgcggccggtgcattaatcggcaatattggaatgctaggaggagctaatattggcgacgagggaggaatgtttgaagctattcatggtacagcaccaaagtatgctggcaaaaatgtagctaacccaacaggaattataaaagctggagaattgatgctaagatggatgggatggaatgaagctgctgacttaatagaaaaagctattaatatggcaataagagacaagaaagttacacaggatattgctaggtttatgggagtaaaagcattaggtaccaaagagtacgcagatgaactaataaagataatggacacaatttga

SEQ ID NO: 37006 - protein, 409 aa, Sulfolobus tokodaii str. 7
MLYKEPEDGEKIKFDKGKWIVPNKPVILYIEGDGIGPEITNAAIKVINKAVERAYGSSREIKWLEVYAGEKAEKLVNDRFPKETQEMLLKYRVVLKGPLETPIGKGWKSVNVAIRLMLDLYANIRPVKYIEGLESPLKHPEKVDMIIFRENTDDLYRGIEYPFNSEEAKKIRDFLRKELKVEIEDDTGIGIKVMSKYKTQRITRLAIQYAIEHKRKKVTIMHKGNVMKYTEGAFREWAYEVALKEYRDFIVTEEEINQGKPDQGKIILNDRIADNMFQQIIIRPEEYDIILAPNVNGDYISDAAGALIGNIGMLGGANIGDEGGMFEAIHGTAPKYAGKNVANPTGIIKAGELMLRWMGWNEAADLIEKAINMAIRDKKVTQDIARFMGVKALGTKEYADELIKIMDTI

SEQ ID NO: 37007 - DNA, 1218 bp, Thermoplasma acidophilum DSM 1728
  CDS (1)..(1218): transl_table=11
atggcatatattcaagtgaaggaggatggaacccttcaggttccagatagagtaactataggatatatagagggcgatggaataggacctgatatatcaaagacaacgataaacgtactcaacgcagctcttgacatcgcctatggtggaaagcgttcaatagaatggaagaagatacttgcaggagatgaggcctacgataagaccggtgacaggcttccccagtcatcgctagatgaactgaaaaagtgtgtagtttcgctgaagggacctctgacaaccccaataggagaaggcttcaggagccttaacgtcactttgaggcagtacctcgatctttatgcgaacatcaggcctgtaagatacttcccaggcgtgccttcccctgtagttcatccagaatatatgaacatggtcgtcttcagggagaacaccgaggacctgtatgccggcatagaatggaggtacgattcagatggagccaagaaggtcagggaattcttggcgtcaacattcaacataaacctaacaagcgataccggcatagggataaagcccataagcaagttcaagtccacgaggcttgtcaggaaggctatacagtatgctatagctaacaagaggaagagcgtaacgcttgtgcataagggaaacataatgaagtacactgagggggcattcaaggaatggggttatgaggttgctaagacggagttcggcaactacaccgtgacggaaacggaataccttcaggatcctgaaaaatactcgaacaagatcgtcataaaggatcgaataacggacaacatgttccagcaggtcctgaccaggacgcaggagtacgatgtcattgcgacgcccaatctgaatggcgactacctttcagatgccctggcggcccaggtcggcggcataggcctggcacctggagcgaatataggcgaccactatgccgtatttgaggccgtgcatggaacagcaccgaagtacgctggcatggatgttgcaaacccaacatcgctgatactctccggagagatgatgctgcaacacattggctggaacgaggctgcgaacatactcgatgaggcaataatgcagacgtacagggatcagaagctgacgcaggacattgcaaggcttcttaacgtaaaagcacttaaatgctctgaattcggtgaggagataatcaacaggatgaaaaaacctgttcactga

SEQ ID NO: 37008 - protein, 405 aa, Thermoplasma acidophilum DSM 1728
MAYIQVKEDGTLQVPDRVTIGYIEGDGIGPDISKTTINVLNAALDIAYGGKRSIEWKKILAGDEAYDKTGDRLPQSSLDELKKCVVSLKGPLTTPIGEGFRSLNVTLRQYLDLYANIRPVRYFPGVPSPVVHPEYMNMVVFRENTEDLYAGIEWRYDSDGAKKVREFLASTFNINLTSDTGIGIKPISKFKSTRLVRKAIQYAIANKRKSVTLVHKGNIMKYTEGAFKEWGYEVAKTEFGNYTVTETEYLQDPEKYSNKIVIKDRITDNMFQQVLTRTQEYDVIATPNLNGDYLSDALAAQVGGIGLAPGANIGDHYAVFEAVHGTAPKYAGMDVANPTSLILSGEMMLQHIGWNEAANILDEAIMQTYRDQKLTQDIARLLNVKALKCSEFGEEIINRMKKPVH

SEQ ID NO: 37009 - DNA, 1254 bp, Yersinia pestis CO92
  CDS (1)..(1254): transl_table=11
atggaaagcaaagtagttgttccggcagaaggtaagaaaattactgtcgatgctcagggtaaactggttgttccgcataatccgatcattccatttattgaaggtgacggtattggtgttgatgtaaccccggcgatgatcaacgtggtagatgctgcggttaagaaagcttataacggtgaacgtaaaatttcctggatggaaatttacactggtgagaaatcaacccatgtctatggtaaagatgtttggttgccagaagaaaccttagatctgatccgtgattatcgcgttgctatcaaaggcccgttgaccactcctgtcggtggcggcatccgttctttgaacgttgctctgcgtcaacaacttgacctgtatgtgtgtctgcgtccggtgcgttattatgaaggcaccccaagcccggtaaaacaccctgaactgaccaacatggtgattttccgtgaaaacgctgaagatatctatgcgggtatcgaatggaaagcgggttcacccgaagcagagaaagtgatcaagttcctgcgtgaagagatgggtgtgaagaaaatccgtttccctgaacaatgtggtatcggtgtgaaaccgtgttcagaagaagggactaagcgtttggtacgtgcagcgattgaatatgcaattaccaacgatcgtgaatcagttacgctggttcataaaggcaatattatgaaattcaccgaaggcgcgtttaaagactggggttatcagttagcgcgtgaggaatttggtggtgaactgatcgacggtggcccatgggttaaaatcaaaaacccaaataacggcaaagaaattatcgttaaagatgtgattgccgatgctttcctgcaacagatcctgctgcgtcctgcggaatatgatgttatcgcttgtatgaacctgaacggtgattacatctctgatgcattggcagctcaggttggcggtattggtattgctccgggggctaacattggtgatgactgcgcactgttcgaagccactcacggtactgcaccaaaatatgctggtcaggataaagtgaacccaggttctattattctttcagcagaaatgatgctgcgtcacatgggctggtttgaagccgctgacttaatcattaaaggcactgaaggcgcaattcaagccaagaccgtgacttatgatttcgaacgtctgatggaaggcgctaagttgttgaagtgtagtgagtttggcgacgccattattaagcacatgtag

SEQ ID NO: 37010 - protein, 417 aa, Yersinia pestis CO92
MESKVVVPAEGKKITVDAQGKLVVPHNPIIPFIEGDGIGVDVTPAMINVVDAAVKKAYNGERKISWMEIYTGEKSTHVYGKDVWLPEETLDLIRDYRVAIKGPLTTPVGGGIRSLNVALRQQLDLYVCLRPVRYYEGTPSPVKHPELTNMVIFRENAEDIYAGIEWKAGSPEAEKVIKFLREEMGVKKIRFPEQCGIGVKPCSEEGTKRLVRAAIEYAITNDRESVTLVHKGNIMKFTEGAFKDWGYQLAREEFGGELIDGGPWVKIKNPNNGKEIIVKDVIADAFLQQILLRPAEYDVIACMNLNGDYISDALAAQVGGIGIAPGANIGDDCALFEATHGTAPKYAGQDKVNPGSIILSAEMMLRHMGWFEAADLIIKGTEGAIQAKTVTYDFERLMEGAKLLKCSEFGDAIIKHM

SEQ ID NO: 37011 - DNA, 1428 bp, Synechocystis sp. PCC 6803
  CDS (1)..(1428): transl_table=11
atgtacgaaaaacttcagccccccagcgttgggtcaaaaatcacctttgttgcaggtaagcccgtagtacccaacgatccgattattccctacatccggggggacggcaccggggttgatatttggcccgctacggaattagtcatcaatgcagcgatcgccaaggcctatggcggcgagaggaaaatcaactggttcaaagtctatgccggggacgaagcctgtgaattgtacggcacttatcagtatttaccggaagacactttaacagcgattaaggagtatggggtagccatcaaagggcctctcacaaccccggtgggcggtggtatccgttccctaaacgtggccctgagacaaatttttgacctctacacctgtgtgcggccctgtcgttactatcccggtactccgtctccccacaaaaccccggaaaaattagacattatcgtttatcgggaaaatacggaagatatttacctaggcattgaatgggcggaaggtacggaaggggcgaaaaagttaatcgcttaccttaacgatgaactgattcccacaactccagctttgggcaaaaaacaaattcgcctcgactctggcattggtattaaaccgattagtaagactggttcccaacggttggtgcggcgggctattctccatgcattgcgcttgccgaaagcaaaacagatggtgacgttggtccataagggcaacattatgaagttcaccgaaggggcgtttcgggattggggttacgagttggctacgacggaatttcgggcggaatgcgttacggaacgggaatcttggattttgggcaataaggaaagtaatccggacttaaccattgaggccaacgcccacatgattgaccccggttatgacactttgaccgaagaaaaacaagcggtcattaaacaagaagtggagcaggttttaaattccatttgggaatcccatggtaatggccagtggaaagaaaaagtcatggtcaatgaccgcattgccgatagtattttccaacagatccaaacccgccccgatgagtattccattctggcgaccatgaatttgaacggggattacctttccgatgccgccgccgctgtggtgggaggtttgggcatgggccccggagctaacattggggatagtgcagccatttttgaagccacccacggcactgcccccaaacatgctggtttagaccggatcaaccccggctctgtgatcctttccggcgtaatgatgctggaatttatgggctggcaggaggccgctgatctgattaaaaaaggtatcggagcggcgatcgccaatcgggaagttacctacgatttagcccggttaatggaaccgaaggtggataaacccctaaaatgctccgagtttgcccaggcgatcgtcagtcatttcgatgattaa

SEQ ID NO: 37012 - protein, 475 aa, Synechocystis sp. PCC 6803
MYEKLQPPSVGSKITFVAGKPVVPNDPIIPYIRGDGTGVDIWPATELVINAAIAKAYGGERKINWFKVYAGDEACELYGTYQYLPEDTLTAIKEYGVAIKGPLTTPVGGGIRSLNVALRQIFDLYTCVRPCRYYPGTPSPHKTPEKLDIIVYRENTEDIYLGIEWAEGTEGAKKLIAYLNDELIPTTPALGKKQIRLDSGIGIKPISKTGSQRLVRRAILHALRLPKAKQMVTLVHKGNIMKFTEGAFRDWGYELATTEFRAECVTERESWILGNKESNPDLTIEANAHMIDPGYDTLTEEKQAVIKQEVEQVLNSIWESHGNGQWKEKVMVNDRIADSIFQQIQTRPDEYSILATMNLNGDYLSDAAAAVVGGLGMGPGANIGDSAAIFEATHGTAPKHAGLDRINPGSVILSGVMMLEFMGWQEAADLIKKGIGAAIANREVTYDLARLMEPKVDKPLKCSEFAQAIVSHFDD

SEQ ID NO: 37013 - DNA, 1251 bp, Salmonella typhimurium LT2
  CDS (1)..(1251): transl_table=11
atggaaagcaaagtagttgttccggtggaaggtaagaagatcaccctgcaaaacggcaaactcaacgttcctgagaatccgattatcccgtttattgaaggcgatggtatcggtgttgatgtcactccagccatgcttaaagtagtcgatgccgccgtcgagaaagcctataaaggcgagcgtaaaatttcctggatggaaatttacaccggagaaaaatccacacaggtttacggccaggatgtctggcttcccgctgaaacccttgatttaattcgtgactaccgcgtagcgattaaaggtccattgaccacgccggttggcggcggtatccgctctctgaacgttgccctgcgtcaggagcttgacctgtacgtttgtctgcgtcccgttcgttactatcagggcacgccaagtccggtgaaacatccggagctgaccgatatggtcatcttccgtgaaaactctgaagacatctacgccggaattgaatggaaagctgactctgcagacgctgagaaagtgatcaagttcctgcgcgaagagatgggcgtgaagaaaattcgcttcccggagcactgcggtatcggtatcaaaccgtgttctgaagaaggcactaaacgtctggttcgcgcggcgattgaatacgctattaccaacgatcgcgattccgtcacgctggtacataaaggcaatatcatgaagttcaccgaaggcgcgtttaaagactggggctaccagttggcgcgcgacgagttcggcggtgagcttattgacggcggtccgtggctgaaaattaagaacccgaacacgggtaaagagatcgtggttaaagacgttatcgccgatgcgttcctgcaacaaatcctgttgcgtccggcggaatacgacgttatcgcctgtatgaacctgaacggtgactatatttccgatgccctggcggctcaggttggcggtatcggtattgcaccgggtgcgaatatcggcgacgaatgcgcgttgtttgaagcgactcacgggactgcgccgaaatatgcgggccaggataaagtcaacccaggctccattattctgtctgcggagatgatgctgcgccacatgcagtggttcgaagccgcagacctgattgttaaaggtatggaaggcgcgattgccgcgaagaccgtgacctatgactttgaacgcctgatggaaggcgctaagctgctgaaatgtagtgagtttggtgacgcgattatcgcgaatatgtaa

SEQ ID NO: 37014 - protein, 416 aa, Salmonella typhimurium LT2
MESKVVVPVEGKKITLQNGKLNVPENPIIPFIEGDGIGVDVTPAMLKVVDAAVEKAYKGERKISWMEIYTGEKSTQVYGQDVWLPAETLDLIRDYRVAIKGPLTTPVGGGIRSLNVALRQELDLYVCLRPVRYYQGTPSPVKHPELTDMVIFRENSEDIYAGIEWKADSADAEKVIKFLREEMGVKKIRFPEHCGIGIKPCSEEGTKRLVRAAIEYAITNDRDSVTLVHKGNIMKFTEGAFKDWGYQLARDEFGGELIDGGPWLKIKNPNTGKEIVVKDVIADAFLQQILLRPAEYDVIACMNLNGDYISDALAAQVGGIGIAPGANIGDECALFEATHGTAPKYAGQDKVNPGSIILSAEMMLRHMQWFEAADLIVKGMEGAIAAKTVTYDFERLMEGAKLLKCSEFGDAIIANM

SEQ ID NO: 37015 - DNA, 1263 bp, Listeria innocua Clip11262
  CDS (1)..(1263): transl_table=11
atgagtcaaaaaattcaagtagaaaatggtgttttaaaaacaccgaacaacccagtcattccttttattgaaggagatggaacaggtccagacatctgggcagctgcaaaacgcgttttagatgcggcagtaaaaaaagcttacaatggcgaaaaagaaattgcttggaaagaagttctggctggcgaaaaagcatttaaacaaactggtgaatggcttccacaagagacactagatacaattgatgagtatttaattgctatcaaaggaccgcttacaacaccaattggtggcggtattcgctctctaaacgtcgctttacgccaagagttagatttatatgtatgtttacgtccagttcgttatttcaaaggtgttccttccccagtaaaacgtcctgaagatactgatatggtcattttccgtgaaaatacagaagatatttatgcgggaattgaatttaaagaaggtagcgcagaatcgaaaaaattaattgatttcttaaaatcggagtttggcgtggataaaattcgtttcccggaaacttctggtattgggattaaaccaatttcaaaagaaggaacagagcgtttagtccgttcagcgattgaatatgcgattaaagaaggacgtaaatctttaacacttgtacacaaaggaaatatcatgaaattcactgaaggagctttcaaaaactggggctatgatttatgtgaacgcgaatacggcgataaagtatttacttggaatgagtatgatcgtatcaaagaagcagaaggtacagaagctgctgatgcaaaacaaaaagaagagcttgctgctgggaaaatattagtaaaagattcgattgcagatattttcttacaacaaatcctcactcgcccagctgaatttgatgtagtagctacgatgaatttaaatggagattacatttctgatgcccttgctgctcaagtaggtggaattggaattgctcctggagcgaacattaattatttaactggtcatgcgatttttgaagcaacacatggtactgctccaaaatatgctggtcttgataaagtcaatccatcttctgttattttatctggaacattactacttgaacatattggctggggtgaagcagcagcactcattaaccactctatggaaaaaactatcgctgcaaaaaccgtaacatatgatttcgctagattaatggatggagctacagaagttaaatgttcggaatttgcggacgagttaatcaaaaacttctaa

SEQ ID NO: 37016 - protein, 420 aa, Listeria innocua Clip11262
MSQKIQVENGVLKTPNNPVIPFIEGDGTGPDIWAAAKRVLDAAVKKAYNGEKEIAWKEVLAGEKAFKQTGEWLPQETLDTIDEYLIAIKGPLTTPIGGGIRSLNVALRQELDLYVCLRPVRYFKGVPSPVKRPEDTDMVIFRENTEDIYAGIEFKEGSAESKKLIDFLKSEFGVDKIRFPETSGIGIKPISKEGTERLVRSAIEYAIKEGRKSLTLVHKGNIMKFTEGAFKNWGYDLCEREYGDKVFTWNEYDRIKEAEGTEAADAKQKEELAAGKILVKDSIADIFLQQILTRPAEFDVVATMNLNGDYISDALAAQVGGIGIAPGANINYLTGHAIFEATHGTAPKYAGLDKVNPSSVILSGTLLLEHIGWGEAAALINHSMEKTIAAKTVTYDFARLMDGATEVKCSEFADELIKNF

SEQ ID NO: 37017 - DNA, 1251 bp, Ralstonia solanacearum GMI1000
  CDS (1)..(1251): transl_table=11
atgtaccaacacatcaaggtcccggccggagagaagatcaccgtcaaccaagacttctccctgaacgtccccgataaccccatcattccttacatcgagggcgacggcaccggcttcgatatcacccccgtgatgatcaaggtggtggacgcggccgtggagaaggcctatgccggcaagcgcaagatttcctggatggaaatctacgccggcgagaagtcgaccaaggtgtacggcccggacgtgtggctgccggaagaaaccctgcaggtcctcaaggactacgtggtctcgatcaagggcccgctgacgacgccggtgggcggcggcatccgttcgctgaacgtggcgctgcgccaggagctggacctgtacgtctgcctgcgcccggtgcgctacttcaagggcgtgccctcgccggtcaaggagccggagaagaccgacatggtcatcttccgcgagaactcggaagacatctacgccggcatcgagttcgaagcccagagcgacaaggccaagaagctgatcaagatcctgcaggacgagttcggcgttaagaagatccgcttcccggagacctcgggcatcggcgtcaagccggtctcgaaggaaggcactgagcgcctggtgcgcaaggccatccagtacgcgatcgacaacgacaagccgtcggtcacgatcgtgcacaagggcaatatcatgaagttcacggaaggcggtttccgtgactgggcctacgcgctggcgcaaaaggaattcggcgccgagctgatcgatggcggtccgtggtgcaagttcaagaacccgaagacgggcaaggaaatcgtcgtcaaggacgcgattgccgacgccttcctgcagcagatcctgctgcgtccggccgagtactcggtggtggcgacgctgaacctgaacggcgactacatctccgacgcgctggccgcacaggtcggcggcatcggcatcgccccgggcgcgaacctgagcgactccgtcgcgatgttcgaggccacccacggcacggctccgaagtacgccggcaaggactacgtgaacccgggttcggaaatcctgtcggccgaaatgatgctgcgccacatgggctggacggaagccgctgacctgatcatctcgtcgatcgagaagtcgatcctgtcgaagaaggtcacgtatgacttcgcccgcctgctggaaggcgcgacgcaggtgtcgtgctcgggctttggtcaggtgatgatcgacaatatgtaa

SEQ ID NO: 37018 - protein, 416 aa, Ralstonia solanacearum GMI1000
MYQHIKVPAGEKITVNQDFSLNVPDNPIIPYIEGDGTGFDITPVMIKVVDAAVEKAYAGKRKISWMEIYAGEKSTKVYGPDVWLPEETLQVLKDYVVSIKGPLTTPVGGGIRSLNVALRQELDLYVCLRPVRYFKGVPSPVKEPEKTDMVIFRENSEDIYAGIEFEAQSDKAKKLIKILQDEFGVKKIRFPETSGIGVKPVSKEGTERLVRKAIQYAIDNDKPSVTIVHKGNIMKFTEGGFRDWAYALAQKEFGAELIDGGPWCKFKNPKTGKEIVVKDAIADAFLQQILLRPAEYSVVATLNLNGDYISDALAAQVGGIGIAPGANLSDSVAMFEATHGTAPKYAGKDYVNPGSEILSAEMMLRHMGWTEAADLIISSIEKSILSKKVTYDFARLLEGATQVSCSGFGQVMIDNM

SEQ ID NO: 37019 - DNA, 1320 bp, Pyrobaculum aerophilum str. IM2
  CDS (1)..(1320): transl_table=11
atggctgtagatatagagaaaatcaaacagggaatacccaacatagtcccctacgctgggaagtatgtagaccctccagagggggattacgtagagtacacgggcccgggccaattcaaagtccccgataaggtcgttatcgggtacatagagggagacgggatagggccagaggtggcttatgcggctattagagtggcaaacgccgcagttgaaaaggcatatgggaagtctagaaaagtaatctggtatgaggtagtggtcggcgaaaaggccgaaaaaatcttcggcaacagactgcctgaccagagcattaacgtcttgaagaaaatacgggtgtttcttaaagccccgcttgagactccagtgggaggagggtttagaagtataaacgtgacgttgcgccagctctttgatctctacgccaatattagacctgtgaagtacttcccgggcctcccctcgcctctgaaaaggccagaggttgtcgatttagtaatttttagagaaaacacagaggacgtctatgctggcattgagtggccttacaacagccctgaggcgtctaaaatccgggatttcctgcgtagggagttcggaattaatataagagacgacgccggcattggcataaagcccattagcaaattcggcacgcagagaattgcaaggctggccttgaaatttgcaattgaaaacaagaggcgtgtggtaacagttatgcataagggaaatatccagaaatacaccgaaggcgcatttaaagattgggcgtttgaagtggctaggaatgagtttagggaacacgtggtgtttgaagacgagctggcccagtacggcggccaggtgcccccgggcaaagtccttgttaacgacagaattgccgacaatatgttacaacagctactcacgagaacgggggaatacgacgtaattctagcccccaacttaaatggggattacgtctctgacgaggccgctggcctagtcggaggcctcggcgtcgcccccggcattgacgtgggagactggggaatgatggcggagccggtccacggcacagcgcctaaatatagaggtaaaaattacgtaaaccccactgccacaatactagcccttgaactactcttccgattcttggggtggagagaagccgcgaattatattatcaaaggagttgagactgcatatagggagggctatttcaccggagatctggcaaggcaaatggacgaggaggagaggaaacatcgggttaaggaggtgcttgggacgcaggaatttgccgataaagtagtagagataataaaaagattgtaa

SEQ ID NO: 37020 - protein, 439 aa, Pyrobaculum aerophilum str. IM2
MAVDIEKIKQGIPNIVPYAGKYVDPPEGDYVEYTGPGQFKVPDKVVIGYIEGDGIGPEVAYAAIRVANAAVEKAYGKSRKVIWYEVVVGEKAEKIFGNRLPDQSINVLKKIRVFLKAPLETPVGGGFRSINVTLRQLFDLYANIRPVKYFPGLPSPLKRPEVVDLVIFRENTEDVYAGIEWPYNSPEASKIRDFLRREFGINIRDDAGIGIKPISKFGTQRIARLALKFAIENKRRVVTVMHKGNIQKYTEGAFKDWAFEVARNEFREHVVFEDELAQYGGQVPPGKVLVNDRIADNMLQQLLTRTGEYDVILAPNLNGDYVSDEAAGLVGGLGVAPGIDVGDWGMMAEPVHGTAPKYRGKNYVNPTATILALELLFRFLGWREAANYIIKGVETAYREGYFTGDLARQMDEEERKHRVKEVLGTQEFADKVVEIIKRL

SEQ ID NO: 37021 - DNA, 1065 bp, Drosophila melanogaster
  CDS (1)..(1065)
atggctgctagattcatacagaaaattgtcaacgcgactcccgccgccagccggtcctactcctccggcaccaagaaagtcaccctcatccctggcgatggcatcggacctgagatctctgcggccgtgcagaaaatcttcaccgccgccaatgtccccatcgagtgggaggccgtggacgtgacccccgtccggggacccgacggaaagttcggcatcccacaggccgccattgactcggtgaacacgaacaagatcggcctgaagggtcctctgatgacgcccgtcggcaagggccatcggtctctgaatctggccctgcgcaaggagttcaatctgtacgccaacgtgcgtccctgccgcagtctcgagggctacaagacgctgtacgacgatgtggacgtggtcaccatccgtgagaacaccgagggcgagtactccggcatcgagcacgagatcgtcgacggcgtcgttcagagcatcaagctgatcaccgaggaagcctccaagcgtgtggccgagtacgccttccagtacgccaagaacaacaaccgcaagaaggtcaccgtggtgcacaaggcgaacattatgcgcatgtccgatggtctcttcctgcgctgcgtccgcgacatggcccagaagttcccagaaatccagttcgaagagaagtatctggatacggtgtgcctgaacatggtccagaaccccggaaaatacgacgtgctggtcatgcccaatctgtacggtgatattctgtctgacatgtgcgccggtttggtgggcggcctcggcctgacgccctccggcaacatgggcctgaacggtgccctgttcgagtctgtgcacggaaccgcccccgatattgccggcaaggacctggccaatcccactgccctgttgctgtcggcggtcatgatgctgcgccacatggagctcaacacgtacgccgataaaatcgagcgtgccgccttcgagaccatcaaggagggcaaatacctcaccggcgatctgggcggccgtgccaagtgctccgagttcacgaacgagatctgtgccaagctgtag

SEQ ID NO: 37022 - protein, 354 aa, Drosophila melanogaster
MAARFIQKIVNATPAASRSYSSGTKKVTLIPGDGIGPEISAAVQKIFTAANVPIEWEAVDVTPVRGPDGKFGIPQAAIDSVNTNKIGLKGPLMTPVGKGHRSLNLALRKEFNLYANVRPCRSLEGYKTLYDDVDVVTIRENTEGEYSGIEHEIVDGVVQSIKLITEEASKRVAEYAFQYAKNNNRKKVTVVHKANIMRMSDGLFLRCVRDMAQKFPEIQFEEKYLDTVCLNMVQNPGKYDVLVMPNLYGDILSDMCAGLVGGLGLTPSGNMGLNGALFESVHGTAPDIAGKDLANPTALLLSAVMMLRHMELNTYADKIERAAFETIKEGKYLTGDLGGRAKCSEFTNEICAKL

SEQ ID NO: 37023 - DNA, 1203 bp, Pyrococcus furiosus DSM 3638
  CDS (1)..(1203): transl_table=11
atgagcattagacttccacaagaaggaaaagttattgaagttgtcaacggctctctaaagatccctaatgagcccatagttgcctatatagaaggtgatggaattgggagagaagttatcccagcagcgattaaagtagttgacaaggccgtcgaaactgcatacaaaggaaagagaagaattgtttggtggaagttacttgctggaaaagaagccctccagaaagttggaaaacttcttcctgaagaaacggtaaaagggatcgcggaggtaaaggtcgcactcaaaggacccatggagacaccaatagggacgggacataggagtataaacgtggcattaaggaagatgttcgatctttatgcaaacataagaccaatcaaatactatggagtcccaactgtctatccatatgccgacaaagtggacttaataatatttagggagaacacggaagatgtttatgctggaatagaatgggaggcttatagtagagaggctcaaaaactcagggagttcctaaaaaatgaatttggaatagagataagagaggactctggaattacactaaaaccaatttccaagtttgcaactcaaagaatagtgagaaaagcaataaaatgggccatagaaaagggaagaaagagagttacaataatgcataaaggaaatgtaatgaagtttacagaaggagcattcagaaactgggcatttgaagttgctgaaaaggagttttccgaatacgtaagcataggcaaaccagaagaaggcaaaattctagttgatgacaagatagcagataatatgctccaacagataattctcagaccctgggagtatgacattatagtgactccaaacttaaacggagattacctcagtgatgctgctgcggccttagttggaggagttggaatggcagctgggataaatgttggagattacatagcaatagcagaaccagtccacggcacggccccagacatcgctggaaaaggaatagcaaacccctcagcggccattttaagtgcagcacttcttctcgaatatctcggctgggtagaagcggctgagttaattagagcttctctaaggaaaacgatagagaagggtaaagtaactcccgacctagcgagaggagaaaaagctctttcaacggaagaattcattcaggaagtcataaaagaaattgagggggaataa

SEQ ID NO: 37024 - protein, 400 aa, Pyrococcus furiosus DSM 3638
MSIRLPQEGKVIEVVNGSLKIPNEPIVAYIEGDGIGREVIPAAIKVVDKAVETAYKGKRRIVWWKLLAGKEALQKVGKLLPEETVKGIAEVKVALKGPMETPIGTGHRSINVALRKMFDLYANIRPIKYYGVPTVYPYADKVDLIIFRENTEDVYAGIEWEAYSREAQKLREFLKNEFGIEIREDSGITLKPISKFATQRIVRKAIKWAIEKGRKRVTIMHKGNVMKFTEGAFRNWAFEVAEKEFSEYVSIGKPEEGKILVDDKIADNMLQQIILRPWEYDIIVTPNLNGDYLSDAAAALVGGVGMAAGINVGDYIAIAEPVHGTAPDIAGKGIANPSAAILSAALLLEYLGWVEAAELIRASLRKTIEKGKVTPDLARGEKALSTEEFIQEVIKEIEGE

SEQ ID NO: 37025 - DNA, 1113 bp, Drosophila melanogaster
  CDS (1)..(1113)
atgtcgatgctggcgagaacagttggacggacgttcatgcaggctgcggcagcacgtagtctgcacaccacgtcgacgctacgggctacggataactacggcgccaacaggaccacctgcacactgattcccggcgacggtgtgggtcccgagctggtctactccctccaggaggtcttcaaggcagccagcgttcccgtggacttcgagtgctacttcctttccgaaatcaatcccgtgcttagtgccaaactggaggatgtggtggcatccattcagaaaaacaaagtgtgcattaagggcgttttggccacacccgactacagcaatgtgggtgacctgcagacccttaacatgaagcttcgcaacgacctggacctctacgccaatgtggtgcatgtgcgcagcttgcccggtgtcaagacccgccacaccaacatcgacacggtgattattcgcgagcagacggagggcgagtattcggcgttggagcacgagtcggtgcccggcattgtggagtgcctgaagattatcaccgccaaaaagtccatgcgcattgccaagttcgccttcgactatgcgacgaagaatcagcgcaagaaggtcaccgccgtgcacaaggcgaatatcatgaagttgggcgacggtctcttcctacgctcctgcgaagaggtttcccggctctatccgcgcatccagtttgagaagatgatcgtggacaacacgaccatgcagatggtttccaatcccaaccagttcgacgtgatggtcacccccaatctctatggtgccattgtggacaatctggccagtggtctcgtgggcggtgctggtgtcgttgctggtgcctcctactcctcggaatccgtcgtctttgagccgggtgcacgtcacaccttcgccgaggccgtgggcaagaacgtggctaatcccactgccatgctgctctgcggcgtgaagctgttgcgccacatcaacctgcccacctacggcgagatcatccagaatgccatcaacaaggtgctgaacgatggcaaggtgcgtactaaggatctgggcggacaatcgaccacgcaggactttacccgcgccatcatcctgaacatgtcctag

SEQ ID NO: 37026 - protein, 370 aa, Drosophila melanogaster
MSMLARTVGRTFMQAAAARSLHTTSTLRATDNYGANRTTCTLIPGDGVGPELVYSLQEVFKAASVPVDFECYFLSEINPVLSAKLEDVVASIQKNKVCIKGVLATPDYSNVGDLQTLNMKLRNDLDLYANVVHVRSLPGVKTRHTNIDTVIIREQTEGEYSALEHESVPGIVECLKIITAKKSMRIAKFAFDYATKNQRKKVTAVHKANIMKLGDGLFLRSCEEVSRLYPRIQFEKMIVDNTTMQMVSNPNQFDVMVTPNLYGAIVDNLASGLVGGAGVVAGASYSSESVVFEPGARHTFAEAVGKNVANPTAMLLCGVKLLRHINLPTYGEIIQNAINKVLNDGKVRTKDLGGQSTTQDFTRAIILNMS

SEQ ID NO: 37027 - DNA, 1305 bp, Yersinia pestis KIM
  CDS (1)..(1305): transl_table=11
ttgacacgaatcttacaaagcattaacaaaattgcgctgaaggagaggttgatggaaagcaaagtagttgttccggcagaaggtaagaaaattactgtcgatgctcagggtaaactggttgttccgcataatccgatcattccatttattgaaggtgacggtattggtgttgatgtaaccccggcgatgatcaacgtggtagatgctgcggttaagaaagcttataacggtgaacgtaaaatttcctggatggaaatttacactggtgagaaatcaacccatgtctatggtaaagatgtttggttgccagaagaaaccttagatctgatccgtgattatcgcgttgctatcaaaggcccgttgaccactcctgtcggtggcggcatccgttctttgaacgttgctctgcgtcaacaacttgacctgtatgtgtgtctgcgtccggtgcgttattatgaaggcaccccaagcccggtaaaacaccctgaactgaccaacatggtgattttccgtgaaaacgctgaagatatctatgcgggtatcgaatggaaagcgggttcacccgaagcagagaaagtgatcaagttcctgcgtgaagagatgggtgtgaagaaaatccgtttccctgaacaatgtggtatcggtgtgaaaccgtgttcagaagaagggactaagcgtttggtacgtgcagcgattgaatatgcaattaccaacgatcgtgaatcagttacgctggttcataaaggcaatattatgaaattcaccgaaggcgcgtttaaagactggggttatcagttagcgcgtgaggaatttggtggtgaactgatcgacggtggcccatgggttaaaatcaaaaacccaaataacggcaaagaaattatcgttaaagatgtgattgccgatgctttcctgcaacagatcctgctgcgtcctgcggaatatgatgttatcgcttgtatgaacctgaacggtgattacatctctgatgcattggcagctcaggttggcggtattggtattgctccgggggctaacattggtgatgactgcgcactgttcgaagccactcacggtactgcaccaaaatatgctggtcaggataaagtgaacccaggttctattattctttcagcagaaatgatgctgcgtcacatgggctggtttgaagccgctgacttaatcattaaaggcactgaaggcgcaattcaagccaagaccgtgacttatgatttcgaacgtctgatggaaggcgctaagttgttgaagtgtagtgagtttggcgacgccattattaagcacatgtag

SEQ ID NO: 37028 - protein, 434 aa, Yersinia pestis KIM
MTRILQSINKIALKERLMESKVVVPAEGKKITVDAQGKLVVPHNPIIPFIEGDGIGVDVTPAMINVVDAAVKKAYNGERKISWMEIYTGEKSTHVYGKDVWLPEETLDLIRDYRVAIKGPLTTPVGGGIRSLNVALRQQLDLYVCLRPVRYYEGTPSPVKHPELTNMVIFRENAEDIYAGIEWKAGSPEAEKVIKFLREEMGVKKIRFPEQCGIGVKPCSEEGTKRLVRAAIEYAITNDRESVTLVHKGNIMKFTEGAFKDWGYQLAREEFGGELIDGGPWVKIKNPNNGKEIIVKDVIADAFLQQILLRPAEYDVIACMNLNGDYISDALAAQVGGIGIAPGANIGDDCALFEATHGTAPKYAGQDKVNPGSIILSAEMMLRHMGWFEAADLIIKGTEGAIQAKTVTYDFERLMEGAKLLKCSEFGDAIIKHM

SEQ ID NO: 37029 - DNA, 1077 bp, Thermosynechococcus elongatus BP-1
  CDS (1)..(1077): transl_table=11
atgtcccacgctgtcaccttaattcgcggcgacggtattggtcctgaggttgccgcggcagctcgcaccgccattgatgccacaggcgtcaaaattgactgggtggtggtggatgccggcgtggccatgatggagcgctacggtacccccttgcccgaagaggttatcgatgccatcaaaagtacgaaaactgccatcaaaggcccaattaccacccccgtggggacaggctttcgttctgtcaatgtcgagatccgcaagcggctcaatctctatgcgaacctacggcctgctaaatccattgttggggtgaaaagctattttcaaaacattgacctcgtcattgttcgcgagaataccgaagacctctacgccgggattgagtttgcatacaccagtcccgaagcagctaaagctcgcgcctttttgagtgatctatcgggcaagccgattcgggaggatgcagccattggtgttaagcccatttctgtcctagggagcgatcgcatcctggagtttgccttcaaatatgccaaggctaacggccgcaaaaaagtgacagccgttcacaaggccaacatcatgaaatttaccgatggcctcttccttgaacgtgcccgcgaaattgccagccgttaccccgatattgtctttgaagatcgcattgtcgataacatgtgcatgcagttgatgcagaagcccgaactctacgatgtgatggtgatgccaaacctctacggcgatattctgtcagacctttgtgcagggatgattggtggtctaggggtggctcccggcgccaatattggcgatgaatgtgcggtttttgaggcgattcacggttcagcccccaaatatgcaggtcaaaacaaagccaatcccacggccttgattctctcaggggttttgatgctgcaacacctgggtgaaatggaggcggcacagcgtctgcaagcggctgtcgaaaaagtaattgctgaggggcgctttgtcacctacgatttggcggcgccgggcaaagaacccgtaggtacccaagagatggctgcggcgattgccgagtacgccgccccctaa

SEQ ID NO: 37030 - protein, 358 aa, Thermosynechococcus elongatus BP-1
MSHAVTLIRGDGIGPEVAAAARTAIDATGVKIDWVVVDAGVAMMERYGTPLPEEVIDAIKSTKTAIKGPITTPVGTGFRSVNVEIRKRLNLYANLRPAKSIVGVKSYFQNIDLVIVRENTEDLYAGIEFAYTSPEAAKARAFLSDLSGKPIREDAAIGVKPISVLGSDRILEFAFKYAKANGRKKVTAVHKANIMKFTDGLFLERAREIASRYPDIVFEDRIVDNMCMQLMQKPELYDVMVMPNLYGDILSDLCAGMIGGLGVAPGANIGDECAVFEAIHGSAPKYAGQNKANPTALILSGVLMLQHLGEMEAAQRLQAAVEKVIAEGRFVTYDLAAPGKEPVGTQEMAAAIAEYAAP

SEQ ID NO: 37031 - DNA, 1269 bp, Oceanobacillus iheyensis HTE831
  CDS (1)..(1269): transl_table=11
atgacacaagctgaaaaaatcgtagtagaaaacggaaaaatgaacgtacctgatacgccaatcattccatttattgaaggagacggaactggtccagatatttgggcttctgctcaaaaagttatagaagcagcggttgataaagcgtatgatggtaagaaaagtattgagtggatggaagtatatgctggtcaaaaggcatatgacaaaactggcgaatggttgccaaaagatacacttgataaaattaatgaatataaaattgctatcaaaggtcccttaactacaccgatcggtggaggtattcgttcccttaatgtagcattacgtcaagagttagatttatttacatgtttacgaccagtgcgttactttgaaggagtaccttcgccagttaaacgtccagaagaagtagatatggttattttccgtgaaaatacagaggatatttatgctggaatagaatggcaaaaaggttctgacgaagtgaaaaaagtaattaacttcctaaaagaagaaatgggagtaaaaaatattcgcttcccagaaacgtcaggaattggtgtaaaaccagtatctgaagaaggtacaaaacgattagtgcgttcagctattgactatgcacttaatgaaggtcgtaaaaatgttactttagtacataaaggtaacatcatgaaatttacagaaggtgcttttaaaaactggggttatgaagtagctgagcaagaatacggtgataaagtatttacttgggcagagtacgatcgtattgtagaagcagaaggtaaggatgcagctaataaagcacaagacgaagcacttgcttctggtaaaattcttgtgaaagatgcaattgctgacattttcttacaacaagttcttactcgtccgaaagagtttgatgttgtagctacgatgaatttaaatggtgactacatttctgatgcacttgcagcacaagtaggtggaattggaattgcacctggagcgaacatcaattatgatactggacatgcgatttttgaagcgacacatggtactgcacctaagtatgcgggattagataaagtaaatccatcttctgttattctatccgctgtacttatgttagaacacttaggttggagagaagctgcagacttaattacgaaatcaatggacaagacgattggttcaaaagtagttacgtatgactttgcacgcctaatggatggagcaaaagaggttaaatgctctgaatttggacaagaactaattaaaaatatgtaa

SEQ ID NO: 37032 - protein, 422 aa, Oceanobacillus iheyensis HTE831
MTQAEKIVVENGKMNVPDTPIIPFIEGDGTGPDIWASAQKVIEAAVDKAYDGKKSIEWMEVYAGQKAYDKTGEWLPKDTLDKINEYKIAIKGPLTTPIGGGIRSLNVALRQELDLFTCLRPVRYFEGVPSPVKRPEEVDMVIFRENTEDIYAGIEWQKGSDEVKKVINFLKEEMGVKNIRFPETSGIGVKPVSEEGTKRLVRSAIDYALNEGRKNVTLVHKGNIMKFTEGAFKNWGYEVAEQEYGDKVFTWAEYDRIVEAEGKDAANKAQDEALASGKILVKDAIADIFLQQVLTRPKEFDVVATMNLNGDYISDALAAQVGGIGIAPGANINYDTGHAIFEATHGTAPKYAGLDKVNPSSVILSAVLMLEHLGWREAADLITKSMDKTIGSKVVTYDFARLMDGAKEVKCSEFGQELIKNM

SEQ ID NO: 37033 - DNA, 1251 bp, Shigella flexneri 2a str. 301
  CDS (1)..(1251): transl_table=11
atggaaagtaaagtagttgttccggcacaaggcaagaagatcaccctgcaaaacggcaaactcaacgttcctgaaaatccgattatcccttacattgaaggtgatggaatcggtgtagatgtaaccccagccatgctgaaagtggtcgacgctgcagtcgagaaagcctataaaggcgagcgtaaaatctcctggatggaaatttacaccggtgaaaaatccacacaggtttatggtcaggatgtctggctgcctgctgaaacccttgatctgattcgtgaatatcgcgttgccattaaaggcccgctgaccactccggttggtggcggtattcgttctctcaacgttgccctgcgtcaggaactggatctctacatctgcctgcgtccggtacgttactatcagggcactccaagcccggttaaacaccctgaactgaccgatatggttatcttccgtgaaaactcggaagacatttatgcgggtatcgaatggaaagctgactctgccgacgccgagaaagtgattaaattcctgcgtgaagagatgggcgtgaagaaaattcgcttcccggaacattgcggtatcggtattaagccgtgttctgaagaaggcaccaaacgtctggttcgtgcagcgatcgaatacgcaattgctaacgatcgtgactctgtgaccctggtgcacaaaggcaacatcatgaagttcaccgaaggcgcgtttaaagactggggctaccagctggcgcgtgaagaatttggcggtgaactgatcgacggcggcccgtggctgaaagttaaaaacccgaataccggcaaagagatcgtcattaaagacgtgattgctgatgcattcctgcaacagatcctgctgcgtccggctgaatatgatgttatcgcctgtatgaacctgaacggtgactacatttctgacgctctggcagcgcaggttggcggtatcggtatcgcccctggagcaaacatcggtgacgaatgcgccctgtttgaagccacccacggtactgcgccgaaatacgccggtcaggacaaagtaaaccctggctctattattctctccgctgagatgatgttacgccatatgggctggactgaagccgcagacctgattgttaaaggtatggaaggcgcgatcaacgccaagaccgtaacctatgacttcgagcgtctgatggaaggcgctaaactgctgaaatgttcagagtttggtgatgcgatcatcaagaatatgtaa

SEQ ID NO: 37034 - protein, 416 aa, Shigella flexneri 2a str. 301
MESKVVVPAQGKKITLQNGKLNVPENPIIPYIEGDGIGVDVTPAMLKVVDAAVEKAYKGERKISWMEIYTGEKSTQVYGQDVWLPAETLDLIREYRVAIKGPLTTPVGGGIRSLNVALRQELDLYICLRPVRYYQGTPSPVKHPELTDMVIFRENSEDIYAGIEWKADSADAEKVIKFLREEMGVKKIRFPEHCGIGIKPCSEEGTKRLVRAAIEYAIANDRDSVTLVHKGNIMKFTEGAFKDWGYQLAREEFGGELIDGGPWLKVKNPNTGKEIVIKDVIADAFLQQILLRPAEYDVIACMNLNGDYISDALAAQVGGIGIAPGANIGDECALFEATHGTAPKYAGQDKVNPGSIILSAEMMLRHMGWTEAADLIVKGMEGAINAKTVTYDFERLMEGAKLLKCSEFGDAIIKNM

SEQ ID NO: 37035 - DNA, 1008 bp, Shewanella oneidensis MR-1
  CDS (1)..(1008): transl_table=11
atgtcaaaaagaacgataaccgtaattccaggtgatggaattggcccaagtattattgattcagccttaaaaattcttgataaagcaggttgtgattttgaatatgaatttgccgatgctggtttagcagcactcgaaaaacaaggcgagttacttccgcagcgtactttagaactgattgaaaaaaaccgcatcactctgaaaggcccgctgactacaccagtgggtgaaggctttacctctatcaacgtgacattacgtaaaaaattcggcctgtacgcgaacgtgcgcccagtgttgtctttcaaaggcacccaagcccgttatgaaaacattgatatcatcacagtgcgtgaaaacaccgaaggtatgtattcaggccacggtcaaaaagtgtcagaagacggtagcacagctgaagccaccagtattgtcactcgccaaggtgccgaacaaatcgcgacctttgcctacgaactggcccgtaaagaaagccgcaagaaagtcactatcgtgcacaaggcaaacatcatgaagtcaacttcaggtctgttcctgaaagtagctcgtgaagtaagcctacgctatccagatatcaaaaccgaagaaatgatcgtcgatgcgacttgcatgaagttagtaatgaacccagaaaactttgatgtgatcgtgaccactaacctgtttggtgacattctgtcggatctgtgtgcgggtttagtcggtggtttaggtatggcaccaggcgccaacattggccgtgatgcagcgattttcgaagcggttcacggcagcgcgccagatatcgcaggtaaaaacctcgcgaacccaacctcagtgatcttggcctctatccaaatgctggaatacttaggtatggccgataaagcggctccgatccgtaaagcggtatctgctgtgattgaagaaggcgaccgtacgactcgcgatttaggcggcacccacggcacaactgacttcacacaagcggtgcttgaccgtctgtga

SEQ ID NO: 37036 - protein, 335 aa, Shewanella oneidensis MR-1
MSKRTITVIPGDGIGPSIIDSALKILDKAGCDFEYEFADAGLAALEKQGELLPQRTLELIEKNRITLKGPLTTPVGEGFTSINVTLRKKFGLYANVRPVLSFKGTQARYENIDIITVRENTEGMYSGHGQKVSEDGSTAEATSIVTRQGAEQIATFAYELARKESRKKVTIVHKANIMKSTSGLFLKVAREVSLRYPDIKTEEMIVDATCMKLVMNPENFDVIVTTNLFGDILSDLCAGLVGGLGMAPGANIGRDAAIFEAVHGSAPDIAGKNLANPTSVILASIQMLEYLGMADKAAPIRKAVSAVIEEGDRTTRDLGGTHGTTDFTQAVLDRL

SEQ ID NO: 37037 - DNA, 1257 bp, Pseudomonas putida KT2440
  CDS (1)..(1257): transl_table=11
atgggataccagaaaatcaaggttccgaccgacggcaccaaaattaccgtcaatgcagaccattcgcttaacgtgcctgaccatccgatcattccttacatcgaaggcgacgggatcggcgtcgatgtttcgccggtaatgatcaaggtggtcgatgccgccgtgcagaaggcctacggcggcaagcgcaagattgcctggatggaggtgtacgctggcgagaaagccacccaggtgtatgaccaggatacctggctaccgcaggaaaccctcgatgccgtgcgtgattatgtggtatcgatcaagggcccgctgaccacgcccgtcggtggcggcatccgctccctcaacgtggccctgcgccagcaactggacctgtatgtatgcctgcggccggtgctgtggttccagggtgtgccaagcccggtgaaaaagccgggcgacgtcgacatggtgatcttccgcgagaactccgaagacatctatgccggcatcgagtggaaggccgggtcgcccgaggcgaacaaggtgatcaagtttctcaaggaggaaatgggggtcaccaagatccgcttcgaccaggactgcggtatcggcgtcaagccggtgtcgaaggagggtaccaagcgtctggtgcgcaaggccctgcaatacgtggtggataacgaccgcgaatcactgaccctggtgcacaagggcaacatcatgaagttcaccgagggtgccttcaaggactgggggtacgaggtggcgcgtgacgagttcggcgctgaactgcttgatggcggcccttggatgaagttcaagaaccccaagaccggtcgcgaggtcatcgtcaaggacgccatcgccgacgccatgctgcagcagatcctgctacgcccggccgagtacgacgtgatcgccaccctcaacctcaacggtgactacctgtccgatgccctggccgcagaagtgggcggtatcggcattgccccgggcgccaacctgtccgacaccgtggccatgttcgaggccactcacggcactgcgcccaagtatgccgggcaggacaaggtcaacccgggctcggtgatcctctcggcagagatgatgctgcgccacatggggtggaccgaggccgccgacctgatcatcaagggcaccaatggcgccattgcggccaagaccgtgacctacgatttcgagcgattgatggagggcgccaagctggtaagcagctcaggctttggcgatgaaatgatcaaacacatgtaa

SEQ ID NO: 37038 - protein, 418 aa, Pseudomonas putida KT2440
MGYQKIKVPTDGTKITVNADHSLNVPDHPIIPYIEGDGIGVDVSPVMIKVVDAAVQKAYGGKRKIAWMEVYAGEKATQVYDQDTWLPQETLDAVRDYVVSIKGPLTTPVGGGIRSLNVALRQQLDLYVCLRPVLWFQGVPSPVKKPGDVDMVIFRENSEDIYAGIEWKAGSPEANKVIKFLKEEMGVTKIRFDQDCGIGVKPVSKEGTKRLVRKALQYVVDNDRESLTLVHKGNIMKFTEGAFKDWGYEVARDEFGAELLDGGPWMKFKNPKTGREVIVKDAIADAMLQQILLRPAEYDVIATLNLNGDYLSDALAAEVGGIGIAPGANLSDTVAMFEATHGTAPKYAGQDKVNPGSVILSAEMMLRHMGWTEAADLIIKGTNGAIAAKTVTYDFERLMEGAKLVSSSGFGDEMIKHM

SEQ ID NO: 37039 - DNA, 1251 bp, Salmonella enterica subsp. enterica serovar Typhi Ty2
  CDS (1)..(1251): transl_table=11
atggaaagcaaagtagttgttccggtggaaggtaagaagatcaccctgcaaaacggcaaactcaacgttcctgagaatccgattatcccgtttattgaaggcgatggtatcggtgttgatgtcactccagccatgcttaaagtggtcgatgccgccgtcgagaaagcctataaaggcgagcgtaaaatttcctggatggaaatttacaccggagaaaaatccacacaggtttacggccaggatgtctggcttcccgctgaaacccttgatttaattcgtgactaccgcgtagcgattaaaggtccattgaccacgccggttggcggcggtatccgctctctgaacgttgccctgcgtcaggagcttgacctgtacgtttgtctgcgtcccgttcgttactatcagggcacgccaagtccggtgaaacatccggagctgaccgatatggtcatcttccgtgaaaactctgaagacatctacgccggaattgaatggaaagctgactctgcagacgctgagaaagtgatcaagttcctgcgcgaagagatgggcgtgaagaaaattcgcttcccggagcactgcggtatcggtatcaaaccgtgttctgaagaaggcactaaacgtctggttcgcgcggcgattgaatacgctattaccaacgatcgcgattccgtcacgctggtacataaaggcaatatcatgaagttcaccgaaggcgcgtttaaagactggggctaccagttggcgcgcgacgagttcggcggtgagcttattgacggcggtccgtggctgaaaattaagaacccgaacacgggtaaagagatcgtggttaaagacgttatcgccgatgcgttcctgcaacaaatcctgttgcgtccggcggaatacgacgttatcgcctgtatgaacctgaacggtgactatatttccgatgccctggcggctcaggttggcggtatcggtattgcaccgggtgcgaatatcggcgacgaatgcgcgttgtttgaagcgactcacgggactgcgccgaaatatgcgggccaggataaagtcaacccaggctccattattctgtctgcggagatgatgctgcgccacatgcagtggttcgaagcggcggatctgattgttaaaggtatggaaggcgcgattgccgcgaagaccgtgacctatgactttgaacgcctgatggacggcgctaagctgctgaaatgtagtgagtttggcgacgcgattatcgcaaatatgtaa

SEQ ID NO: 37040 - protein, 416 aa, Salmonella enterica subsp. enterica serovar Typhi Ty2
MESKVVVPVEGKKITLQNGKLNVPENPIIPFIEGDGIGVDVTPAMLKVVDAAVEKAYKGERKISWMEIYTGEKSTQVYGQDVWLPAETLDLIRDYRVAIKGPLTTPVGGGIRSLNVALRQELDLYVCLRPVRYYQGTPSPVKHPELTDMVIFRENSEDIYAGIEWKADSADAEKVIKFLREEMGVKKIRFPEHCGIGIKPCSEEGTKRLVRAAIEYAITNDRDSVTLVHKGNIMKFTEGAFKDWGYQLARDEFGGELIDGGPWLKIKNPNTGKEIVVKDVIADAFLQQILLRPAEYDVIACMNLNGDYISDALAAQVGGIGIAPGANIGDECALFEATHGTAPKYAGQDKVNPGSIILSAEMMLRHMQWFEAADLIVKGMEGAIAAKTVTYDFERLMDGAKLLKCSEFGDAIIANM

SEQ ID NO: 37041 - DNA, 1191 bp, Bacteroides thetaiotaomicron VPI-5482
  CDS (1)..(1191): transl_table=11
atgaacaaaataaccatgcaaaaagatggtacgctatcggtgcccgatgtgcctgtcgtaccttatattaccggagacggagtaggagcggaagtgactccgtcgatgcagtccgttgtgaacgcggctgttcagaaagcatacggcggcaaacgtcggattgaatggaaagaagtgctggcgggcgaacgcgctttcaacgagacaggttcgtggttgccggatgaaacgatgaaggctttccaagaatatctgatcggcatcaaggggccgctgacgacccctgtcggcggtggaatccgttctttgaacgtggctttgcgccaaactctggatttgtatgtttgtctgcgtccggtccgttggtatcaaggcgttcattctccggtgaaagcaccggaaaaagtgaacatgtgcgtgttccgtgaaaatacggaggatatatatgcaggaatcgagtgggaggcaggtactcccgaagccgaaaagttctatcaattcctgaaaaacgagatgggagtgacgaaagtccgcttccccgagacctcttcttttggagtgaaacctgtttcccgtgagggcacggaacgtcttgtgcgggctgcctgccagtatgcgctcgaccatcatctgccttccgtgacactggtgcacaaaggaaacattatgaagttcaccgaaggaggcttcaagaaatggggctatgagctggcgcaacgtgagttcggcgacgccttggcagacggccggttggtgataaaggactgcatcgccgatgctttcctgcaaaatacattactgattcccgaagaatattccgtgattgccacgctgaacctgaacggagactacgtttccgaccagttggcggcaatggtaggcggcatcggcattgctccgggagcaaatattaactacaagacggggcacgccatttttgaagcgactcatggaaccgcccccaacattgccggaaaggatgtcgtgaatccttgttctatcattctttcggcggtgatgatgcttgaatatctgggatggaaagaagcggccgcgcttatcgaaaaggcgttggaacagagtttcctcgatgcccgtgccacgcacgatctggctcgctttatgccgggaggtacatccctgtctaccaccgctttcacacgcgaaattgtggaaagaatcgaaaagtaa

SEQ ID NO: 37042 - protein, 396 aa, Bacteroides thetaiotaomicron VPI-5482
MNKITMQKDGTLSVPDVPVVPYITGDGVGAEVTPSMQSVVNAAVQKAYGGKRRIEWKEVLAGERAFNETGSWLPDETMKAFQEYLIGIKGPLTTPVGGGIRSLNVALRQTLDLYVCLRPVRWYQGVHSPVKAPEKVNMCVFRENTEDIYAGIEWEAGTPEAEKFYQFLKNEMGVTKVRFPETSSFGVKPVSREGTERLVRAACQYALDHHLPSVTLVHKGNIMKFTEGGFKKWGYELAQREFGDALADGRLVIKDCIADAFLQNTLLIPEEYSVIATLNLNGDYVSDQLAAMVGGIGIAPGANINYKTGHAIFEATHGTAPNIAGKDVVNPCSIILSAVMMLEYLGWKEAAALIEKALEQSFLDARATHDLARFMPGGTSLSTTAFTREIVERIEK

SEQ ID NO: 37043 - DNA, 1284 bp, Coxiella burnetii RSA 493
  CDS (1)..(1284): transl_table=11
atgacggagttaaccggagtatccatcgtgacttaccaacacatcaaagttcccagccaaggtgaaaaaatcaccgttaataaagccgttttagaagttcctgaccgacccattattccctttatcgaaggagatgggattggcattgatatcgcgcccgtcatgaaaaacgtggtcgatgccgccgtggaaaaatcctacgctggaaagcgaaaaattgaatggatggagatctacgccggagaaaaggctacgaaagtgtatggcaaagacaattggctgcctgatgagacactcgaagccattaaagaataccaagtggccattaaaggtcccttaaccacgccggtggggggtggcatacgttcgctcaatgtcgcgctgcgccaacagttagacctgtatgtttgccttaggcccgtccgttattttacgggtgtgccaagcccggtcaaaacgcctgaaaaggtgaatatggtgattttccgcgaaaattctgaagatatttacgccggaattgaatggccggcgggaagcccggaagcggtgaaattaatcaacttccttcaaaacgaaatgggcgtaaagaaaatccgtttcccggaaacggcggggatagggattaaaccggtttctaaagaaggcacgagccgtttagtacgccgagcgattcaatatgccattgataatgaccgcgattccgtgacgctcgtccataaaggtaacatcatgaaattcacggagggggcttttaaagattggggctatgaagtcgctgtcaaagaatttggagcaaagcccttagatggcggaccctggcatgtctttgagaatccgaaaacaggccaaaagattacgattaaagacgttattgccgacgcctttttacaacaaattttattgcgtcccgccgagtacagcgtcatcgccaccttgaacctcaatggagattatatctccgacgcgttagcggccgaagtcggcggcattggcattgctccgggcgctaatttaagcgacaccgtcggtctttttgaagccactcatgggacagcgcctaaatatgcggggcaagataaagtcaatccaggctctctaattttatcagcagaaatgatgctccgttacctaggctggaaagaagccgccgaccttgtcgttcaaggtattgagggggcgattgaaagtaaaacagtaacttacgattttgcccgtttgatgaccggcgccaaagaagtaagtacctctcagttcggcaaagccataattaagcatattctgtag

SEQ ID NO: 37044 - protein, 427 aa, Coxiella burnetii RSA 493
MTELTGVSIVTYQHIKVPSQGEKITVNKAVLEVPDRPIIPFIEGDGIGIDIAPVMKNVVDAAVEKSYAGKRKIEWMEIYAGEKATKVYGKDNWLPDETLEAIKEYQVAIKGPLTTPVGGGIRSLNVALRQQLDLYVCLRPVRYFTGVPSPVKTPEKVNMVIFRENSEDIYAGIEWPAGSPEAVKLINFLQNEMGVKKIRFPETAGIGIKPVSKEGTSRLVRRAIQYAIDNDRDSVTLVHKGNIMKFTEGAFKDWGYEVAVKEFGAKPLDGGPWHVFENPKTGQKITIKDVIADAFLQQILLRPAEYSVIATLNLNGDYISDALAAEVGGIGIAPGANLSDTVGLFEATHGTAPKYAGQDKVNPGSLILSAEMMLRYLGWKEAADLVVQGIEGAIESKTVTYDFARLMTGAKEVSTSQFGKAIIKHIL

SEQ ID NO: 37045 - DNA, 1248 bp, Nitrosomonas europaea ATCC 19718
  CDS (1)..(1248): transl_table=11
atgtatcagcatatcaaagtaccaaccactggcagcaaaattcgggtaaaggatgattcttccctggttgtgcccgacaacccgatcattccttttatcgaaggcgatggtatcggtgtggatatcacacctgtcatgatcagcgttgtcgatggtgcagtaaaaaaagcatacggcgactcccggaaaatttcctggatggaaatatatgccggtgagaaatctacccgggtctatggtcaggatatctggctgccagatgagactttgcaggcagccaaagaattcgtggtatccatcaaagggccgctgaccacaccggtaagtggaggtatccgctcgatcaacgtggcattgcgccagttactggatctgtatgtgtgcctgcgcccggtacgctatttccaaggggtacccagtccggtcaaacaaccggagaaagtggacatggtcatatttcgtgaaaactcggaagatatctatgcgggaatcgaatgggaagccggaacggaagctgttgaaaaagtgatcaatttcctgacggcagaaatgggaattaccaaaatccgattccctcgttcctctgcgatcgggatcaaaccggtttcaaaagaaggcagtgagcgtctgatcagaaaagccatccagtatgcaatcgaccataaacgtcgctctgtcacactggtgcacaaaggtaatatcatgaagttcactgaaggtgccttcaagaaatggggttatgaactggcagcgaaggaattcggtgcggagctactggatggcgggccatggatgatactgcggcacaacggtaatgaaatcatcatcaaagatgtcatcgccgacgcctttctccagcaaatcctgctgcgcccggatgaatatgatgtcatcgccacccttaatttgaacggtgactacatttccgatgctctggccgcacaggtaggcggcattggaatcgcgcccggtgcaaatatgagtgacagcatcgcaatattcgaagcgacacacggcactgcacccaaatatgctggtaaggatcaggtcaacccggggtcaattattctgtcagcagaaatgatgctcagacatatcggctggcatgaagcagccaatattgtcatcagctcaatggaaaaaacgattcaggatcgaatcatgacctacgatctggcaagacttacgccgaacgccaaacaggccacttcttcagaatttgggaatgccatggtagcgaggatgtaa

SEQ ID NO: 37046 - protein, 415 aa, Nitrosomonas europaea ATCC 19718
MYQHIKVPTTGSKIRVKDDSSLVVPDNPIIPFIEGDGIGVDITPVMISVVDGAVKKAYGDSRKISWMEIYAGEKSTRVYGQDIWLPDETLQAAKEFVVSIKGPLTTPVSGGIRSINVALRQLLDLYVCLRPVRYFQGVPSPVKQPEKVDMVIFRENSEDIYAGIEWEAGTEAVEKVINFLTAEMGITKIRFPRSSAIGIKPVSKEGSERLIRKAIQYAIDHKRRSVTLVHKGNIMKFTEGAFKKWGYELAAKEFGAELLDGGPWMILRHNGNEIIIKDVIADAFLQQILLRPDEYDVIATLNLNGDYISDALAAQVGGIGIAPGANMSDSIAIFEATHGTAPKYAGKDQVNPGSIILSAEMMLRHIGWHEAANIVISSMEKTIQDRIMTYDLARLTPNAKQATSSEFGNAMVARM

SEQ ID NO: 37047 - DNA, 1293 bp, Bacillus anthracis str. Ames
  CDS (1)..(1293): transl_table=11
ttgacgacaggtgaaaaaattactgtaactaatggtgttatgaatgtaccaaacaatccgattattccatttatcgaaggagatggaattggtcctgatatttgggcagctgcatctcgtgtactagaagcagcagttgaaaaagcttatgatggtgagaagaaaatcgtttggaaagaagtgcttgcaggggaaaaagcattcaaccaaacaggcgagtggttaccagaagaaactttaaatttaattcgtgaatatttaatcgcgattaaaggtccacttacaactccagttggcggtggtattcgttctctaaacgtagcacttcgtcaagaattagatttatatgtatgtctacgtccagttcgttattttgaaggtgttccttcacctgtaaaacgtccggaagatactgatatggttattttccgtgaaaatacagaagacatttatgctggaattgaatatgcgcaaggatctccagaagcagaaaaagttcttgctttcttaaaagaagcaatgggtgttaataaaatccgcttcccagaaacatctggtattggtattaaaccaatctcagaagaagggacaaagcgtcttgttcgtgctgcaattcaatatgcaattaacgaaaaacgctcttctgttacattagttcataaaggaaacattatgaaattcacagaaggtgctttcaaaaactggggttacgaagtagcggaacaagaattcggcgacaaagtatttacttgggctgaatatgatcgtatcgttgagaaagatggtaaagatgcagcgaataaagcgatggcagacgctgaagtggctggaaaaatcatcgtaaaagattctattgcagacatcttcttacaacaaattttaactcgtccacgtgagttcgatgttgttgcaacaatgaacttaaacggagactacatctctgatgcacttgctgcacaagtaggtggaattggtattgcacctggtgcaaacattaactatgtgactggacatgctatctttgaagctacgcacggtacagctccaaaatatgcaggtttagataaagtaaacccatcttcagttcttctttctggtgtattattattagagcacttaggatggaacgaagctgcgaaattagtaactgcttcagttgagaaaacaattgcttcaaaagtagtaacttatgatttcgcacgcttaatggaaggtgcaacagaagtgaaatgttctgagttcgctaatgaacttattaaaaacatggatgtagcgataatcaaaaacgcataa

SEQ ID NO: 37048 - protein, 430 aa, Bacillus anthracis str. Ames
MTTGEKITVTNGVMNVPNNPIIPFIEGDGIGPDIWAAASRVLEAAVEKAYDGEKKIVWKEVLAGEKAFNQTGEWLPEETLNLIREYLIAIKGPLTTPVGGGIRSLNVALRQELDLYVCLRPVRYFEGVPSPVKRPEDTDMVIFRENTEDIYAGIEYAQGSPEAEKVLAFLKEAMGVNKIRFPETSGIGIKPISEEGTKRLVRAAIQYAINEKRSSVTLVHKGNIMKFTEGAFKNWGYEVAEQEFGDKVFTWAEYDRIVEKDGKDAANKAMADAEVAGKIIVKDSIADIFLQQILTRPREFDVVATMNLNGDYISDALAAQVGGIGIAPGANINYVTGHAIFEATHGTAPKYAGLDKVNPSSVLLSGVLLLEHLGWNEAAKLVTASVEKTIASKVVTYDFARLMEGATEVKCSEFANELIKNMDVAIIKNA

SEQ ID NO: 37049 - DNA, 1092 bp, Arabidopsis thaliana
  CDS (1)..(1092)
atgtctcgccaatcgttttctctactgaagaatcttcgtagcatcgcttccggttccaaaatccagacccgatccgtgacttacatgcccagacccggtgacggaaaaccaagaccagtgacgttaatccccggagacggagttggtccgttggtaacaaacgcggttcaacaagtgatggaagcgatgcacgctccggtttacttcgaaccgttcgaagttcatggagatatgaagagtttacctgaaggattgttggaatcgattaagaagaacaaagtttgtttgaaaggtggtcttaagactcccgtcggtggtggtgtgagctctctcaatgttaatctgagaaaggagcttgatctctttgcttctttggtcaactgtttcaatttgcctggtttagcttctcgtcatgagaatgttgatattgttgtgattagagagaacactgaaggtgaatatgcaggtcttgaacatgaagttgttcctggtgttgttgagagccttaagttctgttcagagcgtattgcaaagtatgcgtttgagtatgcctacttgaacaacaggaagaaagttacagcagtgcacaaggctaatatcatgaaattggctgatggtttgttcttggagtcttgtcaagaggttgctaagaagtatccaagcattgcttacaatgaaatcattgttgataattgttgtatgcaacttgtggctagaccagagcaattcgatgtcatggtgacgcctaatctctatggtaatctagtggcaaacactgctgctggtattgctggaggtactggagtcatgcctggaggaaatgttggggcggagtatgcggtctttgagcaaggtgcatcagcgggaaacgtggggaaggatacaacggaagagcaaaagaatgcaaaccctgtggctttgttgctgtcatcagccatgatgcttagacaccttcagttcccttcttttgctgacaggcttgaaaccgctgtgaagcgtgttatcgctgaagggaattgtcggactgaagatcttggtggaaacagtaccactcaagaggtcgttgacgctgtcattgcaaatttggattga

SEQ ID NO: 37050 - protein, 363 aa, Arabidopsis thaliana
MSRQSFSLLKNLRSIASGSKIQTRSVTYMPRPGDGKPRPVTLIPGDGVGPLVTNAVQQVMEAMHAPVYFEPFEVHGDMKSLPEGLLESIKKNKVCLKGGLKTPVGGGVSSLNVNLRKELDLFASLVNCFNLPGLASRHENVDIVVIRENTEGEYAGLEHEVVPGVVESLKFCSERIAKYAFEYAYLNNRKKVTAVHKANIMKLADGLFLESCQEVAKKYPSIAYNEIIVDNCCMQLVARPEQFDVMVTPNLYGNLVANTAAGIAGGTGVMPGGNVGAEYAVFEQGASAGNVGKDTTEEQKNANPVALLLSSAMMLRHLQFPSFADRLETAVKRVIAEGNCRTEDLGGNSTTQEVVDAVIANLD

SEQ ID NO: 37051 - DNA, 1425 bp, Prochlorococcus marinus subsp. marinus str. CCMP1375
  CDS (1)..(1425): transl_table=11
atggttcattatgagaagctctctccaccaaccacaggagaaaaaattaaattcaataatggattgcctatagtgcccgcaaatcccatcattccttatataagaggagatggaacaggggtagacatctggcccgcaacacaaaaggtaattgatcaagccatagaaaaagcctatgggattgatagaaaaatagaatggttcaaaatatatgcaggcgatgaagcttgtgatttatatggcacttaccaatatctacctaaggacaccatagaggcaattcgagagtatggagtggcaattaaagggcccttaacaacaccaattgggggaggcattagatctttaaatgttgctcttaggcaaaaatttgatctatatagttgtgtacgaccatgccgttattatcaaggtacaccaagtcctcataaacatcctgaaaacctagatgtaattgtttatcgcgagaatactgaagatatatatattggtattgaatgggagtcaaatgatccaattggcataaagcttatagagcatctaaacaatgatgtaattcctgctagtccgtctcttaaaaatcgaattattcctcaaggatcaggtattggaatcaagcccgttagtaaagatggtagccaacgacatattcgaagagctatacaacatgctttgaaactgaatggcaataaacgtcatgtaacgctagtacataaaggaaatattatgaaatttactgaaggctcatttcgagattggggatatgaattagcaactaatgaatttcgtaatgaatgtataactgaaagggaaagctggatactttccaatctagagcaaaatcctagattaagtattgaaaataatgcaaagttgattgaccctggttatgaatcattaacaaaagaaaaaaaagatattatttgcaatgaggttcaacttgtaattaataatattcataaaacacatggaaataacaaatggaaaaaaatggttttagttgacgataggattgcagacagtatattccaacaaatacaaaccagacctcaagaatattccatattagcaacattaaatttgaatggggactacatatcagatgccgctgctgcaattgttggaggattaggaatggctcccggtgcaaatattggtgatcgagctgcgatttttgaagccacacatggcactgctccaaagcatgctggactcgatagaattaatccaggttcagtgattttaagcggcgtaatgatgctggaatatataggttggcaagaagctgctgacttaattacaaaaggtttgagtcaatcaatttacgataaacaagtcacttatgaccttgccaggttaatggaacctcctcaatctccattaagttgtagtgaatttgcaaatgcggtaattgaacgattctaa

SEQ ID NO: 37052 - protein, 474 aa, Prochlorococcus marinus subsp. marinus str. CCMP1375
MVHYEKLSPPTTGEKIKFNNGLPIVPANPIIPYIRGDGTGVDIWPATQKVIDQAIEKAYGIDRKIEWFKIYAGDEACDLYGTYQYLPKDTIEAIREYGVAIKGPLTTPIGGGIRSLNVALRQKFDLYSCVRPCRYYQGTPSPHKHPENLDVIVYRENTEDIYIGIEWESNDPIGIKLIEHLNNDVIPASPSLKNRIIPQGSGIGIKPVSKDGSQRHIRRAIQHALKLNGNKRHVTLVHKGNIMKFTEGSFRDWGYELATNEFRNECITERESWILSNLEQNPRLSIENNAKLIDPGYESLTKEKKDIICNEVQLVINNIHKTHGNNKWKKMVLVDDRIADSIFQQIQTRPQEYSILATLNLNGDYISDAAAAIVGGLGMAPGANIGDRAAIFEATHGTAPKHAGLDRINPGSVILSGVMMLEYIGWQEAADLITKGLSQSIYDKQVTYDLARLMEPPQSPLSCSEFANAVIERF

SEQ ID NO: 37053 - DNA, 1257 bp, Bordetella bronchiseptica RB50
  CDS (1)..(1257): transl_table=11
atgtcctatcaacatatcaaggttcccactgggggccaaaaaatcacggtcaacgccgattactcgctgaatgtgcccgatcaggtcatcattccggtcatcgagggtgacggtacgggcgccgacatcacgccggtgatgatcaaggtcgtcgacgcggctgtgcagaaggcctatgcgggcaagcgcaagatccactggatggaagtctacgccggcgagaaggccaccaaggtctacggcccggacgtctggctgcccgaggaaaccctcgacgccgtcaaggactacgtggtgtcgatcaagggtccgctgaccacgccggtcggcggcggcatccgttcgctgaacgtggcgctgcgccagcagctggacctgtatgtctgcctgcgcccggtgcgctacttcaagggcgtgccctcgccggtgcgcgagcccgagaagaccgacatggtcatcttccgcgagaactcggaagacatctacgcgggcatcgagtacatggccgagtccgagcaggccaaggacctgatccagtacctgcagaccaagctgggcgtgaccaagatccgcttcccgaacacctcgtcgatcggcatcaagccggtttcgcgcgaaggcaccgagcgcctggtgcgcaaggcgctgcagtacgccatcgacaatgaccgcgcctcggtgaccctggtccacaagggcaacatcatgaagttcacggaaggcggcttccgcgactggggctacgccctggcccagaacgagttcggcgcgcagccgatcgacggcggcccgtggtgcaagttcaagaatcccaagacgggtcgcgagatcatcgtcaaggattcgatcgccgacgccttcctgcagcagatcctgctgcgtccggccgaatacgacgtgatcgccacgctgaacctgaacggcgactacatctccgacgcgctggccgcgcaagtgggcggcatcggcattgccccgggcgccaacctgtcggattccgtggccatgttcgaagccacccacggcaccgcgccgaagtacgcgggcaaggactacgtgaaccccggttccgaaatcctgtcggccgaaatgatgctgcgccacatgggctggaccgaggccgccgacctgatcatcgccagcatggagaaatccatcctgtccaagaaggtcacctatgacttcgcccgtctgctcgaaggcgccacccaggtgtcgtgctcgggcttcggtcaggtcatgatcgacaatatgtaa

SEQ ID NO: 37054 - protein, 418 aa, Bordetella bronchiseptica RB50
MSYQHIKVPTGGQKITVNADYSLNVPDQVIIPVIEGDGTGADITPVMIKVVDAAVQKAYAGKRKIHWMEVYAGEKATKVYGPDVWLPEETLDAVKDYVVSIKGPLTTPVGGGIRSLNVALRQQLDLYVCLRPVRYFKGVPSPVREPEKTDMVIFRENSEDIYAGIEYMAESEQAKDLIQYLQTKLGVTKIRFPNTSSIGIKPVSREGTERLVRKALQYAIDNDRASVTLVHKGNIMKFTEGGFRDWGYALAQNEFGAQPIDGGPWCKFKNPKTGREIIVKDSIADAFLQQILLRPAEYDVIATLNLNGDYISDALAAQVGGIGIAPGANLSDSVAMFEATHGTAPKYAGKDYVNPGSEILSAEMMLRHMGWTEAADLIIASMEKSILSKKVTYDFARLLEGATQVSCSGFGQVMIDNM

SEQ ID NO: 37055 - DNA, 1425 bp, Prochlorococcus marinus str. MIT 9313
  CDS (1)..(1425): transl_table=11
atggctcagttcgagaaactctccccaccaagccagggcacggccatccgcttcgtgaacggtcagccagtcatacccaacgagccaatcattcccttcatccgcggtgatggcacaggtgtggacatctggccggcgacccaacgagtgctggatgcagctgtaacaaaggcctatcaaggcgtgcgtcgtatcgaatggttcaaggtctatgcaggcgacgaggcctgcgatctctacggcacctaccagtacctaccagaggacacccttgaagcgatccgaacctatggggtcgccatcaaaggtcccctcacgactccaattggtgggggcatccgttccctcaatgtggccctacgtcaaatcttcgatttgtattcctgcgtccgcccatgtcgctactacaagggcacacccagtccccacaaacggcctcaggatcttgatgtcatcgtctaccgagaaaacacggaagatatctacatgggggtggaatgggaagccgatgatccagtcggcaagacattgcgcgaacatctcaacactgtcgtcattcccgccaacggcaagctcggcaaacgccagattcctgaaggctcaggcatcggcatcaagccggtaagcaagcacggcagccagcgtcatatccgcaaagcgattcaacatgctcttcggctaaagggcgacaagcgccacgtcaccttggtgcacaaaggcaacatcatgaagttcactgaaggagccttccgtgactggggctatgaactcgccacaagtgagttccgcgacgtgtgcatcaccgaaagggagagctggattctcggcaatcttgaaaacgatccacaactaagcatccaagccaatgcccgcatgatcgagcctggctacgacagcctcacgcctgagagaaaggccagcatcgatgccgaagtgcacggcgtgctggatgccatcggcaccagtcatggcaacggccaatggaaagcgatggtgcttgtcgatgaccgcatcgccgacagcatcttccaacagatccaaacacggccgcaggaatactcaatcctggcaacactcaacctcaatggcgactacatctccgacgcagccgcggcgatggtgggcggattaggcatggccccgggagccaacatcggcgagaacgctgccatcttcgaggcgacccacggaacagcacccaagcatgccggccttgatcgcatcaaccctggatcggtgatcctcagcggcgtgatgatgctggagtttctgggctggcaagaagccgcagacttgatcacaaaagggctcagtgctgcgattgccaatcaacaggtcacctatgacctggctcgcctcatggacccacccgtagaccctgtgagctgcagtggcttctctgaggccgtcatcagccacttctaa

SEQ ID NO: 37056 - protein, 474 aa, Prochlorococcus marinus str. MIT 9313
MAQFEKLSPPSQGTAIRFVNGQPVIPNEPIIPFIRGDGTGVDIWPATQRVLDAAVTKAYQGVRRIEWFKVYAGDEACDLYGTYQYLPEDTLEAIRTYGVAIKGPLTTPIGGGIRSLNVALRQIFDLYSCVRPCRYYKGTPSPHKRPQDLDVIVYRENTEDIYMGVEWEADDPVGKTLREHLNTVVIPANGKLGKRQIPEGSGIGIKPVSKHGSQRHIRKAIQHALRLKGDKRHVTLVHKGNIMKFTEGAFRDWGYELATSEFRDVCITERESWILGNLENDPQLSIQANARMIEPGYDSLTPERKASIDAEVHGVLDAIGTSHGNGQWKAMVLVDDRIADSIFQQIQTRPQEYSILATLNLNGDYISDAAAAMVGGLGMAPGANIGENAAIFEATHGTAPKHAGLDRINPGSVILSGVMMLEFLGWQEAADLITKGLSAAIANQQVTYDLARLMDPPVDPVSCSGFSEAVISHF

SEQ ID NO: 37057 - DNA, 1425 bp, Synechococcus sp. WH 8102
  CDS (1)..(1425): transl_table=11
atggcccagtttgagaagctcaccgcccccagccagggcacaccgattcgcttcgagaacggccaacctgtcgtggccgacaatccgatcattcccttcatccgcggtgatgggaccggcgtagacatctggcctgccacccagaaggtattggatgccgccgtggcaaaggcctatggcggagttaaaaccatcgagtggttcaaggtgtatgccggcgatgaggcctgcgacctctacggcacctatcagtacctgcccgaagacaccctcgaagcgatccgcacctacggcgtggccatcaagggccccctcaccacccccgtgggtggcggcatccgttcgctgaacgtggccctgcgccagatcttcgatctttactcctgcgtgcgcccttgccgttattacgagggcacccccagtcctcacaagcgtccccaggatctggacgtgatcgtctaccgggagaacaccgaagacatctacatgggagttgagtgggaggccgatgacgcggttggtcaggagctgcgcaagcacctcaacgaggtggtgattcctgccaacggcaagctgggcaaacgacagatcccggaaggctccggcatcggcatcaaaccggtgagcaaacacggcagccagcgccacatccgcaaagcgatccagcacgccctacgcctggagggcaacaagcgccacgtgaccctggtgcacaagggcaacatcatgaaattcaccgaaggtgcgtttcgcgactggggctacgaactggccaccacggagttccgcgacgtgtgcatcaccgagcgggagagctggatcctcggcaacctcgagaaggattcaggactgagtgtgcaggccaacgcccggatgattgaaccgggctacgacagcctcacccccgagaagaaagcggacatcgatgctgaagtgcaggccgtgatcgatgccatcggcagcagccatgggggcggcaagtggaggtcgatggtgctggtggatgaccgcatcgccgacagcatcttccagcagatccagacccgccctcaggagtattcgatcctggccaccctcaacctcaatggcgactacatctccgatgcagccgcggccatggtgggcggtctgggcatggcccccggcgccaatatcggcgaaaccgccgccatcttcgaagccacccacggcaccgccccgaaacatgccggtctcgaccgcatcaaccccggttcagtgatcctcagcggcgtgatgatgctggaattcctgggttggcaggaggctgcagacctggtgaccaaaggcctgagtgccgccattaccgacaaacaaatcacctacgacctggccaggctgatggaaccgcaggtggaccctgtgagctgcagcggcttcgctgaagcgattatccagcgattctga

SEQ ID NO: 37058 - protein, 474 aa, Synechococcus sp. WH 8102
MAQFEKLTAPSQGTPIRFENGQPVVADNPIIPFIRGDGTGVDIWPATQKVLDAAVAKAYGGVKTIEWFKVYAGDEACDLYGTYQYLPEDTLEAIRTYGVAIKGPLTTPVGGGIRSLNVALRQIFDLYSCVRPCRYYEGTPSPHKRPQDLDVIVYRENTEDIYMGVEWEADDAVGQELRKHLNEVVIPANGKLGKRQIPEGSGIGIKPVSKHGSQRHIRKAIQHALRLEGNKRHVTLVHKGNIMKFTEGAFRDWGYELATTEFRDVCITERESWILGNLEKDSGLSVQANARMIEPGYDSLTPEKKADIDAEVQAVIDAIGSSHGGGKWRSMVLVDDRIADSIFQQIQTRPQEYSILATLNLNGDYISDAAAAMVGGLGMAPGANIGETAAIFEATHGTAPKHAGLDRINPGSVILSGVMMLEFLGWQEAADLVTKGLSAAITDKQITYDLARLMEPQVDPVSCSGFAEAIIQRF

SEQ ID NO: 37059 - DNA, 1293 bp, Wolinella succinogenes DSM 1740
  CDS (1)..(1293): transl_table=11
atggctaattttgaaggctacaatccccgatttctccccttgcccaccgaaggcgaggcaatcaccctcacccctgagggaatcctccaggtccctgatcaccccattatcccctacattgagggcgatggcattggcatggatatcacgccagcgatgaaaagtgttgtggacgctgcggtgaacaaggcctatggaggcaaaagaaaaatcgcatggtatgaggtctacacgggcgagaagtgctatgaaaagtttaaaaatgaaaagagcctctctccgatggatcagtggctcctccctgatacgattgatgcaatcaactacttcaaggtctccatcaaaggccctctaaccacgcccgtgggcgaaggatttcgcagcctgaatgttgccttgcgccagatgatggatctctatgtctgcctccgccctgtgcgctggtatggcagccccagccctgtcaaagagcctcacaaggtcgatatggtgatctatcgcgaaaatagtgaggatatctacgcgggaatcgagtttgccgccgagagcaaagaggccaacaaagtgatccaattcctccaaaacgaaatggaggtgaaaaagattcgattccccaaaacaagcgccatcggaatcaagcccgtgagcaaagaggggagtgagcgtctcatcagaaaagccatccaatacgctatcgacaacgaccgcgcctccctcacctttgttcacaaaggcaacatcatgaaattcaccgagggcggattcatgaagtggggttatgagctgctcaaacgagaatttggcgcgaccgagatcgatggaggtccttggtgctccatgaaaaacccaaaaacaggcaaagagatcatcatcaaagacgtcattgctgatgccttcttgcagcagattctcttgcgccctgctgaatatgatgtcattgccaccatgaatctcaatggcgactatatctctgacgcgctcgctgcgatggttggaggaatcgggatcgctcctggtgccaacctcaatgatagcgtggcgatgtttgaggcgactcatggaaccgcgcccaaatacgctggacttgacaaggtcaaccccggctctcttatcctaagtgcagagatgatgctgcgccacatgggctggatcgaggcggccgacctcgtcgtctcctccatgaaaaaggcgatcgaatccaaaaatgtcacttacgactttgcccgcttgatggagggcgccaaagaggtgaaatgctccgaatttgcccaagtcatgattgagcgaatgtaa

SEQ ID NO: 37060 - protein, 430 aa, Wolinella succinogenes DSM 1740
MANFEGYNPRFLPLPTEGEAITLTPEGILQVPDHPIIPYIEGDGIGMDITPAMKSVVDAAVNKAYGGKRKIAWYEVYTGEKCYEKFKNEKSLSPMDQWLLPDTIDAINYFKVSIKGPLTTPVGEGFRSLNVALRQMMDLYVCLRPVRWYGSPSPVKEPHKVDMVIYRENSEDIYAGIEFAAESKEANKVIQFLQNEMEVKKIRFPKTSAIGIKPVSKEGSERLIRKAIQYAIDNDRASLTFVHKGNIMKFTEGGFMKWGYELLKREFGATEIDGGPWCSMKNPKTGKEIIIKDVIADAFLQQILLRPAEYDVIATMNLNGDYISDALAAMVGGIGIAPGANLNDSVAMFEATHGTAPKYAGLDKVNPGSLILSAEMMLRHMGWIEAADLVVSSMKKAIESKNVTYDFARLMEGAKEVKCSEFAQVMIERM

SEQ ID NO: 37061 - DNA, 1080 bp, Gloeobacter violaceus PCC 7421
  CDS (1)..(1080): transl_table=11
gtgtccccatatcgtgtcacactgatccgcggcgatgggatcggcccggaagtgacgcaggcagcccggatcgtgctcgacgccaccgggatcgactttgagtgggtcgtggtcgatgccggcgccgaggtgatggagaagtccggcacaccccttccggccccagtgatcgaagcggtgcgcgcgagcgacgccgccatcaaaggcccgatcaccacccccgcaggttcgggcatccgttcggtcaacgtcgccttgcgtcgggccctcgacttgtacgccaacctgcgcccggcccgcaccctgcccggggtgcactcgcgctacgacaatatcgatctggtggtcgtgcgcgaaaataccgaggacctctacagcggcatcgagtttgaaaaaaattctccccaggctcttgaagtaatcgagatgctcatgcgcctgggcggcaaaaaaatctttccaagatccggccttgcggtcaaaccaatctccagcgaggcgagcgagcggatcgcccgcttcgccttcgagtacgcccgccgccacgcccgccgcaaagttaccgccgtccacaaggcgaatatcttgaagcacaccgacggtctgtttctggaggctgcccgccaggtggcttcggagtatccggatgtcgagtttgaagatcggatcgtggacaacctttgcatgcaactcgtccagaggccggaatcctacgacgtcctggtgctgcccaacctctatggcgatatcgtctcggatctgaccgccgggctggtgggcggtctcggggtggcgccgggggccaatatcggcgatcgcagcgccgtcttcgaagcgatccacggctcggcgccgcgctacgccggtcagaacaaggtcaatccctcggcactcatcctgagcggcgcgctgttgcttcggcacctgggcgagcaggaggccgccgtgcgcgtcgagcaggccgtggccgccgtgatcgccgaaggccgcagcgttacctacgacctggccccggcgggagcgacccccgccggtacccgccagatggccgaggcgattgcccagaaggtagcgggctga

SEQ ID NO: 37062 - protein, 359 aa, Gloeobacter violaceus PCC 7421
MSPYRVTLIRGDGIGPEVTQAARIVLDATGIDFEWVVVDAGAEVMEKSGTPLPAPVIEAVRASDAAIKGPITTPAGSGIRSVNVALRRALDLYANLRPARTLPGVHSRYDNIDLVVVRENTEDLYSGIEFEKNSPQALEVIEMLMRLGGKKIFPRSGLAVKPISSEASERIARFAFEYARRHARRKVTAVHKANILKHTDGLFLEAARQVASEYPDVEFEDRIVDNLCMQLVQRPESYDVLVLPNLYGDIVSDLTAGLVGGLGVAPGANIGDRSAVFEAIHGSAPRYAGQNKVNPSALILSGALLLRHLGEQEAAVRVEQAVAAVIAEGRSVTYDLAPAGATPAGTRQMAEAIAQKVAG

SEQ ID NO: 37063 - DNA, 1254 bp, Photorhabdus luminescens subsp. laumondii TTO1
  CDS (1)..(1254): transl_table=11
atggaaagcaaagtagttattccggcggaaggtaaaaaaataacagtcgacgctaaaggtaaactggttgttccgaataacccggtcatcccttatatcgaaggggatgggattggtgtcgatgttacccctgcaatgttgaaagttgtcgatgcagcggttcagaaagcctatcagggtgagcgtaaaatttcctggatggaaatctacaccggtgaaaaatcgactcatgtatacggtaaagatgtttggttgccggatgaaacgttggatctgatccgtgaatatcgcgtcgccattaaaggccctctgacgacgccagttggtggcggcattcgttctctgaacgtagcattgcgccagcaattagatctgtatgtttgcctgcgtcctgttcgttattatcagggaacgccaagcccggtcaaacaacctgaattgaccgatatggttattttccgtgaaaacgcggaagatatttacgccggtattgaatggaaagcggggtctgttgaagcggataaagtgatcaaattcctgcaagaagagatgggcgtgaataaaatccgtttcccacagcaatgtggtatcggtgtgaaaccctgttctgaagagggcactaaacgcttagttcgtgctgccatcgaatacgcaattgataatgaccgtgaatctgtcactctggttcacaaaggcaacattatgaagttcaccgaaggtgctttcaaagattggggttatcagcttgctcgtgaagagttcggcggtgaactgttggatggtggtccttgggtaaaaattaagaatccgaaaaacggtaaagagatcattgtcaaagatgtcatcgcagatgcgtttttacaacagattctgctgcgtcctgctgaatatgatgttattgcctgtatgaacctgaatggtgactatatttctgatgcactagctgctcaggttggtggtatcggtatcgctccgggagcaaatatcggtgatgaatgtgctctgtttgaagcgactcatggtacagcacctaaatatgccggtcaggataaggtgaatccaggttctgtgattctttccgctgagatgatgttacgccatatggggtggacagaagccgcagatctgattgttaaaggtatggaaggcgcgattgccgcgaagactgtgacttatgatttcgaacgtctgatggaaggggctaagctgctgaaatgcagtgaatttggtgacgcgattattcagcatatgtaa

SEQ ID NO: 37064 - protein, 417 aa, Photorhabdus luminescens subsp. laumondii TTO1
MESKVVIPAEGKKITVDAKGKLVVPNNPVIPYIEGDGIGVDVTPAMLKVVDAAVQKAYQGERKISWMEIYTGEKSTHVYGKDVWLPDETLDLIREYRVAIKGPLTTPVGGGIRSLNVALRQQLDLYVCLRPVRYYQGTPSPVKQPELTDMVIFRENAEDIYAGIEWKAGSVEADKVIKFLQEEMGVNKIRFPQQCGIGVKPCSEEGTKRLVRAAIEYAIDNDRESVTLVHKGNIMKFTEGAFKDWGYQLAREEFGGELLDGGPWVKIKNPKNGKEIIVKDVIADAFLQQILLRPAEYDVIACMNLNGDYISDALAAQVGGIGIAPGANIGDECALFEATHGTAPKYAGQDKVNPGSVILSAEMMLRHMGWTEAADLIVKGMEGAIAAKTVTYDFERLMEGAKLLKCSEFGDAIIQHM

SEQ ID NO: 37065 - DNA, 1419 bp, Wolbachia endosymbiont of Drosophila melanogaster
  CDS (1)..(1419): transl_table=11
atgtcaacactaatcacagttgcatatggcgacggtatcggaccagaaatcatggaagcggtgctgtcgatattgcgcgaagcagaagcggaaatctcaatagatattattgaaataggggagcgtgtttacagtaaagaatggtctcacggaatttctccaagtggttgggaatcaattgaaaggacaaaaatattattaaaatctccgacaacaactcctcaaggtaaagggaacaaaagcttaaacgttgcactcagaaaaaatctagggttgtatgcaaatatcagaccatgcatttcatatcatcatgttatagaaaataaattcgataagtttgatatcgtagtgatacgtgaaaatgaagaggacgtttacaccggaatagagcataggctcactggtgactcttaccaatgcactaaaattattactagatctggctcagagaagatatgcaggtacgcttttgaatatgcaaaaaaacacaacagaaaaaaagtaacttgcctgactaaagataacatcatgaaaatgactgacggaactttccatgccgcgtttgatcgcattgcaaaggaatacccagatataaaggcagaacattatatagttgatattggaatggcgcgtgttgcaacagaaccggagaattttgatgttatagtaaccgagaacttatatggcgacatattatcagatatagtcgcacaaacctctggatctgtggggcttgccggaagtagcaacatcgggaatgaatacgcaatgtttgaagcagtgcacggttctgcccctgatattgcaggaaaaaacatagccaatccttctggtcttttaaatgctgcagtgcatatgctaatttacataggtcaagtgggtactgcaaaactaatctacgatgcatggctcaagactttggaggatggaatacacactgccgatttatataaggagaaaagaagtaaacagaaagttggtacaaaagaatttgcagaagctgttatagacaatctaggaaaaaaaccgaaaacattatctgagcttataattggcagtgatccaaatagtaaagtggataaaatacaggataattatgaacaggattataagattaaaaaactagtgggtagcgatataacgcttgcctggagtaagccggctgactttgaccaaatagtgaagttgtttgaaacaagtaatccgcagattatagcaatatattcaaaaggccttgcgatttggccaggaagttcaaagtcttcaagtgaccaaataacctgcaggttcattgcaaataatgaaattacaaatagtgatgtgaataacttgctaatcaaatttgaggaacataattttgatgtggtgagaatggataagttgtatttgtatgatgggaaagagggtttcttctcttag

SEQ ID NO: 37066 - protein, 472 aa, Wolbachia endosymbiont of Drosophila melanogaster
MSTLITVAYGDGIGPEIMEAVLSILREAEAEISIDIIEIGERVYSKEWSHGISPSGWESIERTKILLKSPTTTPQGKGNKSLNVALRKNLGLYANIRPCISYHHVIENKFDKFDIVVIRENEEDVYTGIEHRLTGDSYQCTKIITRSGSEKICRYAFEYAKKHNRKKVTCLTKDNIMKMTDGTFHAAFDRIAKEYPDIKAEHYIVDIGMARVATEPENFDVIVTENLYGDILSDIVAQTSGSVGLAGSSNIGNEYAMFEAVHGSAPDIAGKNIANPSGLLNAAVHMLIYIGQVGTAKLIYDAWLKTLEDGIHTADLYKEKRSKQKVGTKEFAEAVIDNLGKKPKTLSELIIGSDPNSKVDKIQDNYEQDYKIKKLVGSDITLAWSKPADFDQIVKLFETSNPQIIAIYSKGLAIWPGSSKSSSDQITCRFIANNEITNSDVNNLLIKFEEHNFDVVRMDKLYLYDGKEGFFS

SEQ ID NO: 37067 - DNA, 1308 bp, Bacillus cereus ATCC 10987
  CDS (1)..(1308): transl_table=11
atgggggttatcacattgacgacaggtgaaaaaattactgtaactaatggtgttatgaatgtaccaaacaatccgattattccatttattgaaggagatggaattggtcctgatatttgggcagctgcatctcgtgtactagaagcagcagttgaaaaagcttatgatggtgagaagaaaatcgtttggaaagaagtgcttgcaggggaaaaagcattcaaccaaacaggcgagtggttaccagaagaaactttaaatttaattcgtgaatatttaatcgcgattaaaggtccacttacaactccagttggcggtggtattcgttctctaaacgtagcacttcgtcaagaattagatttatatgtatgtctacgtccagttcgttattttgaaggtgttccttcacctgtaaagcgtccggaagatactgatatggttattttccgtgaaaatacagaagacatttatgctggaattgaatatgcgcaaggatctccagaagcagaaaaagttcttactttcttaaaagaagcaatgggtgtgaataaaattcgcttcccagaaacatctggtattggtattaagccaatctcagaagaagggacaaagcgtcttgttcgtgctgcaattcaatatgcaattaacgaaaaacgctcttctgttacattagttcataaaggaaacattatgaaatttacagaaggtgctttcaaaaactggggttacgaagtagcggaacaagaattcggcgacaaagtatttacttgggctgaatatgatcgtatcgttgagaaagatggaaaagatgcagcgaataaagcgatggcagacgctgaagtggctggaaaaatcatcgtaaaagattctattgcagacatcttcttacaacaaattttaactcgtccacgtgagttcgatgttgttgcaacaatgaacttaaacggagactacatctctgatgcacttgctgcacaagtaggtggaattggtattgcacctggtgcaaacattaactatgtgactggacatgctatctttgaagctacacacggtacagctccaaaatatgcaggtttagataaagtaaacccatcttcagttcttctttctggtgtattattattagagcacttaggatggaacgaagctgcgaaattagtaactgcttcagttgagaaaacaattgcttcaaaagtagtgacttatgatttcgcacgcttaatggaaggtgcaacagaagtgaaatgttctgagttcgctaatgaacttattaaaaacatggatgtagcgataatcaaaaacgcataa

SEQ ID NO: 37068 - protein, 435 aa, Bacillus cereus ATCC 10987
MGVITLTTGEKITVTNGVMNVPNNPIIPFIEGDGIGPDIWAAASRVLEAAVEKAYDGEKKIVWKEVLAGEKAFNQTGEWLPEETLNLIREYLIAIKGPLTTPVGGGIRSLNVALRQELDLYVCLRPVRYFEGVPSPVKRPEDTDMVIFRENTEDIYAGIEYAQGSPEAEKVLTFLKEAMGVNKIRFPETSGIGIKPISEEGTKRLVRAAIQYAINEKRSSVTLVHKGNIMKFTEGAFKNWGYEVAEQEFGDKVFTWAEYDRIVEKDGKDAANKAMADAEVAGKIIVKDSIADIFLQQILTRPREFDVVATMNLNGDYISDALAAQVGGIGIAPGANINYVTGHAIFEATHGTAPKYAGLDKVNPSSVLLSGVLLLEHLGWNEAAKLVTASVEKTIASKVVTYDFARLMEGATEVKCSEFANELIKNMDVAIIKNA

SEQ ID NO: 37069 - DNA, 1107 bp, Strongylocentrotus purpuratus
  CDS (1)..(1107)
atggcgagcaaagtgtggacgagtttgaaaacgggtgtgagcaggagcctcaacaagagattttattctcaaaatgtgagaaaagtcacattaatccctggagatgggataggacctgaaatttctgcctctgtgcagcaaattttcagagctgctgatgtgcctgttgaatgggaggctgtggatgtaacaccagtcaagggccccgatgggcgcacccgtatccctccagctgcagtgcactccatgaatcagaatatgattggtttaaagggaccccttgccacgcccattggtaaaggacatatgagcctcaatcttgccctccgaaaggaattcaatctctatgccaatgttcgaccctgcaagtcactggagggttacaagactccctatgatgatgtagatctagtcaccatcagagaaaatacagagggagagtacagtggcattgaacatacaatcgttgatggtgtggtacagagtatcaaactgatcaccaaggaggcctcgatgagagtagctgagtttgcctttgagtacgccaaggctaacagcagacatacagtgacggctgtacacaaagcaaacatcatgaggatgtccgatggtctgttccttagctgctgtagagaggtagcagagaaacatagagacatcaagttcaatgagatctacctagatacagtctgtcttaatatggtgcaagatcccaatcagtatgatgtgttggtcatgcctaacttatatggtgatatcctcagtgatctttgtgcaggtctagtaggaggtcttggtgtaacgccaagtggaaacatcggagctggaggtgtcgccatctttgaatcagttcacggtacagctcctgacatagcaggggaggacaaggcgaaccccacagctctcctccttagtgctgttatgatgcttagacacatggagctcatgggatatgcagggcgcatcgagaaggcatgtctcgaggtcatcagtgaaaaagaggtaagtggtacagagggttatcatctgactggtgatttaggtggaggggcaacctgctctgagtttacacaagccatttgtgacagggttcagcagctagaatag

SEQ ID NO: 37070 - protein, 368 aa, Strongylocentrotus purpuratus
MASKVWTSLKTGVSRSLNKRFYSQNVRKVTLIPGDGIGPEISASVQQIFRAADVPVEWEAVDVTPVKGPDGRTRIPPAAVHSMNQNMIGLKGPLATPIGKGHMSLNLALRKEFNLYANVRPCKSLEGYKTPYDDVDLVTIRENTEGEYSGIEHTIVDGVVQSIKLITKEASMRVAEFAFEYAKANSRHTVTAVHKANIMRMSDGLFLSCCREVAEKHRDIKFNEIYLDTVCLNMVQDPNQYDVLVMPNLYGDILSDLCAGLVGGLGVTPSGNIGAGGVAIFESVHGTAPDIAGEDKANPTALLLSAVMMLRHMELMGYAGRIEKACLEVISEKEVSGTEGYHLTGDLGGGATCSEFTQAICDRVQQLE

SEQ ID NO: 37071 - DNA, 1080 bp, Nasonia vitripennis
  CDS (1)..(1080)
atggctgctcagtggatccgccagattacgtttctaaaggctgttgggattcgactatacagcagtaatattcacaagtgcactctcattcctggagatggcataggaccagaaatttctgctgctgtgcaaaaaatttttgaagcggctaaggtacctatagaatgggaatcagtagatgtaacacccgttagaggaccagatggaaaatttggtatacctcaagcagctattgattcaataaacaaaaacaaaatcggtttaaaaggacctcttatgactccaattggcaagggtcaccgatctttaaatcttgcgttaagaaaagaattcaacctctatgctaatgttcgtccatgtcgatccttagaaggttacaaaactctttatgacaatgttgatgttgttacaatcagagaaaatactgaaggagaatactctggtattgagcatgaaattgtagagggagttgtacagtctattaaacttatcactgaagaagcctcaagtagagtagctgaatttgcatttcaatatgctcaagataataacagaaaaaaggtaacagctgtgcataaagcaaatattatgagaatgtcagatggtctttttttgagatgctgtagagaagctgctcaaaagtttcctaatgttaaatttgaagaaagatatttagatactgtttgtttaaatatggtccaagatcctagtcaatatgatgttcttgtaatgcccaatttatatggtgatattttatctgacatgtgcgctggactagttggaggtttaggtttaactccaagtgggaatattggtttaaatggtgctctttttgaatctgttcatggaacagcacctgatattgctggacaagataaagccaatcctacagccttgttactatctgcagttatgatgttaaagtatatgggtttaaataatcatgcaagaattattgagcattctgcttatgacactattaaagaagcaaaatatttaactggtgatttaggtggttctgctaaatgcagtgaatatactaatgaaatatgtaaaaaagtttctgggcaaacaaaataa

SEQ ID NO: 37072 - protein, 359 aa, Nasonia vitripennis
MAAQWIRQITFLKAVGIRLYSSNIHKCTLIPGDGIGPEISAAVQKIFEAAKVPIEWESVDVTPVRGPDGKFGIPQAAIDSINKNKIGLKGPLMTPIGKGHRSLNLALRKEFNLYANVRPCRSLEGYKTLYDNVDVVTIRENTEGEYSGIEHEIVEGVVQSIKLITEEASSRVAEFAFQYAQDNNRKKVTAVHKANIMRMSDGLFLRCCREAAQKFPNVKFEERYLDTVCLNMVQDPSQYDVLVMPNLYGDILSDMCAGLVGGLGLTPSGNIGLNGALFESVHGTAPDIAGQDKANPTALLLSAVMMLKYMGLNNHARIIEHSAYDTIKEAKYLTGDLGGSAKCSEYTNEICKKVSGQTK

SEQ ID NO: 37073 - DNA, 1083 bp, Magnaporthe grisea 70-15
  CDS (1)..(1083)
atggcaacagctcgtgctctcagaattgggctcatagccggtgatggcataggcaaagatgtcgtccccgctgggcgtcgtgttctcgaagccctgccggcgtcgcttggcctgaggttctccttcgtcgatctgcaagctggcttccagacgtttgaagagacgggaagcgccctccccgaccggaccgttgagaccctcaagggcgagtgcgacggagccctctttggcgccgtcagctctccgaccaagcccgtcaagggctacagctcgcccatcgtcggcctccgcaagaagctcgacctgtacgccaacgtccgaccggtcaagacggtggtgtctgccccgcggcccatcgacatggtgatcgtccgcgagaacaccgaggacctgtatgtcaaggacgagcgcacctttgatgcccccgacggctccggtcccgtcgccgaggccatcaagcgcatctcgtaccgcgcatcgcaccgcatcgcgtccatggccggcgagatcgccctgcgtaggcaaaagatccgcgctgcgggcgcgcccagcattcactcgtcgccgctcgtgaccatcacccacaagtccaacgtcctgtcccagaccgacggactcttccgctccactgccaaggaggctctggctgaccccaagtacgccggctccgtcgccgtcgaggagcagatcgtcgacagcatggtctacaagctattccgccagcctgaggactacgacgtcattgtcgcccccaacctgtacggcgacatcctgtccgatggtgccgccgcgctcgtgggctctttggggctggtccctagcgccaatgtcggcgacggcttcgtcatgggtgagccctgccacggcagtgcccctgacatcatgggcaagaacattgccaaccccatcgccaccctgcgcagcgctgctctgatgctcgagttcttgaacgaggaggaggccgctgccaagatctacgctgctgtggacgccaacttggtggagggcaaggttctgagccctgacttgggcggcaaggccaccaccgaccaggttcttgaggacattctgaggaggttgtaa

SEQ ID NO: 37074 - protein, 360 aa, Magnaporthe grisea 70-15
MATARALRIGLIAGDGIGKDVVPAGRRVLEALPASLGLRFSFVDLQAGFQTFEETGSALPDRTVETLKGECDGALFGAVSSPTKPVKGYSSPIVGLRKKLDLYANVRPVKTVVSAPRPIDMVIVRENTEDLYVKDERTFDAPDGSGPVAEAIKRISYRASHRIASMAGEIALRRQKIRAAGAPSIHSSPLVTITHKSNVLSQTDGLFRSTAKEALADPKYAGSVAVEEQIVDSMVYKLFRQPEDYDVIVAPNLYGDILSDGAAALVGSLGLVPSANVGDGFVMGEPCHGSAPDIMGKNIANPIATLRSAALMLEFLNEEEAAAKIYAAVDANLVEGKVLSPDLGGKATTDQVLEDILRRL

SEQ ID NO: 37075 - DNA, 1158 bp, Magnaporthe grisea 70-15
  CDS (1)..(1158)
atgttggccctacgaagagtcgccgccgcggcgcctgtggcccgccaattctctgctgccccgagggccgcagccacatttgctttctctaatcagaggtactactcgtcgcaaggcgagcgcgttgccaagttcaccggcaagaaggatgcctccggtcgctaccccgtcagcttgatcgagggtgacggtattggccccgagatttcggaagctgtcaagcaaattttcgaggccgcgaaggccccagtctcgtgggagcctgttgacgtgacccccattcttaaggacggcaggaccgccatccccgatgctgccatcgagagcatcgagaggaacaaggttgccctcaagggccccctggctacccctatcggcaagggccacgtttccctgaacctgactctccgccgtaccttcaacctttttgccaacctccggccatgccgctccgtcgcgggcttcaagaccccgtacgacaacgtcgacacggtcctgatccgtgaaaacaccgagggagagtactctggaattgagcacgttgtcgtcgatggtgttgttcagagcatcaagctcatcactcgcgaggccagcgagcgtgtcctgcgtttcgctttccagcatgcccaggagatcggccgcaagaaggtccgcgtcgtccacaaggccactatcatgaagatgagcgacggtctgttccttagcgtgggccagcaggtcgccaaggacttccctggcatcgagttcgacgctgagctgcttgacaacacctgcctgaagatggttaccgaccccctcccttataacgacaaggtcctcgtcatgcccaacctgtacggtgacattttgtccgacatgtgcgctggcctgattggtggtctcggcctgacgccctcgggcaacattggtgacgagtgctccatcttcgaggccgtccacggttccgctccggatatcgccggcaagggccttgccaaccccaccgcccttctcctgagctccatgatgatgttgaggcacatgggtctcggcgagtacgccgaccgcattgagaaggccaccttcgacacgcttgccgagggcaaggctctgactggcgaccttgggggcaaggccaagactcacgagtttgctggcgccatcatttccaagttgtaa

SEQ ID NO: 37076 - protein, 385 aa, Magnaporthe grisea 70-15
MLALRRVAAAAPVARQFSAAPRAAATFAFSNQRYYSSQGERVAKFTGKKDASGRYPVSLIEGDGIGPEISEAVKQIFEAAKAPVSWEPVDVTPILKDGRTAIPDAAIESIERNKVALKGPLATPIGKGHVSLNLTLRRTFNLFANLRPCRSVAGFKTPYDNVDTVLIRENTEGEYSGIEHVVVDGVVQSIKLITREASERVLRFAFQHAQEIGRKKVRVVHKATIMKMSDGLFLSVGQQVAKDFPGIEFDAELLDNTCLKMVTDPLPYNDKVLVMPNLYGDILSDMCAGLIGGLGLTPSGNIGDECSIFEAVHGSAPDIAGKGLANPTALLLSSMMMLRHMGLGEYADRIEKATFDTLAEGKALTGDLGGKAKTHEFAGAIISKL

SEQ ID NO: 37077 - DNA, 1161 bp, Magnaporthe grisea 70-15
  CDS (1)..(1161)
atgctggggacttcaagatcggcccagtgcctcgtgcgcgccgcgcgcaagccgcagcttttccaggcctccaagcaggcttcacgtacattcgcgaccgtccagtccgacatcttcaagccctcaaagtatggcggcaagtacaccgtcaccctgatccctggtgacggtatcggtgccgaggtcgccgagagcgtcaagaccatcttcaaggcggacaacgttcccattgagtgggagcaggtcgaggtttcgggtatcgccgacagcgccgccccctccggccgcaccgaggaccttttcaaggagtcggtcgcgtcgctgcgccgcaacaagctcggtctcaagggtatcctccacacacccatcagccggtctggccaccagagcttcaacgtcgccatgcgccaggagctcgacatctacgcctccatctccctgatcaagaacatccccggctacgagacaaggcacaaggacgtcgacctgtgcatcattcgtgagaacaccgagggtgaatacagtggtctggagcaccagtccgtcccgggtgttgtcgagtctctcaagatcatcacccgtgccaagtctgagcgcatttccaagtttgccttcagctttgccctcgccaacaaccgcaagaaggttacttgcatccacaaggccaacatcatgaagcttgccgacggtcttttccgcagcaccttccaccagactgccaaggagtacccgacactcgaggctaacgacatgattgtcgacaacgccagcatgcagtgtgtcagccgcccgcagcagttcgatgttctggtcatgcccaacctttacggtggcatcctgtccaacatcggtgccgccctggttggtggccccggtattgtccctggctgcaacatgggccgtgatgtcgccgtttttgagcccggctgccgtcacgtcggtcttgacatcaagggcaaggaccaggccaaccctactgctttgatcctgtcaggctctatgctcctgcgccacttgggtcttgacgaccacgccaaccgcattagcaaggccgtctacgccgtcattgccgagggcaagacccggacacgtgacatgggcggcgaagccaccaccaaccagttcaccaaggccatcttggacaagatggagactttctaa

SEQ ID NO: 37078 - protein, 386 aa, Magnaporthe grisea 70-15
MLGTSRSAQCLVRAARKPQLFQASKQASRTFATVQSDIFKPSKYGGKYTVTLIPGDGIGAEVAESVKTIFKADNVPIEWEQVEVSGIADSAAPSGRTEDLFKESVASLRRNKLGLKGILHTPISRSGHQSFNVAMRQELDIYASISLIKNIPGYETRHKDVDLCIIRENTEGEYSGLEHQSVPGVVESLKIITRAKSERISKFAFSFALANNRKKVTCIHKANIMKLADGLFRSTFHQTAKEYPTLEANDMIVDNASMQCVSRPQQFDVLVMPNLYGGILSNIGAALVGGPGIVPGCNMGRDVAVFEPGCRHVGLDIKGKDQANPTALILSGSMLLRHLGLDDHANRISKAVYAVIAEGKTRTRDMGGEATTNQFTKAILDKMETF

SEQ ID NO: 37079 - DNA, 1137 bp, Gibberella zeae PH-1
  CDS (1)..(1137)
atgttgtctcgaggatctcttcgatcggctcagctgctgcgcggcgtcgccaagcaacaaccccagctcgcccgatccttcgccaccgtccagtccgacatcttcaagcctgccaagtacggcggcaagtacaccgtcaccctcatccccggtgatggtatcggtaccgaggttgccgagtctgtcaagaccgtcttcaaggccgacaacgtccccgttgagtgggagcagatcgaggtttccggtctcgagggcgccggccgcactgaggatgccttccgcgagtccgtcgcttctctcaagcgcaacaagctcggcctcaagggtatcctccacacccccatcagccgatccggccaccagagcttcaacgtcgccatgcgacaggagctcgacatttacgccagcatcagcttgatcaagaacatccccggctacgagacccgccacaaggacgtcgacctgtgcatcatccgagagaacaccgagggtgagtactctggtcttgagcaccagagcgtcgagggtgtcgtcgagtccctcaagatcatcacccgcgccaagtctgagcgtatcgccaggttcgccttctctttcgccctcgcaaacggccgatccaaggttacttgcatccacaaggccaacatcatgaagcttgccgacggtctcttccgcagcaccttccaccaggtcgccaaggactaccccaccctcgagaccaacgacatgattgtcgacaacgcctccatgcaggctgtctctcgtcctcagcagttcgacgttatggtcatgcctaacctttacggtggtatcctctccaacattggcgctgcccttgttggtggtcccggtattgtccctggttgcaacatgggccgtgaggttgctgttttcgagcccggttgccgtcacgtcggtcttgacatcaagggcaaggaccaggccaaccccactgccatgcttctgtccggcagcatgctgctgcgacaccttggtctcgatgagcatgctaaccgcatctccaaggccacctacgccgtcattgccgatggcaaggtccgcactcccgacatgggcggcaagtccaccacccacgagttcacccgtgccatcctcgacaagctcgagaccgtttaa

SEQ ID NO: 37080 - protein, 378 aa, Gibberella zeae PH-1
MLSRGSLRSAQLLRGVAKQQPQLARSFATVQSDIFKPAKYGGKYTVTLIPGDGIGTEVAESVKTVFKADNVPVEWEQIEVSGLEGAGRTEDAFRESVASLKRNKLGLKGILHTPISRSGHQSFNVAMRQELDIYASISLIKNIPGYETRHKDVDLCIIRENTEGEYSGLEHQSVEGVVESLKIITRAKSERIARFAFSFALANGRSKVTCIHKANIMKLADGLFRSTFHQVAKDYPTLETNDMIVDNASMQAVSRPQQFDVMVMPNLYGGILSNIGAALVGGPGIVPGCNMGREVAVFEPGCRHVGLDIKGKDQANPTAMLLSGSMLLRHLGLDEHANRISKATYAVIADGKVRTPDMGGKSTTHEFTRAILDKLETV

SEQ ID NO: 37081 - DNA, 1146 bp, Gibberella zeae PH-1
  CDS (1)..(1146)
atgctggccattcgagctctccgaactcccgcctccaggcaagccctgcgcactgctgccccccgcgctgccattttctacaaccgatgctactcaacctctggcgaccgtgttgccaagtacaacggaaccaaggatgccaagggcaacttcctggtcagcttgattgagggtgacggtatcggccccgagattgcccagtccgtcaaggacatcttcgccgccgccaagacccccattgcttgggagcctgtcgatgtcactcccatcatcaaggacggcaagaccgctatccccgatgctgccattgacaacatcaagaagaacaagattgccctcaagggtcctctcgctactcccattggcaagggccatgtctctcttaaccttaccctccgccgaaccttcaacctcttcgccaacctgcgaccttgccgctctgtcgctggctacgagactccctacgacaacgtcaacaccgtcctgatccgagagaacaccgagggtgaatactccggtattgagcacgttgttgtcgatggtgttgtccagagcatcaagctcatcacccgtgaggcttccgagcgtgtcctccgattcgccttccagcacgccgagtccattggccgcaagaaggtccgcgtcgtccacaaggccaccatcatgaagctctccgacggtctcttcctcaaggtcgctcaggaggtcgccaaggacttccccggcattgagttcgacgccgagctcctcgacaacagctgcctcaagatggtcactgaccccactccttacaacgacaaggtccttgtcatgcccaacctttacggtgacattctctccgacatgtgcgccggtctgatcggcggtctcggtctcaccccctccggaaacattggtgatgagtgctccatcttcgaggccgtccacggttccgcccctgatatcgctggcaagaaccttgccaaccccactgcccttctcctcagctccatcatgatgctgcgacacatgggtcttaacgagcacgccacccgcatcgagaaggccatcttcgataccctcgccgagggcaaggccctgactggcgatctcggcggcaaggccaagaccaacgagtacgctgccgccattatctccaggctgtaa

SEQ ID NO: 37082 - protein, 381 aa, Gibberella zeae PH-1
MLAIRALRTPASRQALRTAAPRAAIFYNRCYSTSGDRVAKYNGTKDAKGNFLVSLIEGDGIGPEIAQSVKDIFAAAKTPIAWEPVDVTPIIKDGKTAIPDAAIDNIKKNKIALKGPLATPIGKGHVSLNLTLRRTFNLFANLRPCRSVAGYETPYDNVNTVLIRENTEGEYSGIEHVVVDGVVQSIKLITREASERVLRFAFQHAESIGRKKVRVVHKATIMKLSDGLFLKVAQEVAKDFPGIEFDAELLDNSCLKMVTDPTPYNDKVLVMPNLYGDILSDMCAGLIGGLGLTPSGNIGDECSIFEAVHGSAPDIAGKNLANPTALLLSSIMMLRHMGLNEHATRIEKAIFDTLAEGKALTGDLGGKAKTNEYAAAIISRL

SEQ ID NO: 37083 - DNA, 1077 bp, Apis mellifera
  CDS (1)..(1077)
atggcagcgcagtggatacgaaatgcagttccgaaaattggctgcgtccgtttttatagtagtaaagttcataaatgtacacttattcccggagatggcatcgggcctgaaatttctattgctgttcaaaaaatttttgatgctgctaaggtaccaatagaatgggaatctgttgatgtaacaccagtaaaaggcccagatggaaaatttggtattccacaagctgccattgattcagttaatagaaataaaattggtttgaaaggaccattaatgacaccagtaggaaaaggacatagatctttaaatcttgcactaagaaaagaatttaatttatatgctaatgttcgaccatgtcgttccttagaaggttacaagacattgtacgacaatgttgatgttgttactattagagaaaatacagagggagaatactctggtatagaacatgaaattgtagaaggagttgtacagtcaattaaattaattacagaggaagcttccagtcgggtagcagaatttgcttttcaatatgctcaagataataatagaaaaaaggtgacagctgtacataaagcaaatataatgagaatgtcagatggtttatttttaagatgctgtagggaagctgcacaaaaatttcaatctattaaatttgaagaaagatacttggatacagtgtgtttaaatatggttcaagatcccagtcaatacgatgtacttgtaatgcctaacttatatggtgatatcttatctgacatgtgtgctggacttgttggaggacttggacttacaccaagtgggaatattggtttgaatggtgcactgtttgaatctgtgcacggtactgctccagatatagcaggccaagataaggcaaatcctacagcattgttactttctgctgtaatgatgcttaaatatatgggattaaataaacacgcaaaaattatagaaacttgtgcttatgaaactattaaagaaggtaaacatttaacaggagatcttggtggatctgcaaaatgtagcgaatatactgatgaaatttgcaaaaaagttttatcattagcaaaatag

SEQ ID NO: 37084 - protein, 358 aa, Apis mellifera
MAAQWIRNAVPKIGCVRFYSSKVHKCTLIPGDGIGPEISIAVQKIFDAAKVPIEWESVDVTPVKGPDGKFGIPQAAIDSVNRNKIGLKGPLMTPVGKGHRSLNLALRKEFNLYANVRPCRSLEGYKTLYDNVDVVTIRENTEGEYSGIEHEIVEGVVQSIKLITEEASSRVAEFAFQYAQDNNRKKVTAVHKANIMRMSDGLFLRCCREAAQKFQSIKFEERYLDTVCLNMVQDPSQYDVLVMPNLYGDILSDMCAGLVGGLGLTPSGNIGLNGALFESVHGTAPDIAGQDKANPTALLLSAVMMLKYMGLNKHAKIIETCAYETIKEGKHLTGDLGGSAKCSEYTDEICKKVLSLAK

SEQ ID NO: 37085 - DNA, 1107 bp, Candida glabrata CBS 138
  CDS (1)..(1107)
atgctaggaatcagatcatttagattgaatgccagaagatttttggcaacagctcagccaagtatagggcgtttcaccgggaagcccaatccatctactggtaagtttacagtttcctttattgagggtgatggtattggtcctgagatttccagttctgtgaagcgtattttccaagctgcggatgttccagttgagtgggagacctgtgatgtgactcctatcttcgtgaatggattgaccacaattccagacccagctgtgcaatctataaacaagaacctagtggcattgaagggtcctctggccactcctatcggtaaaggtcacagatccttgaacttgaccttgagaaagactttcaacctgttcgccaatgtgcgtccagccaagtccatcgaaggtttcaagactacatacgaaaatgtcgatctggtacttatcagagagaacaccgaaggtgaatactccggtatcgagcacttggtctctccaggtgtggttcagtccatcaagctgattactagagacgcctccgagagagtcattagatatgcatacgagtacgccagagccattggcagaccaagattgatagtagtccacaagtccactatccaaagactagcagacggtctattcgtcaacgtggccaaagaactagcagcagagtacccagacatccaactagagacagaactaatcgacaacacatgtctaaacgttgtctccaacccatcttcctacactgacgcagtctccgtatgtccaaacttgtacggtgacatcttgtcagacttgaactccggtctaagtgccggttccttgggtttgaccccatccgctaacatcggtcacaaggtctccattttcgaagctgttcacggttcagctccagatattgcaggtcaaaacaaggctaacccaacagctcttcttctatcctccgtcatgatgttgaaccacatgggcatgactgaacacgcagacaggatcgaaaaggccgtcctaggtacgatcgccggtggctctgaatacagaaccggtgacttgggtggttctgcttctaccacttccttcacagacgctatcatcaagaagttgtaa

SEQ ID NO: 37086 - protein, 368 aa, Candida glabrata CBS 138
MLGIRSFRLNARRFLATAQPSIGRFTGKPNPSTGKFTVSFIEGDGIGPEISSSVKRIFQAADVPVEWETCDVTPIFVNGLTTIPDPAVQSINKNLVALKGPLATPIGKGHRSLNLTLRKTFNLFANVRPAKSIEGFKTTYENVDLVLIRENTEGEYSGIEHLVSPGVVQSIKLITRDASERVIRYAYEYARAIGRPRLIVVHKSTIQRLADGLFVNVAKELAAEYPDIQLETELIDNTCLNVVSNPSSYTDAVSVCPNLYGDILSDLNSGLSAGSLGLTPSANIGHKVSIFEAVHGSAPDIAGQNKANPTALLLSSVMMLNHMGMTEHADRIEKAVLGTIAGGSEYRTGDLGGSASTTSFTDAIIKKL

SEQ ID NO: 37087 - DNA, 1125 bp, Debaryomyces hansenii CBS767
  CDS (1)..(1125)
atgtcctcaattatccgtcgtactttctctacttctaccgctgctttgaaatccttaaaaattggtttaattgccggtgatggtattggtcgtgaagttatgccagctggtcaagctgttttggaaaacttaccatctaagcacgatttacaatttgaatttgttaacttagacgctggttttgagtacttccaaaagaacggtactgccttacctcaagaaactgttgacattttgcaaaaggaatgtgacggtgctttgttcggtgcagtatcttccccaacaaccaaggtggaaggctattcttccccaattgttgccttgagaaagaagatgggtttatacgctaacgtccgtccagttaagtctgttgaaggtaacgctagatcagtcgatatggttattgtccgtgaaaacaccgaagacttatatatcaaggaagaaaagtcgtacactaaggaagatggtaccagggttgccgaagccatcaagagaatcactgaaactgccacctcaagaattgctaagatggcttacgacattgcattgcaaagacaagctattagaaaagcaaaccctggcttaaaatccttacacgaaaagccttcggtcaccgttacccacaaatctaatgtcttatctcaatctgatggtttattccgtgaagtatgtcgtcaagtttacgatgaaaatgctgataagtacaaggatattgctcacaaggaacaaattgttgattccatggtctaccgtatgttcagagaaccagaaatatttgatgttgttgttgctccaaacttgtatggtgacattttaagtgatggtgctgccgctttagttggttctttaggtgtcgttccatctgccaacgtcggtgacaacttcgctattggtgaaccatgccatggttctgctccagatatccaaggtaagggtatttctaacccaattgctaccatcagatctactgctttgatgttagaatttatgggctaccctgaaccagctgctgatatctacgctgccgttgatgctaacttgactgaagataagattaagactccagacttaggtggttcttctagtactcaagaagttatcgacgatattatcagacgtttttaa

SEQ ID NO: 37088 - protein, 374 aa, Debaryomyces hansenii CBS767
MSSIIRRTFSTSTAALKSLKIGLIAGDGIGREVMPAGQAVLENLPSKHDLQFEFVNLDAGFEYFQKNGTALPQETVDILQKECDGALFGAVSSPTTKVEGYSSPIVALRKKMGLYANVRPVKSVEGNARSVDMVIVRENTEDLYIKEEKSYTKEDGTRVAEAIKRITETATSRIAKMAYDIALQRQAIRKANPGLKSLHEKPSVTVTHKSNVLSQSDGLFREVCRQVYDENADKYKDIAHKEQIVDSMVYRMFREPEIFDVVVAPNLYGDILSDGAAALVGSLGVVPSANVGDNFAIGEPCHGSAPDIQGKGISNPIATIRSTALMLEFMGYPEPAADIYAAVDANLTEDKIKTPDLGGSSSTQEVIDDIIRRF

SEQ ID NO: 37089 - DNA, 1098 bp, Debaryomyces hansenii CBS767
  CDS (1)..(1098)
atgttcagacagataactagacaatcagcaatttccccaagattcaccagatcttatattgccggtcaatttaccggaagcaagaagtctaatggtaagtataccgtgaccttgatcgaaggtgatggtatcggtcctgaaatctctcaatccgttaaggatatctacgccgctgccaaggtcccaatcgaatttgaatccgttgacgttactccgttattaattgatggtaagaccactttaccacaaccagctgttgattcagtcaacaaaaacttagttgcattaaagggaccattagctaccccagttggtaagggtcacacctctatgaacttgaccttgagaagaactttcaacttgtttgccaatgttcgtccatgtaagtcggttgtcggatacgatactccatacgaaaacgttgataccgtgttaatcagagaaaacaccgaaggtgaatactcgggtattgaacacactatcgttccaggtgttgtgcaatcgatcaagttgatcaccaagccagcctccgaaaaggttattagatacgcttttgaatacgccaaatctatcaacaagccacatgttcttgttgtgcacaaggcctccatcatgaagttgtccgatggtttgtttgtttccactgccaaggaaatcggtaaggaatacccagacatcaagttagattacgaattgttagataacacttctttgaaattgactgctgacccagcggactataaggatgttgtcatggtcatgcctaacttatatggtgatatcatgtccgatttatcatctggtttaatcggtggtttaggtttaactccatcgggtaacatgggtaacaaggtctccattttcgaagccgtccacggttctgctccagatattgccggtaaaggtttagctaacccaaccgctttattattatcttcatgtatgatgttgagacacatgtctttaaactctgatgctgacaagattgaaaaggctgtcttagataccattgcttccggtaaggaaaacagaactggtgacttatacggtacttcttccacccaaaacttcaccgaacaagttattaccagattataa

SEQ ID NO: 37090 - protein, 365 aa, Debaryomyces hansenii CBS767
MFRQITRQSAISPRFTRSYIAGQFTGSKKSNGKYTVTLIEGDGIGPEISQSVKDIYAAAKVPIEFESVDVTPLLIDGKTTLPQPAVDSVNKNLVALKGPLATPVGKGHTSMNLTLRRTFNLFANVRPCKSVVGYDTPYENVDTVLIRENTEGEYSGIEHTIVPGVVQSIKLITKPASEKVIRYAFEYAKSINKPHVLVVHKASIMKLSDGLFVSTAKEIGKEYPDIKLDYELLDNTSLKLTADPADYKDVVMVMPNLYGDIMSDLSSGLIGGLGLTPSGNMGNKVSIFEAVHGSAPDIAGKGLANPTALLLSSCMMLRHMSLNSDADKIEKAVLDTIASGKENRTGDLYGTSSTQNFTEQVITRL

SEQ ID NO: 37091 - DNA, 1110 bp, Yarrowia lipolytica CLIB122
  CDS (1)..(1110)
atgctcaaccttagaaccgcccttcgagctgtgcgacccgtcactctgacccgatcctacgccacttccgtggcctctttcaccggccagaagaactccaacggcaagtacactgtgtctctgattgagggagacggtatcggaaccgagatctccaaggctgtcaaggacatctaccatgccgccaaggtccccatcgactgggaggttgtcgacgtcacccccactctggtcaacggcaagaccaccatccccgacagcgccattgagtccatcaaccgaaacaaggttgccctcaagggtcccctcgccacccccatcggtaagggccacgtttccatgaacctgactctgcgacgaaccttcaacctgttcgccaacgtccgaccttgcaagtccgtcgtgggctacaagaccccttacgagaacgtcgacaccctgctcatccgagagaacactgagggtgagtactccggtatcgagcacaccgtcgtccccggtgtcgttcagtccatcaagctgatcacccgagaggcttccgagcgagtcatccggtacgcttacgagtacgccctgtcccgaggcatgaagaaggtccttgttgtccacaaggcctctattatgaaggtctccgatggtcttttccttgaggttgctcgagagctcgccaaggagtacccctccattgacctttccgtcgagctgatcgacaacacctgtctgcgaatggtccaggaccccgctctctaccgagatgtcgtcatggtcatgcccaacctttacggtgacattctgtccgatcttgcctccggtcttatcggtggtcttggtctgaccccctccggtaacatgggtgacgaggtctccatcttcgaggccgtccacggatccgctcccgacattgctggcaagggtcttgctaaccccactgctctgctgctctcctccgtgatgatgctgcgacacatgggtctcaacgacaacgccaccaacatcgagcaggccgtctttggcaccattgcttccggccccgagaaccgaaccaaggatcttaagggtaccgccaccacttctcactttgctgagcagattatcaagcgactcaagtag

SEQ ID NO: 37092 - protein, 369 aa, Yarrowia lipolytica CLIB122
MLNLRTALRAVRPVTLTRSYATSVASFTGQKNSNGKYTVSLIEGDGIGTEISKAVKDIYHAAKVPIDWEVVDVTPTLVNGKTTIPDSAIESINRNKVALKGPLATPIGKGHVSMNLTLRRTFNLFANVRPCKSVVGYKTPYENVDTLLIRENTEGEYSGIEHTVVPGVVQSIKLITREASERVIRYAYEYALSRGMKKVLVVHKASIMKVSDGLFLEVARELAKEYPSIDLSVELIDNTCLRMVQDPALYRDVVMVMPNLYGDILSDLASGLIGGLGLTPSGNMGDEVSIFEAVHGSAPDIAGKGLANPTALLLSSVMMLRHMGLNDNATNIEQAVFGTIASGPENRTKDLKGTATTSHFAEQIIKRLK

SEQ ID NO: 37093 - DNA, 1092 bp, Aspergillus nidulans FGSC A4
  CDS (1)..(1092)
atgtttgctgccagaaacttcgctacccctgcccgccaatgcctgcgctcaacgcgtgtggcccccaatcttgcatctactcgtctgcagggaaaatacacggtcactttgatcgagggtgatggcattggacccgagatttcccagtctgtcaaggatatcttctccgccgcaaacgcccctatcaagtgggaatccgttgatgtcacccctattctcaaggatggaaagaccgccatccccgatgctgcgattgacagtgtccgcaagaactacgtcgcgctcaagggtccccttgccactcccgttggaaagggccacgtttccctgaaccttacccttcgtcgtaccttcaacctcttcgccaacctgcgtccttgccggtcggtcgctggttacaagaccccctacgacaatgtcgacaccgtcctgatccgtgagaacaccgagggtgaatactccggaattgagcacgtcgtcgttgacggcgttgtccagagcatcaagctcattactcgggaggcttccgagcgtgttctgcgcttcgctttccagtatgctcgctctatcaacaagaagaaggtccgtgtcgtgcacaaggcgaccatcatgaagatgtccgacggtcttttcctcaacactgcccgtgaagtcgctaaggacttccccgatgtcgagttcgatgcggagctgctggacaactcttgcctgaagatcacgactgaccctaccccctacaacgacaaggtcctcgtcatgcccaacctgtacggtgacattctttccgacatgtgcgccggtctgattggtggtcttggtctgaccccatccggtaacattggtgacgagtgctcgatcttcgaggctgtccacggttctgctcccgacattgctggcaagggtcttgccaaccccactgctctgctcctcagctccatcatgatgctgcagcacatgggtctcaacgagcacgctagccgcatccagaaggccatcttcgacactctcgctgagggcaagactctcactggtgaccttggtggtaaggccaagactcacgagtatgctgacgccatcatcaagcgcctgtaa

SEQ ID NO: 37094 - protein, 363 aa, Aspergillus nidulans FGSC A4
MFAARNFATPARQCLRSTRVAPNLASTRLQGKYTVTLIEGDGIGPEISQSVKDIFSAANAPIKWESVDVTPILKDGKTAIPDAAIDSVRKNYVALKGPLATPVGKGHVSLNLTLRRTFNLFANLRPCRSVAGYKTPYDNVDTVLIRENTEGEYSGIEHVVVDGVVQSIKLITREASERVLRFAFQYARSINKKKVRVVHKATIMKMSDGLFLNTAREVAKDFPDVEFDAELLDNSCLKITTDPTPYNDKVLVMPNLYGDILSDMCAGLIGGLGLTPSGNIGDECSIFEAVHGSAPDIAGKGLANPTALLLSSIMMLQHMGLNEHASRIQKAIFDTLAEGKTLTGDLGGKAKTHEYADAIIKRL

SEQ ID NO: 37095 - DNA, 1083 bp, Aspergillus nidulans FGSC A4
  CDS (1)..(1083)
atggctgctgctaggactcttcgcataggtctcatccccggtgacggtatcggacgggaggtcatcccggccggtagacggatcctggaagctcttccggcctccctgaacctgaaattcaactttgttgacctcgatgccggttacgactgcttcaagcggaccggtaccgctctgcccgacaagaccgtcgaggtcctgaagaaggagtgtgacggtgctctgtttggtgcagtcagctctccctccaccaaggtcgccggctactcctcccccatcgtcgccctccgcaagaagctcgacctctttgcgaatgtccgccctgtcaagaccaccgccggcaccagcgccggcaagcccatcgacctcgtcatcgtccgcgagaacactgaggacctctacgtgaaggaagaaagcaccgaggagacccccaatggcaaggttgcccgcgccatcaagcagatctccgagcgcgcatcctcccgcatcgccaccattgctggtgaaatcgccctgcgccgccaaaacatccgcgatggagccgctgcctcgggcctccgcaccaagcccatggtcactatcactcacaagtccaacgtcctctcccagacggacggtctcttccgtgagactgcccgtgccgcccttgccgcgcagaagttctcctccgtcgaagttgaggagcagattgttgactccatggtctacaagctcttccgccagcctgagtactacgatgttattgttgcgcctaacctctacggtgacatcctgtctgacggtgctgctgccctggttggcagtctgggtctcgtgcctagcgccaacgtcggtgacaactttgccattggtgagccctgccacggtagtgcgcccgatatcgagggcaagaacattgccaatcccattgccactctgcgcagcgttgctctcatgcttgagttcttgggcgaggagcaggccgccgctaaaatctacgctgctgttgacggcaaccttgatgagggcaagtacctgtctcccgacatgggtggcaaggctaccaccaccgaggttttggaagatgtgctcaagagactgtaa

SEQ ID NO: 37096 - protein, 360 aa, Aspergillus nidulans FGSC A4
MAAARTLRIGLIPGDGIGREVIPAGRRILEALPASLNLKFNFVDLDAGYDCFKRTGTALPDKTVEVLKKECDGALFGAVSSPSTKVAGYSSPIVALRKKLDLFANVRPVKTTAGTSAGKPIDLVIVRENTEDLYVKEESTEETPNGKVARAIKQISERASSRIATIAGEIALRRQNIRDGAAASGLRTKPMVTITHKSNVLSQTDGLFRETARAALAAQKFSSVEVEEQIVDSMVYKLFRQPEYYDVIVAPNLYGDILSDGAAALVGSLGLVPSANVGDNFAIGEPCHGSAPDIEGKNIANPIATLRSVALMLEFLGEEQAAAKIYAAVDGNLDEGKYLSPDMGGKATTTEVLEDVLKRL

SEQ ID NO: 37097 - DNA, 1161 bp, Aspergillus nidulans FGSC A4
  CDS (1)..(1161)
atgttcggcaccaggacagttcagcccgcgaagtcgctgttccgacgcgctgctgctcaaccttccatcgtccgctcccccattgcggcaagatcttttgcgacagttcagcaggatatcttcaagccaacgaagtatggtggcaaatacactgtgactcttatcccaggtgacggtatcggtgccgaagttgcggagtcagttaagactatcttcaaagccgacaatgtacccattgagtgggagcaggttgatgtcagtggcgtagacaccggcaacaagcactctgaggaactcttcaaggaatcaattgcttctcttcgacgaaacaagcttggcctgaagggtattctctttaccccagttgagcggtctggccaccagtccttcaacgtcgctcttcgacaggaactcgatatcttcgcttctgtcgtgctcatcaagaacatccccggctataagactcgccatgacaatgttgacctctgcatcatccgtgagaacacagagggtgaatactctggtcttgagcaccagtctgtgcaaggagtcgtcgagtcacttaagattatcactcgcgccaagtccgagcgtatcgctaagtttgcattcagctttgcgcttgccaacaacaggaagaaggtcacttgcatccacaaagctaatatcatgaagcttgcggacggtttgttccgcagcactttccacaagactgccgaaaactacccaaccctggaggttaacgatatgattgtcgacaacgcttctatgcaggctgtctctcgtcctcagcagtttgatgtgatggttatgcccaacctgtacggtggtattctttccaacattggcgctgccctcgttggtggacccggtgttgttcccgggtgcaacatgggacgagatgttgctgtcttcgagcctggctgccgtcacgttggtctcgatatcaaaggcaaggatcaggccaaccccagcgctatgattttgtctggttcgatgcttctccgccatctcggactcgacgaccatgcaaaccgtatttccaaggctgtctatgacgtgattggtgaaggtaaaacgcggactcgtgacatgggcggacaagccaccactcatgagttcactcgtgccgttcttgacaagatggaggctgctctgtaa

SEQ ID NO: 37098 - protein, 386 aa, Aspergillus nidulans FGSC A4
MFGTRTVQPAKSLFRRAAAQPSIVRSPIAARSFATVQQDIFKPTKYGGKYTVTLIPGDGIGAEVAESVKTIFKADNVPIEWEQVDVSGVDTGNKHSEELFKESIASLRRNKLGLKGILFTPVERSGHQSFNVALRQELDIFASVVLIKNIPGYKTRHDNVDLCIIRENTEGEYSGLEHQSVQGVVESLKIITRAKSERIAKFAFSFALANNRKKVTCIHKANIMKLADGLFRSTFHKTAENYPTLEVNDMIVDNASMQAVSRPQQFDVMVMPNLYGGILSNIGAALVGGPGVVPGCNMGRDVAVFEPGCRHVGLDIKGKDQANPSAMILSGSMLLRHLGLDDHANRISKAVYDVIGEGKTRTRDMGGQATTHEFTRAVLDKMEAAL

SEQ ID NO: 37099 - DNA, 1110 bp, Candida albicans SC5314
  CDS (1)..(1110): transl_table=12
atgttcagacaagtgacaaaatcagctccagttatcagaaccacccaaagactttttgctagatcctacattgccggtcaattcaccggtagcaagggatcagacggtaaatatactgttactttgattgaaggtgacggtattgggccagaaatttcccaagccgttaaagatatttacgctgctgctgatgtgccaattcactgggaaccagtcgatgtcactccattgttgattgacggtaagaccaccttgccacaaccagctgttgactccgtcaacaagaacttggttgccttgaaaggtccattagccaccccagttggtaaaggtcacacttccatgaacttgactttgagaagaactttcaacttgtttgccaacgttcgtccatgtaaatccattgttggttacgaaactccctacgaaaatgtcgatacagttttgatcagagaaaacaccgaaggagaatactccggtattgaacatactattgttccaggtgttgtccaatccattaagttgattaccaagccagcttccgaaaaagtcattagatacgcttttgagtacgctaaatctatcaacaaaccacacgttcttgttgtccacaaagcctccattatgaaattgtccgatggtttgtttgtcaacactgctaaagaagttgctcaagaatacccagatgtttctttggactttgaattgttggacaacacttcattaagattaactgccgacccatctcaatacaagaacgttgtcatggttatgccaaacttgtacggtgatatcatgtccgatttgtcctccggtttgattggtggtttgggtttgaccccatccggtaacatgggtaacaaggtttctattttcgaagctgtccatggttctgctccagatattgctggtaaaggtttggccaaccctactgccttattattgtcatcctgtatgatgttgagacatatgtctttgaactccgacgccgacagaattgaaaatgctgtgttgaagactattgcttccggtccagaaaacagaactggtgacttgaaaggtaccgctaccactacacgtttcactgaagaagtcattaaaaacttgtaa

SEQ ID NO: 37100 - protein, 369 aa, Candida albicans SC5314
MFRQVTKSAPVIRTTQRLFARSYIAGQFTGSKGSDGKYTVTLIEGDGIGPEISQAVKDIYAAADVPIHWEPVDVTPLLIDGKTTLPQPAVDSVNKNLVALKGPLATPVGKGHTSMNLTLRRTFNLFANVRPCKSIVGYETPYENVDTVLIRENTEGEYSGIEHTIVPGVVQSIKLITKPASEKVIRYAFEYAKSINKPHVLVVHKASIMKLSDGLFVNTAKEVAQEYPDVSLDFELLDNTSLRLTADPSQYKNVVMVMPNLYGDIMSDLSSGLIGGLGLTPSGNMGNKVSIFEAVHGSAPDIAGKGLANPTALLLSSCMMLRHMSLNSDADRIENAVLKTIASGPENRTGDLKGTATTTRFTEEVIKNL

SEQ ID NO: 37101 - DNA, 1110 bp, Candida albicans SC5314
  CDS (1)..(1110): transl_table=12
atgttcagacaagtgacaaaatcagctccagttatcagaaccacccaaagactttttgctagatcctacattgccggtcaattcaccggtagcaagggatcagacggtaaatatactgttactttgattgaaggtgacggtattgggccagaaatttcccaagccgttaaagatatttacgctgctgctgatgtgccaattcactgggaaccagtcgatgtcactccattgttgattgacggtaagaccaccttgccacaaccagctgttgactccgtcaacaagaacttggttgccttgaaaggtccattagccaccccagttggtaaaggtcacacttccatgaacttgactttgagaagaactttcaacttgtttgccaacgttcgtccatgtaaatccattgttggttacgaaactccctacgaaaatgtcgatacagttttgatcagagaaaacaccgaaggagaatactccggtattgaacatactattgttccaggtgttgtccaatccattaagttgattaccaagccagcttccgaaaaagtcattagatacgcttttgagtacgctaaatctatcaacaaaccacacgttcttgttgtccacaaagcctccattatgaaattgtccgatggtttgtttgtcaacactgctaaagaagttgctcaagaatacccagatgtttctttggactttgaattgttggacaacacttcattaagattaactgccgacccatctcaatacaagaacgttgtcatggttatgccaaacttgtacggtgatatcatgtccgatttgtcctccggtttgattggtggtttgggtttgaccccatccggtaacatgggtaacaaggtttctattttcgaagctgtccatggttctgctccagatattgctggtaaaggtttggccaaccctactgccttattattgtcatcctgtatgatgttgagacatatgtctttgaactccgacgccgacagaattgaaaatgctgtgttgaagactattgcttccggtccagataacagaactggtgacttgaaaggtaccgctaccactacacgtttcactgaagaagtcattaaaaacttgtaa

SEQ ID NO: 37102 - protein, 369 aa, Candida albicans SC5314
MFRQVTKSAPVIRTTQRLFARSYIAGQFTGSKGSDGKYTVTLIEGDGIGPEISQAVKDIYAAADVPIHWEPVDVTPLLIDGKTTLPQPAVDSVNKNLVALKGPLATPVGKGHTSMNLTLRRTFNLFANVRPCKSIVGYETPYENVDTVLIRENTEGEYSGIEHTIVPGVVQSIKLITKPASEKVIRYAFEYAKSINKPHVLVVHKASIMKLSDGLFVNTAKEVAQEYPDVSLDFELLDNTSLRLTADPSQYKNVVMVMPNLYGDIMSDLSSGLIGGLGLTPSGNMGNKVSIFEAVHGSAPDIAGKGLANPTALLLSSCMMLRHMSLNSDADRIENAVLKTIASGPDNRTGDLKGTATTTRFTEEVIKNL

SEQ ID NO: 37103 - DNA, 1131 bp, Candida albicans SC5314
  CDS (1)..(1131): transl_table=12
atgttagctgctagatcttcaattcgtcgttgtttctcaacttcttctactactttaaagtccttgaaaattggtttaattcctggggacgggattggtcgtgaggttatacctgctggtaaggctgttttagaaaacttaccagccaaacacgatttgcaattcgaatttgtcaacttggatgccggtttcgaattgttcaagaaaacaggcacagctttacctgatgaaactgttgatgttttgaaaaaggaatgtgatggtgcattgtttggggctgtttcatcgccaaccactaaagttgctggatactcttccccaattgttgcattgagaaaaaaattgggtttatatgccaatgtcagaccagttaaatctgttgaaggaattggtagaccagttgatatggttattgtacgtgaaaacacagaagatttgtacatcaaggaagaaagagtctacaaaaaggaagatggtacaaaagttgctgaagctattaaaagaattaccgaaactgcttccaccagaattgccaaaatggcatatgaaattgcattacaaagagaagctgttagaaaaggtacatcaggcaagcaactccatgaaaaaccatcagtgactgttacccataaatcaaatgtgttgtcacaatctgatgggttattccgtgaaacttgtcgtgctgtgtatgacgctaatgccaatgaatatggtggaattgaatacaaagagcagattgtcgattccatggtttatcgtatgttcagagaaccagagatctttgatgttgttgttgctccaaacttgtacggtgatattttgagtgatggtgctgctgctttagtcggttctttgggtgttgttccatctgccaatgtcggagacaattttgctattggtgaaccttgtcatggttctgctcctgatattgaaggcaaaggtatttctaacccggttgccactatcagatctactgcgttgatgttggaattcatgggttacccagaagctgctgctactatttatcaagctgttgatgccaacttggcagaagacaagatcaagaccccagatttgggtggtaattctactacccaagaggttatagatgatatcattagaagattctaa

SEQ ID NO: 37104 - protein, 376 aa, Candida albicans SC5314
MLAARSSIRRCFSTSSTTLKSLKIGLIPGDGIGREVIPAGKAVLENLPAKHDLQFEFVNLDAGFELFKKTGTALPDETVDVLKKECDGALFGAVSSPTTKVAGYSSPIVALRKKLGLYANVRPVKSVEGIGRPVDMVIVRENTEDLYIKEERVYKKEDGTKVAEAIKRITETASTRIAKMAYEIALQREAVRKGTSGKQLHEKPSVTVTHKSNVLSQSDGLFRETCRAVYDANANEYGGIEYKEQIVDSMVYRMFREPEIFDVVVAPNLYGDILSDGAAALVGSLGVVPSANVGDNFAIGEPCHGSAPDIEGKGISNPVATIRSTALMLEFMGYPEAAATIYQAVDANLAEDKIKTPDLGGNSTTQEVIDDIIRRF

SEQ ID NO: 37105 - DNA, 1080 bp, Ustilago maydis 521
  CDS (1)..(1080)
atgtcgtgcaagacctacaaaatcgccgtcatccccggcgacggaatcggacaagaggtcatgccatgtggccttcaagctctccgcgccgcctctgcgcgattcaagttcgacctttccatcaccgccttcgattttgcttcgtgtgattactatgataagcacggcaagatgatgccagacaattggatcgagctgcttaccccctttgacgcgatctatttcggcgctgtcggcgatccagcccgtcaccctgaccatgttacgctctggggatcattgctgcagatgagaaggcattttgaccagtacgtcaacttgcgcccttgtagattggtcaaaggcgtacctagtccattggctagtccgggcgagatcgatttttggatcgtgagggagaataccgagggagagtactcggaggtaggaggcaagatttttgagggtacagagagagagacagtgattcaggagaccatcatgactcgtgtaggagtggatcgtatccttgaatacgctttcaaactcgcaaagaccaccaagagaaagagattgacaagtgcgaccaagagcaacggcatcaaaatcaccatgccctactgggacgatcgcttcaagctcatgtccacagcctacccagaagttgcgacagagcagttccacatcgacattcttaccgctcactttgtcgctaagcccagtcactttgatgttgtggtaggatccaacctacatggtgatatcttatccgacctgggccccgccgtaaccggtacgatcggcattgccccttccggcaacatcaatccggaaggaaagttcccaagtctgttcgaacctgtacacggttcagctccagatatcatgggcagaggaatcgcaaatcctgtaggtatgatctgggcaggtcagatgatgttgctgcacctaggcgagaaggaggcagcagagaccatgatcaaggcaatcgattttgtactgggtcaatcagatcagagcatgctgacaccggatatgaagggaagaggtacaacgaaaaagttgggagatgcgattgcggaggctatcgcctcggtatga

SEQ ID NO: 37106 - protein, 359 aa, Ustilago maydis 521
MSCKTYKIAVIPGDGIGQEVMPCGLQALRAASARFKFDLSITAFDFASCDYYDKHGKMMPDNWIELLTPFDAIYFGAVGDPARHPDHVTLWGSLLQMRRHFDQYVNLRPCRLVKGVPSPLASPGEIDFWIVRENTEGEYSEVGGKIFEGTERETVIQETIMTRVGVDRILEYAFKLAKTTKRKRLTSATKSNGIKITMPYWDDRFKLMSTAYPEVATEQFHIDILTAHFVAKPSHFDVVVGSNLHGDILSDLGPAVTGTIGIAPSGNINPEGKFPSLFEPVHGSAPDIMGRGIANPVGMIWAGQMMLLHLGEKEAAETMIKAIDFVLGQSDQSMLTPDMKGRGTTKKLGDAIAEAIASV

SEQ ID NO: 37107 - DNA, 1161 bp, Ustilago maydis 521
  CDS (1)..(1161)
atgttcacggtccctgctttccgatcggccagctcgtcgctggccaagcgccccacgctcgcctcgtcggcgctcaagctcaacaggatgtcggtccgtggcctcgcgatgcctgtcaccaacgcccctacctcggcttacaacaagcaaaagggctccgatggcaagtacacggtcaccttgattcccggtgatggtattggtcccgaggtctcgaatgccgtcaaggagatctaccacgctgctaacgtacccatcaagtgggaggaggtctcggtcgctccgttcatcaaggatggcaagcagaccatccccgaagagtcaatcgtctcgatcaagaagaacacggttgcactcaagggtcccctcgctacgcccatcggcaagggtcacgtctcgctcaacttgacgctccgacgaaccttccatctctttgccaacgtccgaccgtgcaagtcgatcgagggcttcaagaccgcctacgacaacgtcgacactgtgctcatccgtgaaaacaccgagggtgagtactcgggtatcgagcacgaggtcgtcgacggcgtcgtccagtcgattaagctcatcacctacgaggcttcggagcgtgttgcccgctacgctttccaccacgccgaacagaacggccgtaacaaggtgactgctgttcacaaggctcccatcatgcgcatgtcggacggcatgttcctgcacgcctgccgacaggttgccaaggagtatccgcacatcgcctacgacgaggatctgctcgaccgagcctgcctccgtatcgtgcaggaccctgcaccttacgccgaccgcgtcatggtgatgcccaacttgtacggtgacattctctcggacatgtgcgccggtctcattggtggtctcggtctcacgccttccggtaacattggcaaggacgcttcgattttcgaggcagtccacggctctgcccccgacattgctggccaggacaaggcgaaccctactgcgctgttgctctcttcgatcatgatgctccgacacatgagcctgtttgacaaggctgaccagatcgagaatgccatcttcaagaccatcgctgccggcgagcgtaccggggatcttggcggcaagctcggcacccgcgctttcaccgacaagatcatctctcgcttgtaa

SEQ ID NO: 37108 - protein, 386 aa, Ustilago maydis 521
MFTVPAFRSASSSLAKRPTLASSALKLNRMSVRGLAMPVTNAPTSAYNKQKGSDGKYTVTLIPGDGIGPEVSNAVKEIYHAANVPIKWEEVSVAPFIKDGKQTIPEESIVSIKKNTVALKGPLATPIGKGHVSLNLTLRRTFHLFANVRPCKSIEGFKTAYDNVDTVLIRENTEGEYSGIEHEVVDGVVQSIKLITYEASERVARYAFHHAEQNGRNKVTAVHKAPIMRMSDGMFLHACRQVAKEYPHIAYDEDLLDRACLRIVQDPAPYADRVMVMPNLYGDILSDMCAGLIGGLGLTPSGNIGKDASIFEAVHGSAPDIAGQDKANPTALLLSSIMMLRHMSLFDKADQIENAIFKTIAAGERTGDLGGKLGTRAFTDKIISRL

SEQ ID NO: 37109 - DNA, 1164 bp, Ustilago maydis 521
  CDS (1)..(1164)
atgaacgctctccgacagctcaaccgtgctgccgcccctgcgctcaagcaggccaccaagtcgggtctggtgctccccaatgtgcctcagctgctccgaccggccacgacgctcgctgccggcactcccaagatctccaagggacccaccaaatacggcggtgtctacaccgtcactctgatccccggtgatggtgtgggtgtcgagatcaccgactcggtcaaggagatctttgaggtgatgaacgtgcccgtcgagtgggagcagttcaacgtttccggcgagacgcatggctccgagtcgcttttcaaggaggccatggagtcgctcaagcgtaacaaggtcggtctcaagggaatcctcttcacgcctatcgagacgggctcgcacaactcgtggaacgtcgccatgcgccaacagctcgacatttacgcctcgctcgtcatctgcaagtcgctgcccggctaccccacgcgccacaaggacgtcgactttgccatcatccgtgagaacaccgagggcgagtattcgggtctcgagcactcttcttaccccggtgtcgtcgagtcgctcaaggtctcgactcgcgccaaggcggagcgcatctcgcgcttcgctttcgactttgcgctcaagaacggccgcaagagggtcacgtgcgtgcacaaggccaacatcatgaagctcggtgatggtctcttcctcaacaccttccgtcgtgtcgccgaggagtacaagtcgagcggtatcgagtcgaacgacatgattgtcgacaacacatccatgcagctcgtctcgcgtccccagcagtttgacgtcatggtgatgcccaacttgtacggaaacattgtgtccaacattggtgctgcgcttgttggcgggcccggtacggttcccggctgcaacattggccgcgagtttgctctgtacgagcccggttgccgtcacgttgccaaggacatcatgggcaccaacgctgccaaccctgctgccatgatcctgagtgctaccatgatgctccgtcacctcggcctcgacacacaggccaaccagattgccgagtcggtgtacaaggtcatcgctgatggcaaggtgcgcaccgccgacatgggcggcaagtccaagacgcacgagttcacccaggccgtcctctccaacctctga

SEQ ID NO: 37110 - protein, 387 aa, Ustilago maydis 521
MNALRQLNRAAAPALKQATKSGLVLPNVPQLLRPATTLAAGTPKISKGPTKYGGVYTVTLIPGDGVGVEITDSVKEIFEVMNVPVEWEQFNVSGETHGSESLFKEAMESLKRNKVGLKGILFTPIETGSHNSWNVAMRQQLDIYASLVICKSLPGYPTRHKDVDFAIIRENTEGEYSGLEHSSYPGVVESLKVSTRAKAERISRFAFDFALKNGRKRVTCVHKANIMKLGDGLFLNTFRRVAEEYKSSGIESNDMIVDNTSMQLVSRPQQFDVMVMPNLYGNIVSNIGAALVGGPGTVPGCNIGREFALYEPGCRHVAKDIMGTNAANPAAMILSATMMLRHLGLDTQANQIAESVYKVIADGKVRTADMGGKSKTHEFTQAVLSNL

SEQ ID NO: 37111 - DNA, 1134 bp, Ustilago maydis 521
  CDS (1)..(1134)
atgacgtctacagctgccaaaatcctcaagaatgcctcgtccggagtgctgcgtctgggcatgatgcccgccgacggtatcgggcgagaagtgcttccgtgtgcgcagaggattttgcagaacacgcctggtgctcccaagtttgaattcgttcatctcgacgccggattcgagcacttccagaaaactggatctgcactaccagaggagacggtcaaggctctcaagaatgactgtcacggtgccatgttcggatccgtctccagcccgtcgcacaaggttgagggttacagctcgcccatcgtcaagctgaggaaggagctggatctgtatgccaacattcgacccgttgttggcgtcaggggtaccaaggacgatgaaaagttcattgacagcgtcatcattcgtgaaaacacggaatgcttgtacatcaaatcggagacgagcgaatccggtccagatggacaaatcgcccgcgctatccgacagatcaccgagaaagcttctactcgcatcggcaagaaggccttcgaggtggcgcttgctcgcaaggagcttcgcaagacgacgcagccctcgtacgttcccactgtcaccatctgccacaagtccaatgtgctcagtgttaccgacggtctcttccgcacctccgtgcgcggtatctacgagcaggaccagaaggccaacggcggtgctggtcgatacgaggaggtcaagctcaacgagcaactcgtcgactcgatggtgtaccgtctattccgcgaacctgaggtgtttgacgtggttgtggcacctaacttgtacggcgacattgtgtcggacgctgctgctgccctcgtgggctcgttgggtctcgtgccctcagtgaacgctggtgacagctttttcatgggcgaacccgttcacggttcagcaccggacattgccggtcagggcaaagccaacccgatcgcttcgatccgctcggccgcgctcatgctcgagtacatgggttacaccgaacccgccctcaagatctacactgcagtcgaccaggtcatccgcgagggcaagtacctcactcccgaccttggtggctcggctaccaccacccagtgcgaagaagctatcctcaagaagatccaggaagcctaa

SEQ ID NO: 37112 - protein, 377 aa, Ustilago maydis 521
MTSTAAKILKNASSGVLRLGMMPADGIGREVLPCAQRILQNTPGAPKFEFVHLDAGFEHFQKTGSALPEETVKALKNDCHGAMFGSVSSPSHKVEGYSSPIVKLRKELDLYANIRPVVGVRGTKDDEKFIDSVIIRENTECLYIKSETSESGPDGQIARAIRQITEKASTRIGKKAFEVALARKELRKTTQPSYVPTVTICHKSNVLSVTDGLFRTSVRGIYEQDQKANGGAGRYEEVKLNEQLVDSMVYRLFREPEVFDVVVAPNLYGDIVSDAAAALVGSLGLVPSVNAGDSFFMGEPVHGSAPDIAGQGKANPIASIRSAALMLEYMGYTEPALKIYTAVDQVIREGKYLTPDLGGSATTTQCEEAILKKIQEA

SEQ ID NO: 37113 - DNA, 1137 bp, Cryptococcus neoformans var. neoformans B-3501A
  CDS (1)..(1137)
atgctcgccaactctatcaggtcttctgttgccggctctctgaggaacgcttccgccaagcgtgttcctgtcgcccgaaccatggccacccttgtcgacgagaagaggctgccttccaagtttggcggcaagtacactgtcaccctcatccccggtgatggtatcggtcaggaagttgccgactctgtcaaggaggtcttcgacgccctcaaggtgcccgttcaatgggagcagtacaatgtctctggtgagaccactggcggtgaggctctcttccaggaggccatggacagcttgaagaggaacaaggttggattgaagggtattctttacacccccgtcgaccagagcggtcacaactcctggaacgtcgctatgcgacaacaactcgatatctacgcttctgtcgttgtctgcaaatctctgcccggcttggctactcgacattctaacgtcgactttgctattatccgtgagaacactgagggcgagtactctggtcttgagcaccagtctttccccggtgtcgttgagtccttgaaggtctctaccagggccaaggccgagcgaatcgctaggttcgcctttgactttgctcttaagaacaacaggaagaaggtcacctgtgtccacaaggctaacattatgaagctcggtgacggtcttttcctcaacacctgcaagcgagtcgccgagcaggagtatggccacaccggtatcaagtttgagtctatgattgtcgacaacactgctatgcagcttgtctctaagcctcagcaattcgatgttatggttatgcccaacttgtacggtgccatctccacaaacataggttccgccctcgtcggtggtcccggtatcacccctggttgcaactttggccgagaatacgccctcttcgagcctggatgccgacacgtcggtaaggacatcatgggcaccaacaaggccaaccctatcgcgctcatgctctctgctactatgatgctccgacacctcggtctcgagagccaggctaacctcatcgccggtgccacttacgacctcgtcaaggagggcaagatcaggactgctgacattggcggtaacgctaccaccactgacgtcaccaaggctttgatcaacaggcttctctaa

SEQ ID NO: 37114 - protein, 378 aa, Cryptococcus neoformans var. neoformans B-3501A
MLANSIRSSVAGSLRNASAKRVPVARTMATLVDEKRLPSKFGGKYTVTLIPGDGIGQEVADSVKEVFDALKVPVQWEQYNVSGETTGGEALFQEAMDSLKRNKVGLKGILYTPVDQSGHNSWNVAMRQQLDIYASVVVCKSLPGLATRHSNVDFAIIRENTEGEYSGLEHQSFPGVVESLKVSTRAKAERIARFAFDFALKNNRKKVTCVHKANIMKLGDGLFLNTCKRVAEQEYGHTGIKFESMIVDNTAMQLVSKPQQFDVMVMPNLYGAISTNIGSALVGGPGITPGCNFGREYALFEPGCRHVGKDIMGTNKANPIALMLSATMMLRHLGLESQANLIAGATYDLVKEGKIRTADIGGNATTTDVTKALINRLL

SEQ ID NO: 37115 - DNA, 1113 bp, Cryptococcus neoformans var. neoformans B-3501A
  CDS (1)..(1113)
atggccaacatcctcaaacgatcagcccttaagcttggtatgattcccgctgacggaatcggcaaggaagtcctgcccgctgctcaacgtgtcattgaggccctcggatcttctattcctaagaccacctttgttcctctggttgctggttgggaggagtttaacaagaatggcaaggctttgcccgacgacactgttagcgctttgagagaatgtgacggcgcaatgtttggcgccgtgtcttccccatctcacaaggttgctggctattcttctccgatcgttgctcttcgtaagcacctcgacctttacgccaacgtccgccctgtctcttccgtccccatacctggtcaaccttctgcaaaggccgtcgacttggtgattgtacgcgagaacaccgagtgcctttatatcaagcaagaagagatttctggtgaaggcgaggacagggtcgccctcgccacaaggaagattagcgccaaggcatccagcaggattggtagaatggcgtttgaaattgctcttagaaggggacaggagagagaggctgctcgagcggcgggtaaggatgtgtggtggaaaggggaacccaaggtcactatcgtgcataagagcaacgtgctcagcgtcacggacggcttgttccgagagactgttcgggctgtcaaggagggcaagggcggcgagaagtacgctggggtgaagctcgaggagcaaatcgtagactctatggtctacagaatgttcagggagccagaattttttgatgtctgtgttgctcccaacctttatggtgacatcatttctgatggtgcggctgctctcgtcggttcacttggtcttgtcccatctatcaacgctggtgacaactttatcatgggcgagcctgttcacggatctgctcccgatatcgagggcaagaacatcgccaaccccatcgcgtccatccgttctgctgctctcttattgtcttctctcggctacatcgagcccgccgccaagatcaacgctgccgtcaatgccgtcctcgtcgagggccagtacctcactcctgatttgggtggaaagagctctactaccgaggtcactgaggctgttctcaagaggctctag

SEQ ID NO: 37116 - protein, 370 aa, Cryptococcus neoformans var. neoformans B-3501A
MANILKRSALKLGMIPADGIGKEVLPAAQRVIEALGSSIPKTTFVPLVAGWEEFNKNGKALPDDTVSALRECDGAMFGAVSSPSHKVAGYSSPIVALRKHLDLYANVRPVSSVPIPGQPSAKAVDLVIVRENTECLYIKQEEISGEGEDRVALATRKISAKASSRIGRMAFEIALRRGQEREAARAAGKDVWWKGEPKVTIVHKSNVLSVTDGLFRETVRAVKEGKGGEKYAGVKLEEQIVDSMVYRMFREPEFFDVCVAPNLYGDIISDGAAALVGSLGLVPSINAGDNFIMGEPVHGSAPDIEGKNIANPIASIRSAALLLSSLGYIEPAAKINAAVNAVLVEGQYLTPDLGGKSSTTEVTEAVLKRL

SEQ ID NO: 37117 - DNA, 1140 bp, Cryptococcus neoformans var. neoformans B-3501A
  CDS (1)..(1140)
atgttcgcccgatcagcctctaagagtgtcgtctcttctctccgcaccgtccaggcccctgtcggcgtgagatactatgcctctgccttcaactcttctactcccacctctgccttcgctggcaaaaagggtgccgatggcaactacaccgtcacgctcatccccggtgatggtattggccctgaaattgccaacagtgttaaacaaatcttcaaagctgcccaggttcccattgtctgggaagaggttgacgtgactcctatcctcaaggacggtaagaccgtcatccctgacgatgccatcaagagtatcaagaagaataccgttgctcttaagggtcctcttgctacccccatcggcaagggtcacgtttctcttaacctcacactgcgacgaaccttctctctcttcgccaacgtgcgaccttgtgtttctattaagggttacaagactccttacgacaacgtcaatactgttttgataagggagaacaccgaaggagagtactccggtatcgagcacgaaatcgtcgatggtgtcgttcagtctattaagcttatcacccgagaggcctctgagcgtgttgcccgatacgccttccattacgcttctgaaagtggcaggaacaaggttactgccgtccacaaggctaacatcatgaagatgtccgacgggatgttccttactgcctgtagggatgttgccaaggagtaccctaacatttcttacgacgaggatctcctcgaccgagtttgcttgaggattgcttccgatccctctcctttcgccgaccgagttatggtcatgcctaacttgtacggtgacattctttctgacttgtctgccggtcttatcggtggtctcggtcttactccctctggtaacatcggcaaggacgcttccatcttcgaggctgttcacggttctgcacccgacattgaaggcaagggccttgcgaaccccaccgctctcctcctctcctcattgatgatgctccgacacatgagtctttacgagctcgccgacaagatcgagaaggccgctctttccactatcgctgagggcaaggctattacccgagacctcggtggtaaggccggcaccaaggagtacactgacgctatcctctccaagctttaa

SEQ ID NO: 37118 - protein, 379 aa, Cryptococcus neoformans var. neoformans B-3501A
MFARSASKSVVSSLRTVQAPVGVRYYASAFNSSTPTSAFAGKKGADGNYTVTLIPGDGIGPEIANSVKQIFKAAQVPIVWEEVDVTPILKDGKTVIPDDAIKSIKKNTVALKGPLATPIGKGHVSLNLTLRRTFSLFANVRPCVSIKGYKTPYDNVNTVLIRENTEGEYSGIEHEIVDGVVQSIKLITREASERVARYAFHYASESGRNKVTAVHKANIMKMSDGMFLTACRDVAKEYPNISYDEDLLDRVCLRIASDPSPFADRVMVMPNLYGDILSDLSAGLIGGLGLTPSGNIGKDASIFEAVHGSAPDIEGKGLANPTALLLSSLMMLRHMSLYELADKIEKAALSTIAEGKAITRDLGGKAGTKEYTDAILSKL

SEQ ID NO: 37119 - DNA, 1065 bp, Strongylocentrotus purpuratus
  CDS (1)..(1065)
atgagcacagggcctcctccagcatgttacggaggcagacatacagtcactctcatcccaggagatggtattggtccagagctgatgctgcatctcagagaagtcttcagacatgcccatgttcctgtagactttgaagagcacagtctttgtggagagaccaacaaagacagtgaggaggtagaaggtgctatcatggccgtcaagaggaatggggtcgctctcaaaggcaacatccatacagaccttgagaacttgaagcatgtcgctgctaagtctatgaatgtccaactcagagtgggcctggatgtatttgccaatgtgattcgctgtaagtctattcctggggtgaagacaagacatgaggacattgacattgccattatcagggagaacactgaaggagagtactccagtttggaacatgagaatgttgatggagtggtggagagcctgaagatcatcacagaaaaacgatcaatgaggatcgcagagtacgcctttaattatgcaatcaaacatggccgtaagaaggttaccgcaatccacaaggcaaatatcatgaaactaggagatggtctcttcctcaactcctgcagagcggttgcagctagatatccggaaattgagttcaatgaccttattgttgacaactgctgtatgcagttggtatccaaaccccagcagtttgatgtgatggtgatgcctaatctctatggtaatatcatcggtaacattggatgcggactggtgggtggacctggcatagtaccagggcagaatgtaggagaagactatgccatctttgaaactgccaccaggaacaccggaaagactattgcaggccgaaaccttgccaaccccacagcaacactactggctggggcactgctcttagaccatcttggactagatagctatgccaaggccatcaggagagccacaataaggaccctaactgaagaaaggatacacacccccgacctcggaggtcaagcatctaccagtgatgtcgttcagcatgtcatcagtctggttgacaaaacacaattaacatctcaatga

SEQ ID NO: 37120 - protein, 354 aa, Strongylocentrotus purpuratus
MSTGPPPACYGGRHTVTLIPGDGIGPELMLHLREVFRHAHVPVDFEEHSLCGETNKDSEEVEGAIMAVKRNGVALKGNIHTDLENLKHVAAKSMNVQLRVGLDVFANVIRCKSIPGVKTRHEDIDIAIIRENTEGEYSSLEHENVDGVVESLKIITEKRSMRIAEYAFNYAIKHGRKKVTAIHKANIMKLGDGLFLNSCRAVAARYPEIEFNDLIVDNCCMQLVSKPQQFDVMVMPNLYGNIIGNIGCGLVGGPGIVPGQNVGEDYAIFETATRNTGKTIAGRNLANPTATLLAGALLLDHLGLDSYAKAIRRATIRTLTEERIHTPDLGGQASTSDVVQHVISLVDKTQLTSQ

SEQ ID NO: 37121 - DNA, 1083 bp, Tribolium castaneum
  CDS (1)..(1083)
atggcagccagaattttgaaaaacatcactagtgcctccacacgtacagtgggctcccggttttacagcggcgagatcaagaaatgtaccatcattcctggggatggtattgggcccgagatttccgcagcggttcaaaaaattttcgctgccgccaatgttcccattgaatgggaatcggtggatgtcacccctgttaagggccccgatggcaagtttgggatcccccaagctgcgattgactcagtcaacaggaacaaaatagggcttaaaggcccccttatgacgcccgttggcaaaggacacaggtccctcaacttggccctgaggaaagagttcaatctgtatgccaatgtgagaccttgcaggagcttagaaggatataaaacgctatacgaccatgtggacgttgtaacaatcagagaaaacaccgagggtgaatattccggaattgagcacgaaatcgtagacggcgttgtgcaaagcattaaactaattactgaagatgcctcaaggcgtgttgccgaattcgccttccaatacaccaaagacaatggccggcataaagtgaccgcagttcacaaggccaacatcatgcgcatgtccgatgggcttttcttgcggtgttgccgcgaaatggccgagaaataccccgacgtaaaattcgaggaaaaatatctagacaccgtgtgtctcaacatggtgcaagacccaacccagtatgacgttctggtgatgcccaacctttacggagatattctttccgatatgtgtgcgggtcttgtaggtggcttgggcttgacaccatctggcaacattggactgaacggcgcattgtttgaatctgttcatggaactgctcccgatatcgccgggaaagatctcgcaaatcctactgctcttctcttgtcggccgtcatgatgttgagatacatgaacctcaaccaatacgcttcaaagatcgagaatgcgtgctttgagacgatcaaagaagcgaaatatttgacgggtgatttgggcgggaaagccaaatgttcggaatttaccaatgagatttgtgaaaaaattgccgcttcttcgtag

SEQ ID NO: 37122 - protein, 360 aa, Tribolium castaneum
MAARILKNITSASTRTVGSRFYSGEIKKCTIIPGDGIGPEISAAVQKIFAAANVPIEWESVDVTPVKGPDGKFGIPQAAIDSVNRNKIGLKGPLMTPVGKGHRSLNLALRKEFNLYANVRPCRSLEGYKTLYDHVDVVTIRENTEGEYSGIEHEIVDGVVQSIKLITEDASRRVAEFAFQYTKDNGRHKVTAVHKANIMRMSDGLFLRCCREMAEKYPDVKFEEKYLDTVCLNMVQDPTQYDVLVMPNLYGDILSDMCAGLVGGLGLTPSGNIGLNGALFESVHGTAPDIAGKDLANPTALLLSAVMMLRYMNLNQYASKIENACFETIKEAKYLTGDLGGKAKCSEFTNEICEKIAASS

SEQ ID NO: 37123 - DNA, 1425 bp, Prochlorococcus marinus str. NATL1A
  CDS (1)..(1425): transl_table=11
atggcaaattttgaaaagcttactgcaccatcagaaggccaaagaattactttttctgatgggaacccagtagtcccagaccatccaattattccatttatcagaggtgatggaacagggattgatatttggccagctacacaattagtcatcgataaagctattgaaaaagcttatggaaaaaatcgatccattgaatggttcaaaatctatgcaggtgatgaagcttgcgagttatacggaacttatcaatatttaccaaacgataccctcgaagcgatccgaacttacgggatagctatcaaaggacctttaacaactcctgtaggtggtgggattagatctttaaacgtatctctaagacagatttttgatctatattcatgtgttaggccttgcaaatattacgaagggactccaagccctcataaaaagcctcaggatttagatgtaattgtttatagagaaaatactgaagatatttatatgggtattgaatgggaatctgatgatcctgaatgcatcaaattgattgaccaaatcaataatgaaataattccagccagccaaaaactaaaaaacaggaaaattccaagcggatcaggaataggcattaaaccagttagtaaaagtggtagtcaaagacatatcagacgtgcaattaaacatgcactcaccctggaagggagcaaaagacatgtgaccttggttcacaagggaaacatcatgaaattcactgaaggagctttcagagattggggatacgaattagcaaccacagaatttaggaatgaatgcgttaccgagagagaaagttggattttagataatgtagaaaaaaatcctcatatctcctatgaggagaatgctgagttaattgatccaggttattcgtctttaacagaagagaaaaagaaagctatttgtgatgaggtttgttccgttctttcaatcattggcagtagtcatggcagtggtaaatggaaagatatggtgatggttgatgaccgaatagcagatagtatttttcaacaaattcaaactcgtcctcaagagtattccatacttgcaactctcaatcttaatggtgactacatatcggatgcggccgctgcaattgttggtggactggggatggcaccaggtgcaaacattggagataaagcggctattttcgaagccacccatggaacagctcctaaacatgcaggtttggacagaataaatccaggttcagtaatactaagtggagtaatgatgctggaatatttgggttggaatgaggcagcaaaattaattacaaatggattgagcaaatctatttcagacaaacaagttacttacgatctagcacgattaatggaaccacgcgtagagcctcttagttgtagtgattttgcgaactcaattgttgaaagattttaa

SEQ ID NO: 37124 - protein, 474 aa, Prochlorococcus marinus str. NATL1A
MANFEKLTAPSEGQRITFSDGNPVVPDHPIIPFIRGDGTGIDIWPATQLVIDKAIEKAYGKNRSIEWFKIYAGDEACELYGTYQYLPNDTLEAIRTYGIAIKGPLTTPVGGGIRSLNVSLRQIFDLYSCVRPCKYYEGTPSPHKKPQDLDVIVYRENTEDIYMGIEWESDDPECIKLIDQINNEIIPASQKLKNRKIPSGSGIGIKPVSKSGSQRHIRRAIKHALTLEGSKRHVTLVHKGNIMKFTEGAFRDWGYELATTEFRNECVTERESWILDNVEKNPHISYEENAELIDPGYSSLTEEKKKAICDEVCSVLSIIGSSHGSGKWKDMVMVDDRIADSIFQQIQTRPQEYSILATLNLNGDYISDAAAAIVGGLGMAPGANIGDKAAIFEATHGTAPKHAGLDRINPGSVILSGVMMLEYLGWNEAAKLITNGLSKSISDKQVTYDLARLMEPRVEPLSCSDFANSIVERF

SEQ ID NO: 37125 - DNA, 996 bp, Clostridium difficile 630
  CDS (1)..(996): transl_table=11
atgtataaagtgacacttataccaggagatggaataggaccagaagttgcgaaagctatgaaaaaggtagtagaagctactggagtagaaatagaatgggaagaagttaatgcaggagaggcagttattgaagagtatggtactccacttcctgaatatattatagatagtataaaaaagaacaaaatagctataaaaggcccaattactactcctgtaggtaaaggatttaggagtgtaaatgtaactttaagacaggcattagatttgtatgtcaatttaagacctattaaaagttttaaggggataaaatcaagatatgaagatgttgatttagtggttgtaagagaaaatacagaagatttatatgctggaatagaacataaaataggtgattatgcagctgaaagtataaagataataacaagaagtgcaagtgaaagaatcgttgattttgcatgtaactatgttaaagataataagagaaaaaaagttacagctatacataaggcaaatataatgaaaatgtctgatggattgtttttagatgtgtttagagaagttgcatcaaaacatggtgtagaatatgatgatttgattgtagatgcagcagctatgaacttagttttaaatccagaaaattatgatgtaatggtaatgccaaatctttatggagatatactatcagatttaggtgctgggcttgttggaggtttaggtataattccaagtgcaaatattggtaaagattgtgcgatatttgaagctgttcatggaagtgctccacaaatagcaggtcaaaataaggctaatccaacagcacttattcaatcatcagtaatgatgcttagatacttaggtgaatatgaaaatgcacaaaaaatagaaacagctttagaaaaagtatttcttgaaggaagtaaattgactgtagatttgggtggctcagcttctactacagagtttgcggatgaggtgtgtaagtatattgtatag

SEQ ID NO: 37126 - protein, 331 aa, Clostridium difficile 630
MYKVTLIPGDGIGPEVAKAMKKVVEATGVEIEWEEVNAGEAVIEEYGTPLPEYIIDSIKKNKIAIKGPITTPVGKGFRSVNVTLRQALDLYVNLRPIKSFKGIKSRYEDVDLVVVRENTEDLYAGIEHKIGDYAAESIKIITRSASERIVDFACNYVKDNKRKKVTAIHKANIMKMSDGLFLDVFREVASKHGVEYDDLIVDAAAMNLVLNPENYDVMVMPNLYGDILSDLGAGLVGGLGIIPSANIGKDCAIFEAVHGSAPQIAGQNKANPTALIQSSVMMLRYLGEYENAQKIETALEKVFLEGSKLTVDLGGSASTTEFADEVCKYIV

SEQ ID NO: 37127 - DNA, 1257 bp, Burkholderia vietnamiensis G4
  CDS (1)..(1257): transl_table=11
atgccgtatcagcacatcaaggttccggaaggcggtgacaagatcaccgtcaacaaggacttctcgctcaacgtttccgatcagccgatcatcccttacatcgaaggcgacggtaccggcttcgacatcacgccggtgatgatcaaggtcgtcgatgcggcggtcgcgcatacgtacaagggcaagcgcaagatccactggatggagatcttcgccggcgagaaggcgacgaaggtgtacggcccggacgtatggctgcccgacgaaacgctgcaggtgctgaaggaatacgtcgtttcgatcaaggggccgctcacgacgccggtcggcggcggcatccgctcgctgaacgtcgcgctgcgccaggagctcgacctctacgtgtgcctgcgcccgatccagtatttcaagggcgtgccgtcgccggtgcgcgagccgcagaagatcgacatggtgatcttccgcgagaactcggaagacatctacgcgggcatcgagtgggcggccggctccgagcaggcgaagaaggtcatcaagttcctgcaggacgagatgggcgtgaagaagatccgcttcccggaaacctcggggatcggcatcaagcccgtgtcgaccgaaggcaccgagcgtctcgtgcgcaaggcgatccagtatgcgatcgacaacgatcgcaagtcggtcacgctggtgcacaagggcaacatcatgaagttcacggaaggcctgttccgtgacgccggttatgcgctcgcgcagaaggaattcggcggcgagctgatcgacggtggcccgtggatgcgcgtgaagaacccgaagacgggcgccgagatcgtcatcaaggattcgatcgccgacgcgttcctgcagcagatcctgctgcgtccggccgaatacgacgtgatcgccacgctgaacctgaacggcgactacgtctccgacgcactggccgcgcaggtcggcgggatcgggatcgcgccgggtgcgaacctgtcggactcggtcgcgatgttcgaggcgacccacggcacggcgccgaagtacgcgggcaaggactacgtgaaccccggttccgagatcctgtcggccgaaatgatgctgcgccacctcggctggacggaagcggccgacacgatcatcgccgcgatggagaagtcgatcctgcagaagcgcgtcacgtacgacttcgcgcgcctgatggaaggtgcgacgcaggtgtcgtgctcgggcttcggcgacgtgctgatcgagaacatgtaa

SEQ ID NO: 37128 - protein, 418 aa, Burkholderia vietnamiensis G4
MPYQHIKVPEGGDKITVNKDFSLNVSDQPIIPYIEGDGTGFDITPVMIKVVDAAVAHTYKGKRKIHWMEIFAGEKATKVYGPDVWLPDETLQVLKEYVVSIKGPLTTPVGGGIRSLNVALRQELDLYVCLRPIQYFKGVPSPVREPQKIDMVIFRENSEDIYAGIEWAAGSEQAKKVIKFLQDEMGVKKIRFPETSGIGIKPVSTEGTERLVRKAIQYAIDNDRKSVTLVHKGNIMKFTEGLFRDAGYALAQKEFGGELIDGGPWMRVKNPKTGAEIVIKDSIADAFLQQILLRPAEYDVIATLNLNGDYVSDALAAQVGGIGIAPGANLSDSVAMFEATHGTAPKYAGKDYVNPGSEILSAEMMLRHLGWTEAADTIIAAMEKSILQKRVTYDFARLMEGATQVSCSGFGDVLIENM

SEQ ID NO: 37129 - DNA, 1080 bp, Dehalococcoides sp. BAV1
  CDS (1)..(1080): transl_table=11
atgtatcataatgtaacccttatacccggtgacgggattggtcctgaaatatctgaagctacccgtcgggtgctggaagctactggtgttaagtttaactgggaagtggtaaatgccggtgcggacgtggtggctgaatatggcacacccttgccggatatagtgcttgaatccatcaggaaaaataaggttgccataaaagggccggtaaccaccccggttggctcaggcttcagaagcgtaaatgtgggtatgcgtaaagcccttaatctgtatacctgccttcgcccctgtaagacctatcccggtgttccctcccgttatgacaatgtggatatagtcatagtgcgggaaaacatggaagacctgtatgccggtattgagtttgaaaagggcagtgccgaagccctaaggcttattgagtttattaaagaaaataaaaaggtggaaatacggactgattcgggtatcagcataaaaccaatcagtgtgtttggtaccgaacgcatattccgctgggcttttaaatatgccaaagataacaaccgcaaaaaggtaactgctgtccacaaggccaatattatgaagtattcagacgggctgtttctggctgtaggccgcaaagtggcggaggaataccctgaaatagagtttgaagaccggattgtagacaatatgactatgcagctggttaaaacccccacccagtttgatatactggtctgccccaacctgtacggagacatcttatctgatttgtgtgccggactggtgggtggtttgggggttgcaccgggtgccaatatcggtgatgaatacgccctgtttgagcctacccatggttctgcccccaagtacaaggggctgaacaaggtaaatcccatggctatgatgctttcaggtgtgcttatgctccgctatcttaaagaagagaaggctgctgacaagttggaaaatgctattgcggcggttattgccgaaggcaagagtgttacttacgatatgctttctcctgacaaacaggcagtggcagtgggtacttcgcaggtggcagatgccataatagccaaaatgaaataa

SEQ ID NO: 37130 - protein, 359 aa, Dehalococcoides sp. BAV1
MYHNVTLIPGDGIGPEISEATRRVLEATGVKFNWEVVNAGADVVAEYGTPLPDIVLESIRKNKVAIKGPVTTPVGSGFRSVNVGMRKALNLYTCLRPCKTYPGVPSRYDNVDIVIVRENMEDLYAGIEFEKGSAEALRLIEFIKENKKVEIRTDSGISIKPISVFGTERIFRWAFKYAKDNNRKKVTAVHKANIMKYSDGLFLAVGRKVAEEYPEIEFEDRIVDNMTMQLVKTPTQFDILVCPNLYGDILSDLCAGLVGGLGVAPGANIGDEYALFEPTHGSAPKYKGLNKVNPMAMMLSGVLMLRYLKEEKAADKLENAIAAVIAEGKSVTYDMLSPDKQAVAVGTSQVADAIIAKMK

SEQ ID NO: 37131 - DNA, 1491 bp, Thermus thermophilus HB27
  CDS (1)..(1491): transl_table=11
atgcccctgatcaccacggaaaccggcaagaagatgcacgttctcgaggacgggcgcaagctcatcaccgtcatccccggagacggcgtcgggcccgagtgcgtggaggctaccctcaaggtcctagaggcggccaaggcccccctggcctacgaggtgcgagaggcgggggcgagcgtcttccggcggggcatcgcctcgggcgttccccaggagaccattgagtccatccgcaagacccgggtggtcctgaagggtcccctggaaaccccggtgggctacggggagaagagcgccaacgtcaccctaaggaagctctttgagacctacgccaacgtccgccccgtgcgggagttccccaacgtccccaccccctatgcgggccggggcattgacctcgtggtggtgcgggagaacgtggaggacctctacgccgggattgagcacatgcagaccccgagcgtggcccagaccctcaagctcatctcctggaagggatcggagaagatcgtccgcttcgcctttgagctggcccgggccgaggggcggaagaaggtccactgcgccaccaagtccaacatcatgaagctcgccgaagggaccctgaagcgggcctttgagcaggtggcccaggagtaccccgacatagaagcggtccacatcatcgtggacaacgctgcccaccagctggtgaaaaggcccgagcagtttgaggtgatcgtcaccaccaacatgaacggagacatcctctccgacctcacctcggggctcatcgggggcctgggcttcgctccctcggccaacatcggcaacgaggtggccatctttgaggccgtccacggttccgcccccaagtacgccgggaagaacgtcatcaaccccaccgcggtcctcctctcggcggtgatgatgctccgctacctggaggagttcgccacggcggaccttatagagaacgccctcctctacaccctcgaggagggccgggtcctcacgggggacgtggtgggctacgaccggggggccaagaccacggagtacaccgaggccatcatccagaacctgggcaagaccccaaggaagacccaggtgcggggctacaagcccttccgcctgccccaggtggacggggccatcgcccccatcgtccctaggagccgccgggttgtgggggtggacgtcttcgtggaaaccaacctcctgcccgaggccctgggaaaggccctggaggaccttgccgcgggcacccccttccggctcaagatgatctccaaccggggcacccaggtctacccccccaccggcgggctcacggacctggtggaccactaccgctgccgcttcctctacacgggggagggggaggctaaggacccggagatcctggacctcgtaagccgggtggcaagccgcttccgctggatgcacctggagaagctccaggaatttgacggcgagcccggcttcaccaaggcccaaggggaagactaa

SEQ ID NO: 37132 - protein, 496 aa, Thermus thermophilus HB27
MPLITTETGKKMHVLEDGRKLITVIPGDGVGPECVEATLKVLEAAKAPLAYEVREAGASVFRRGIASGVPQETIESIRKTRVVLKGPLETPVGYGEKSANVTLRKLFETYANVRPVREFPNVPTPYAGRGIDLVVVRENVEDLYAGIEHMQTPSVAQTLKLISWKGSEKIVRFAFELARAEGRKKVHCATKSNIMKLAEGTLKRAFEQVAQEYPDIEAVHIIVDNAAHQLVKRPEQFEVIVTTNMNGDILSDLTSGLIGGLGFAPSANIGNEVAIFEAVHGSAPKYAGKNVINPTAVLLSAVMMLRYLEEFATADLIENALLYTLEEGRVLTGDVVGYDRGAKTTEYTEAIIQNLGKTPRKTQVRGYKPFRLPQVDGAIAPIVPRSRRVVGVDVFVETNLLPEALGKALEDLAAGTPFRLKMISNRGTQVYPPTGGLTDLVDHYRCRFLYTGEGEAKDPEILDLVSRVASRFRWMHLEKLQEFDGEPGFTKAQGED

SEQ ID NO: 37133 - DNA, 1179 bp, Picrophilus torridus DSM 9790
  CDS (1)..(1179): transl_table=11
atggacagaataatgtttgaaaatggaagctggatagtaccagaaaagcctgtaattttgtatgcaaatggagacggcataggtcctgagataatggatgcaaccaggaaggttgtggatgctgccacggccatggagaaaaaatccatagcatggaaggagatcctccttggagatagggccgaggaattaaagggcgatagatttccggaggaatcaataaaggcaataaatgattacagggttcttttaaaggcgcctttgaatacacctgttggcaagggctttaaatcgataaatgttagaataaggatgttgcttgatctgtacgcaaacataaggcctgtaaagttcatgccgggtcttgaaagcccattaaaaaatccagaaaaggttaatttaacgatctttagagaaaacactgacgatctttaccttggctatgaatggagctacgacacggatgaggcaaaaaggataagaaaattcctcaaagatgagtttaacatagatataagcgacgactctggtataggcataaagccaatgagcaggtataaaacacagagaataacaaggcttgcggtaaaatatgccatggataacaatcttaaaaagataacaataatgcacaagggaaacgtcatgaagtacacagaaggtgcattcagggagtgggcatatgaaacagcactgaatgaattttctgattacgtatcaagagacgatgataaaaagataataataaacgatataatcgcggataacatgttccagcagataataaccaggccagatgagtatcaattaattcttgcgccaaatgttgacggtgattacatctcggatgcggccggtgccttaataggcaatataggcacgcttggcggtgcaaacatcggcgacaacggtgcaatgttcgaggctgttcatggtacagcgccaaagtacgccggaaagaacgttgcagatccgcttgggctgatacgcggtgcgcagttaatgcttagatacatgggctggaaccgtgcagctgatgcaatagaaaaggcaatacaggcatcaataaacgaaaagaaggttacaaacgatcttgcaaggttctttaacgttgagcctcttggcaccagggaatatggtgattaccttgtagataaaataaaggtattagtttcttaa

SEQ ID NO: 37134 - protein, 392 aa, Picrophilus torridus DSM 9790
MDRIMFENGSWIVPEKPVILYANGDGIGPEIMDATRKVVDAATAMEKKSIAWKEILLGDRAEELKGDRFPEESIKAINDYRVLLKAPLNTPVGKGFKSINVRIRMLLDLYANIRPVKFMPGLESPLKNPEKVNLTIFRENTDDLYLGYEWSYDTDEAKRIRKFLKDEFNIDISDDSGIGIKPMSRYKTQRITRLAVKYAMDNNLKKITIMHKGNVMKYTEGAFREWAYETALNEFSDYVSRDDDKKIIINDIIADNMFQQIITRPDEYQLILAPNVDGDYISDAAGALIGNIGTLGGANIGDNGAMFEAVHGTAPKYAGKNVADPLGLIRGAQLMLRYMGWNRAADAIEKAIQASINEKKVTNDLARFFNVEPLGTREYGDYLVDKIKVLVS

SEQ ID NO: 37135 - DNA, 1311 bp, Acinetobacter sp. ADP1
  CDS (1)..(1311): transl_table=11
atgtcctttgtggcatacatttattcgccagttacaaaagggagtacctgtacaatgggttatcagaagatcgtggtgcctgtcgatggtgacagaataaaagtcaatgcagacctgtcacttaacgttccaaaccatccgatcattcctttcattgagggtgacggtattggtgtggatattacaccagctatgaaggcagtggtagatgctgcgattgtcaaagcttatggcggcaaacgttcgatcgaatggatggaagtatactgcggtgaaaaagcaaatactatctatggcagctatatgcctgaagaaacttttgaagcattacgtgaatttgtcatttcaattaaagggccgcttaccacgccagtgggtggaggtattcgttcactcaacgtggctttacgtcaagaactagatttatatgtttgtgtcagacctgtacgctggtttgaaggtgtaccaagtcctgtacaacaccctgaactcaccgatatggtgatttttcgtgaaaattcagaagatatttatgctggcattgagtggaaagcagattctccagaggcaaaaaaagtcattcagtttttacaagaagaaatgggtgttcaaaaaatccgttttcccgaacactgtgggattggaattaaaccggtctctaaagaaggaacccagcgtctggtacgaaaagcgattcagttcgccatcgataatgataagccaagtgttactttggtacacaaaggcaatattatgaaatataccgaaggtgctttcaaagaatggggttatgagcttgcaatcgagcgttttggaggagagttgatcgatggtgggccatgggttcaaattaaaaaccccaaaacaggcaaggatattgtgattaaagatgtcattgcagacgctttcttgcagcaaattttaatgcgtccagccgattattcagtcattgcaaccctcaatctaaatggtgattatatttcagatgcacttgctgctgaggtgggtggaattgggattgcaccaggtgccaatattggtggtgcaattgctgtttatgaagcaacccatggaacagcaccgaaatatgctgggcaagataaagtaaatccaggctctattattttatcggcagaaatgatgctacgcgatatgggatggacagaagcagctgatctgatcatcaaaggtatatctggtgcgattgaagccaaaacagtgacttacgattttgagcgtttaatgccaggcgcaactctattaacctgttcagagtttgggcaagccatcattaagcatatggatgattaa

SEQ ID NO: 37136 - protein, 436 aa, Acinetobacter sp. ADP1
MSFVAYIYSPVTKGSTCTMGYQKIVVPVDGDRIKVNADLSLNVPNHPIIPFIEGDGIGVDITPAMKAVVDAAIVKAYGGKRSIEWMEVYCGEKANTIYGSYMPEETFEALREFVISIKGPLTTPVGGGIRSLNVALRQELDLYVCVRPVRWFEGVPSPVQHPELTDMVIFRENSEDIYAGIEWKADSPEAKKVIQFLQEEMGVQKIRFPEHCGIGIKPVSKEGTQRLVRKAIQFAIDNDKPSVTLVHKGNIMKYTEGAFKEWGYELAIERFGGELIDGGPWVQIKNPKTGKDIVIKDVIADAFLQQILMRPADYSVIATLNLNGDYISDALAAEVGGIGIAPGANIGGAIAVYEATHGTAPKYAGQDKVNPGSIILSAEMMLRDMGWTEAADLIIKGISGAIEAKTVTYDFERLMPGATLLTCSEFGQAIIKHMDD

SEQ ID NO: 37137 - DNA, 1254 bp, Erwinia carotovora subsp. atroseptica SCRI1043
  CDS (1)..(1254): transl_table=11
atggaaagcaaagtagtggtaccgacagaaggtcagaaaatcacggttgatgctcaaggtaaactggttgttccaaacaatccggttatcccgtttatcgaaggtgatggcattggtatcgatgtaacgccagccatgatcaacgtagtggacgccgccgtgaagaaagcctatcagggcaagcgcgcgatctcctggatggagatctacaccggtgagaaatccacgcaagtttacggtaaagatgtctggctgccagacgaaacgctggatctgatccgtgaatatcgtgtggcgattaagggcccgctgacaacgccagtcggtggtggtattcgttctctgaacgttgcactgcgccaacagttggacctgtatgtttgcctgcgtccggtacgctactacgaaggtacacctagcccggttaaacaacctgaactgaccgacatggtgatcttccgcgaaaacgccgaagacatctatgcaggtattgagtggaaagcgggttctgttgaagcagacaaagtgatcaaattcctgcgtgaagaaatgggtgttagcaaaatccgtttccctgagcagtgtggtatcggcgtgaagccgtgttccgaagaaggtaccaaacgtctggttcgcgctgcgatcgaatacgcgattaccaacgaccgtgattccctcacgttggtacacaaaggcaatatcatgaaattcaccgaaggcgcgtttaaagactggggctaccagttggcgcgtgaagaattcggcggtgagctgatcgatggcggcccgtgggtgaaaatcaagaacccgaacacaggcaaagagatcgttgtaaaagacgtcatcgccgatgcattcctgcaacaaatcctgctgcgtcctgctgaatatgacgtaatcgcctgtatgaacctgaacggtgactacatttctgatgcgctggcagcacaggttggcggtatcggtattgctccgggtgcgaacatcggtgacgaatgtgcactgtttgaagctacgcacggtacggcaccaaaatatgctggtcaggataaagtgaatccaggttccgttattctgtctgctgaaatgatgttacgtcacctgcaatggttcgaagcggctgacctgattgttaaaggcgttgaaggcgcgatcaagaacaagaccgtgacttacgatttcgaacgtctgatggaaggcgctaagctacggaaatgtagtgagtttgcgcaagacatcatcgataacatgtaa

SEQ ID NO: 37138 - protein, 417 aa, Erwinia carotovora subsp. atroseptica SCRI1043
MESKVVVPTEGQKITVDAQGKLVVPNNPVIPFIEGDGIGIDVTPAMINVVDAAVKKAYQGKRAISWMEIYTGEKSTQVYGKDVWLPDETLDLIREYRVAIKGPLTTPVGGGIRSLNVALRQQLDLYVCLRPVRYYEGTPSPVKQPELTDMVIFRENAEDIYAGIEWKAGSVEADKVIKFLREEMGVSKIRFPEQCGIGVKPCSEEGTKRLVRAAIEYAITNDRDSLTLVHKGNIMKFTEGAFKDWGYQLAREEFGGELIDGGPWVKIKNPNTGKEIVVKDVIADAFLQQILLRPAEYDVIACMNLNGDYISDALAAQVGGIGIAPGANIGDECALFEATHGTAPKYAGQDKVNPGSVILSAEMMLRHLQWFEAADLIVKGVEGAIKNKTVTYDFERLMEGAKLRKCSEFAQDIIDNM

SEQ ID NO: 37139 - DNA, 1266 bp, Symbiobacterium thermophilum IAM 14863
  CDS (1)..(1266): transl_table=11
gtggcgaagtttaccaagctgaccccgcccgaaggccagaagatcaccatggagaacggccggttggtggtaccggacaaccccatcatcccgtttatcgagggcgacggcacgggccccgacatctgggcggccgcgcagcccgtgatcgacgccgccgtggagaaggcctacggcggcaggcggaagatcgcctggttcgaggtctacgccggcgagaagtgcctgaacaagttcggcgagtggctgatcgacgacacggtggaggccatccgcgagtaccgggtcgcgatcaaggggcccctcaccacgccggtgggcggcggcatccggtcgctgaacgtcaccctgcggcaggtgctggacctgtacgcctgcgtccggcccgtgcgctggttccccggcgtgcccagcccggtgaaggagccgcacaagaccgacgtggtgatcttccgggagaacaccgaggacatctacgccggcatcgagtggaaggccggcaccccggaggcccgcaaggtccaggccctgctggccgaggagatgggcgtcaagttccccaacagcgacaagagcgacatgatcggcgtgggcatcaagccggtctcggagttcggctccaagcggctggtccgcgcggccatccagtacgccatcgacaacaagcgcaagtccgtcacgctggtccacaagggcaacatccagaagttcaccgagggcgccttccgcgactggggctaccaggtcgcgctggaggagttccgcccgtacgtcatcaccgaggaagagctctggtccgatgagtacaagggcaagatgcccgagggcaagatcctgatccgcgaccgcatcgccgacatcaccttccagcagctgctgctccggcccgaggagtgggacgtgatcgccaccctcaacctgaacggcgactacctctctgaccacgtcgcggctatcgtgggcggcatcggcatcgcccccggcgccaacatctcgtacagcggcggctacggcctgttcgaggccacccacggcaccgcgcccaagtacgccgggctcgacaaggtcaaccccggttcggtcatcctctcgggcgagatgatgctccgctacatgggctggcacgaggcggcggacctgatcatcaagggcctttccgccaccatcgcccagaagacggtcacctacgacttcgcccggctcaccgagggcgcgaccgaggtgaagtgctccgagttcggccggctcatcatcgcgaacatgtag

SEQ ID NO: 37140 - protein, 421 aa, Symbiobacterium thermophilum IAM 14863
MAKFTKLTPPEGQKITMENGRLVVPDNPIIPFIEGDGTGPDIWAAAQPVIDAAVEKAYGGRRKIAWFEVYAGEKCLNKFGEWLIDDTVEAIREYRVAIKGPLTTPVGGGIRSLNVTLRQVLDLYACVRPVRWFPGVPSPVKEPHKTDVVIFRENTEDIYAGIEWKAGTPEARKVQALLAEEMGVKFPNSDKSDMIGVGIKPVSEFGSKRLVRAAIQYAIDNKRKSVTLVHKGNIQKFTEGAFRDWGYQVALEEFRPYVITEEELWSDEYKGKMPEGKILIRDRIADITFQQLLLRPEEWDVIATLNLNGDYLSDHVAAIVGGIGIAPGANISYSGGYGLFEATHGTAPKYAGLDKVNPGSVILSGEMMLRYMGWHEAADLIIKGLSATIAQKTVTYDFARLTEGATEVKCSEFGRLIIANM

SEQ ID NO: 37141 - DNA, 1248 bp, Mannheimia succiniciproducens MBEL55E
  CDS (1)..(1248): transl_table=11
atgcaatcaaaagttaaaattccacaaggtgataaaattcaactcgccgataacggcgcacttatcgtccctcataatcctattattccttttattgaaggcgacggtattggcgttgatgtgacgccggcgatgaaagcggtgattgatgcggcggtggaaaaagcatacggaggtacgcgtaaaatatcatggatggaaatctatgccggcggtaaagcaaatcaggtttatggcgaaaatacctggctgcctgcagaaacgctggagttgatccgtcaatatcatgtggcgattaaaggtccgttaatgacaccggtaggcggcggcattcgttctttaaacgtggcgatgcgccaaggtttggatttgtataactgcttacgtccgattcgttattatgaaggtacgccaagtccggttaaacacccggaatttgtcaatatggttattttccgtgaaaactccgaagatatttatgcgggcgttgaatgggtagccggctccccgggggcggataaactgattaacttcctgcaacgggaaatgggggtgactaaaatccgctttaccgaagattgcggaatcggcattaaaccggtttccaagcagggatcgcaacgtttggtgcgggctgctttacaatatgtaatagataatgaccgcagttcgcttaccttagtacataaaggcaatatcatgaaatttaccgaaggcgctttcaaagaatggggctatcaggttgcaaaagaattcggtgcggaacttattgatcaaggtccgtggatgaaattgaaaaatcctaatacgggcaccgaaattatcattaaagattgcattgccgacgcctttttacaagaagtgttattgcatcctaaagattacgatgtgattgccaccttaaaccttaacggcgattacatttccgacgcattagccgcgcaggttggcggtatcggtatttcaccgggcgccaatatcggtgacgatgcggcaatttttgaggctactcacggcacggcaccgaaaattgccggccaaaataaaggcaacccgggttcattaattcttagcggagaaatgatgctgcgccatttaggctggttggaagccgccgatttagtagtaaacgccgttgccaaaactattgcggacaaaaccgtaacatttgattttgccgaaatgctcgaaggagcgaccttgcgctcaacttccgagtttgccgaagacattattgccaatatgtag

SEQ ID NO: 37142 - protein, 415 aa, Mannheimia succiniciproducens MBEL55E
MQSKVKIPQGDKIQLADNGALIVPHNPIIPFIEGDGIGVDVTPAMKAVIDAAVEKAYGGTRKISWMEIYAGGKANQVYGENTWLPAETLELIRQYHVAIKGPLMTPVGGGIRSLNVAMRQGLDLYNCLRPIRYYEGTPSPVKHPEFVNMVIFRENSEDIYAGVEWVAGSPGADKLINFLQREMGVTKIRFTEDCGIGIKPVSKQGSQRLVRAALQYVIDNDRSSLTLVHKGNIMKFTEGAFKEWGYQVAKEFGAELIDQGPWMKLKNPNTGTEIIIKDCIADAFLQEVLLHPKDYDVIATLNLNGDYISDALAAQVGGIGISPGANIGDDAAIFEATHGTAPKIAGQNKGNPGSLILSGEMMLRHLGWLEAADLVVNAVAKTIADKTVTFDFAEMLEGATLRSTSEFAEDIIANM

SEQ ID NO: 37143 - DNA, 1317 bp, Bacillus licheniformis ATCC 14580
  CDS (1)..(1317): transl_table=11
atgtttttctatattgaagaattacatattatgggaggttttattgtggcacaaggcgaaaaaattacagtctccggcggagtattaaacgttccaaacaacccggtcatcccgtttattgaaggggacggaacaggtcctgatatttggagagcggcttccagggttcttgaagcggctgtggagaaagcgtataacggcgaaaagaaaatcacttggaaagaagtctacgccggggaaaaagcgtacaacaaaaccggcgaatggcttccggaagaaacgcttgatacgatccgcgaatacctgatcgcgattaaaggtcctttaacaactcctgtaggcgggggaatccgctcattaaacgtagcgctcagacaagagcttgacttgtttacatgcctgcgtcctgtccgctatttcacaggcgttccttcaccggttaagcgccctgaagatacggacatggtcatcttccgtgagaatactgaagatatctacgccggcatcgagtacgcgaaaggctctgaagaagtgcaaaagctgatttcattcctgaaaaacgagcttggcgttaacaaaatccgcttccctgaaacatcgggcatcggcatcaagccggtttctgaagaaggaacatcaaggcttgtcagagctgcgatcgagtatgcgatcgagcacggccgcaaatctgtgacgctcgtccataaaggaaacatcatgaaattcacggaaggcgcctttaaaaactggggctatgaagtggctgaaaaagaattcggcgataaagtattcacttgggccgaatacgaccgcatcgctgaaaaagacggcaaagacgctgcaaacaaagcgcaaagcgaagctgaagctgccggcaaaatcatcatcaaagacagcatcgccgacatcttcctgcagcagattctgacacgtcctgccgagtttgacgttgtggcgacaatgaacctgaacggggactacatttcagatgcgctggctgcccaagtcggcggaatcggcatcgcacctggagcaaacatcaactatgagacaggacatgccatctttgaggcgacacatggtacagcgcctaaatacgccggcctcgacaaagtaaacccgtcttcagtcatcctatccggcgtgctgcttcttgagcatttgggctggaatgaggcggccgaccttgtcattaaatcaatggagaaaacaatcgcatccaaagtcgtcacatacgatttcgctcgtttgatggacggcgcgactgaagtcaaatgctctgaattcggtgatgagcttatcaaaaacatgtcttaa

SEQ ID NO: 37144 - protein, 438 aa, Bacillus licheniformis ATCC 14580
MFFYIEELHIMGGFIVAQGEKITVSGGVLNVPNNPVIPFIEGDGTGPDIWRAASRVLEAAVEKAYNGEKKITWKEVYAGEKAYNKTGEWLPEETLDTIREYLIAIKGPLTTPVGGGIRSLNVALRQELDLFTCLRPVRYFTGVPSPVKRPEDTDMVIFRENTEDIYAGIEYAKGSEEVQKLISFLKNELGVNKIRFPETSGIGIKPVSEEGTSRLVRAAIEYAIEHGRKSVTLVHKGNIMKFTEGAFKNWGYEVAEKEFGDKVFTWAEYDRIAEKDGKDAANKAQSEAEAAGKIIIKDSIADIFLQQILTRPAEFDVVATMNLNGDYISDALAAQVGGIGIAPGANINYETGHAIFEATHGTAPKYAGLDKVNPSSVILSGVLLLEHLGWNEAADLVIKSMEKTIASKVVTYDFARLMDGATEVKCSEFGDELIKNMS

SEQ ID NO: 37145 - DNA, 1269 bp, Legionella pneumophila subsp. pneumophila str. Philadelphia 1
  CDS (1)..(1269): transl_table=11
atggagtcgtcaatgacatacgataaaatcaaagtgcctgcccaaggcgaagctattactgttgctgctgaccattcacttcatgttcctgataatccaattattccttttattgagggtgatggtatcggtgttgatgtaacacctccgatgatccgtgttgttgatgctgcagttcaaaaagcatatggcaacaagagaaaaatttcctggatggaggtttatgccggggaaaaggctactaaggtttatggtggcgatcaatggcttcccaaagagactctggatgccatgaaaaaatatgtggtttcaattaaaggtcctttaactactcctgttggtggcggtatacgttcattgaatgtcgctattcgccaagacatggatctctatgtttgtttacgtccaattcgctattttaatggtgttccaagtccggttcgggagccatggaaaaccgatatggtcattttcagggaaaattctgaagatatttatgccggtattgaatggcaggcagataccccggaagctaaaaaagtgattcaatttttaactaaggaaatgggtgttaagaaaattcgttttcctgagcattgtggtataggtgtgaagcctgtttccagagaaggtaccactcgacttgtcaaagcggccattcagtatgcgatagataatgaccgcagtacagtgactttggtacataaaggcaatatcatgaagtttactgaaggggcttttaaagattggggatatcaagttgctcgcgattcttttggagcaaaagaatatcaaggtgggccatggatggaatttaaaaatcctaaaaccggtaagcagattatcattaatgatgtgatcgctgatgcctttttgcaacaaatcctgttaagacctgaagactatagtgtcattgctacattaaatttgaatggtgattatatttctgatgctttggctgctcaggttggtggaataggtatagctcccggagcgaacattagtgatcaaatggctgtgtttgaagcaactcatggaactgcgcctaaatatgctgggcagaataaagtgaaccccggttctattattctttctgccgaaatgatgttacgtcatatggggtggtatgaagcagctgatttgattatcagaggtatggaaggcgcgatagaagccaaaaccgtaacttatgattttgaacgtggtatgcaaggagcaacgttagtcagcagctctggttttgcagatgccatgattaagcatatgtaa

SEQ ID NO: 37146 - protein, 422 aa, Legionella pneumophila subsp. pneumophila str. Philadelphia 1
MESSMTYDKIKVPAQGEAITVAADHSLHVPDNPIIPFIEGDGIGVDVTPPMIRVVDAAVQKAYGNKRKISWMEVYAGEKATKVYGGDQWLPKETLDAMKKYVVSIKGPLTTPVGGGIRSLNVAIRQDMDLYVCLRPIRYFNGVPSPVREPWKTDMVIFRENSEDIYAGIEWQADTPEAKKVIQFLTKEMGVKKIRFPEHCGIGVKPVSREGTTRLVKAAIQYAIDNDRSTVTLVHKGNIMKFTEGAFKDWGYQVARDSFGAKEYQGGPWMEFKNPKTGKQIIINDVIADAFLQQILLRPEDYSVIATLNLNGDYISDALAAQVGGIGIAPGANISDQMAVFEATHGTAPKYAGQNKVNPGSIILSAEMMLRHMGWYEAADLIIRGMEGAIEAKTVTYDFERGMQGATLVSSSGFADAMIKHM

SEQ ID NO: 37147 - DNA, 1023 bp, Methylococcus capsulatus str. Bath
  CDS (1)..(1023): transl_table=11
atgcacaagatcaccctcatccccggcgacggtatcggcccctccatcgtcgacgccgccgtcaaggtcatcgaggccaccggcgtccaggtccaatgggacacccaatccgccggcatggcggcggtcgagaaattcggtaccccgttgccggacgccacgctggattccatccgcgccaaccgcatctgcttcaagggaccgctcaccactcccgtcggcggaggttaccgcagcgtcaacgtcaccctgcgccaagccttcaacctctatgccaacgtccgtccggccatctccttcgagggcaccgacaccgccttcagcgacgtcaacctcgtcaccgtccgcgagaacaccgaaggcttgtacgccggcatcgagcatttcatcaaggtcgacgaggaaaagatcgcggcggaaagcatcgcggtcgtcacccgcaagggctctgagcgcatcatccgctatgccttcgactatgcccgccgcgcccggcgcaagaaggtcaccctggtgcacaaggccaacatcctcaagtgcacctccggcctgttcctggaaatcggtcgcgaaatcgccaaggaatatccggacatcgaattcgacgaccgtatcgtcgatgcctgctcaatgcagatggtcatgcagcctcagcgcttcgacgtgctggtcaccaccaatctgttcggcgatatcctgtcggacctggcggccggcctgatcggcggcctcgggctcacggcgggcgccaacatcggcaccgacgcggcgctgttcgaagccgtgcacggcagcgcgccggacatcgccgacaaaggcatcgccaatcccaccgccatgatcatggccggcgccatgatgctcgaacacatcggcgaaccggacgccgcgcgcaggatcgaacgcgcggtgcgcgaggtgatcgaggacggccgctcggtcacgccggacctggccaaggactccccctgcggcaccgcacagatggccgaagccatcgtcgagcgggtgcgtcaggcgtag

SEQ ID NO: 37148 - protein, 340 aa, Methylococcus capsulatus str. Bath
MHKITLIPGDGIGPSIVDAAVKVIEATGVQVQWDTQSAGMAAVEKFGTPLPDATLDSIRANRICFKGPLTTPVGGGYRSVNVTLRQAFNLYANVRPAISFEGTDTAFSDVNLVTVRENTEGLYAGIEHFIKVDEEKIAAESIAVVTRKGSERIIRYAFDYARRARRKKVTLVHKANILKCTSGLFLEIGREIAKEYPDIEFDDRIVDACSMQMVMQPQRFDVLVTTNLFGDILSDLAAGLIGGLGLTAGANIGTDAALFEAVHGSAPDIADKGIANPTAMIMAGAMMLEHIGEPDAARRIERAVREVIEDGRSVTPDLAKDSPCGTAQMAEAIVERVRQA

SEQ ID NO: 37149 - DNA, 1245 bp, Azoarcus sp. EbN1
  CDS (1)..(1245): transl_table=11
atgagcacatctcacatcacggtcccgaccggcggtcagaaaatcattcctggccagcccatccccgacaatccgatcatcccgttcatcgaaggcgatggcattggtgtagacatcaccccggtgatgatcaaggtcatcgacgcagcagtcgcgaaagcctatggcggcaagagaaaaatccactggatggaagtctatgccggtgagaagtcgactcaggtctacggcccggacgagtggttgtcgaaggaaaccctggacgcgctcaaggaatactcggtgtcgatcaagggtccgatgacgactccggtcggcggcggcatccgctcgctgaacgtcgcgctgcgccaggagctcgacctctaccagtgcgtgcgcccgatccagtacttcaagggcgtgccttcgccgctgaagaacccggaactgaccaacatggtgatcttccgcgagaacacggaggatatctacgccggcatcgaatggcaggcagactccgagcaggccaggaaggtcatcgcgttcctgcagaacgaaatgggcgtcaggaagatccgctttccggcaacgtccgggatcggcatcaagccggtttcggtcgaaggcacgcagcggctggtgcgcgccgcgctcaagtacgtgatcgacaacgaccgcaagtcgctgacgatcgtgcacaagggcaacatcatgaagttcaccgaaggcctgttccgcgacgtggcctacgagctggcgcagaaggaattcggcgcgcagccgatcgacggcggcccgtggtgcaagttcaagaacccgaacaccggtcgcgaaatcgtcgtcaaggactcgatcgccgacgccttcctgcagcagatcctgctgcgtccggccgagtacgacgtgatcgcgacgaccaacctgaacggcgactacatctccgacgcgctggctgcccaggtcggcggcatcggcatcgccccgggcgcgaacatttccgaccagtacgcctgcttcgaggcgacgcacggcacggcgccgaaatacgccggcctcgacaaggtcaatcccggttcgctgatcctgtccgccgagatgatgctgcgtttcatgaagtggacggaagcggctgatctcgtcatcaagggcatggaagccgccatcggcgacaaggtcgtgacctacgacttcgcgcgcctgatggaaggcgcccaggaagtgtcctgctcggcgttcggtgatgcgatgatcgcgcggatgtaa

SEQ ID NO: 37150 - protein, 414 aa, Azoarcus sp. EbN1
MSTSHITVPTGGQKIIPGQPIPDNPIIPFIEGDGIGVDITPVMIKVIDAAVAKAYGGKRKIHWMEVYAGEKSTQVYGPDEWLSKETLDALKEYSVSIKGPMTTPVGGGIRSLNVALRQELDLYQCVRPIQYFKGVPSPLKNPELTNMVIFRENTEDIYAGIEWQADSEQARKVIAFLQNEMGVRKIRFPATSGIGIKPVSVEGTQRLVRAALKYVIDNDRKSLTIVHKGNIMKFTEGLFRDVAYELAQKEFGAQPIDGGPWCKFKNPNTGREIVVKDSIADAFLQQILLRPAEYDVIATTNLNGDYISDALAAQVGGIGIAPGANISDQYACFEATHGTAPKYAGLDKVNPGSLILSAEMMLRFMKWTEAADLVIKGMEAAIGDKVVTYDFARLMEGAQEVSCSAFGDAMIARM

SEQ ID NO: 37151 - DNA, 1266 bp, Bacillus clausii KSM-K16
  CDS (1)..(1266): transl_table=11
atggcagcagaaaaaattcaaactcaaaacggtgttttaaacgttccaaacgagccaatcgttccattcattgaaggcgacggtacaggcccagacatttgggcagcagcttctcgtgttcttgatgctgcagttgagaaagcatacaacggcgagcgcaaaatccactggaaagaaattcttgccggtgaaaaagcgtacaacgaaacaggagaatggcttccagcagaaacgcttgacgctgtccgcgaatatttaattgcgattaaaggacctttaacgacgccaattggcggcggcatccgctcattaaacgtagcgctccgccaagagcttgatttgttcacgtgtctccgtccagtccgttattttacaggagtgccatctccagtgaaacgtcctgaagatacggacatggtcatcttccgggaaaatacagaagacatttatgcagggattgaatttaaagaaggctctgacgaagtgaaaaagctaattgcctttttgcaagatgagcttggtgcaacgaatatccgcttccctgaaacttctggtatcggcgtaaaacctgtatcgaaggaaggaacagagcgcctcgtccgttctgccattcaatatgcgcttgatgaaggccgcaagagcgtgacgcttgtccataaaggcaacatcatgaaatttacagaaggcgcgtttaaaaactggggttacgaattggctgagcgtgagtttggcgataaagtatttacatgggctgagtacgataaaattgtggaagaaagtggccgcgaagctgccgataaagcgcaaagcgaagcagaagctgctggcaaaatcattgtgaaagatgccattgccgacattttcttgcagcaaattttgactcgcccgaaagagtttgatgtggttgcgacgatgaacttaaacggcgattacatttccgatgctcttgctgctcaagtaggcggaatcggcattgctccaggagcaaacatcaactatgatacaggtcatgccatttttgaagcgacacatggcacggcgccaaaatatgcgggactcgacaaagtcaacccttcctcagtcctgttgtcaggagaactgcttttgcgtcaccttggctggacagaagcagcagatttaattatggcgtcaatggacaaaacgattgccagcaaagttgttacttatgattttgcccgcttgatggatggcgcaacagaagtgtcttgctcaggatttgcagatgaattgatcaaaaatctataa

SEQ ID NO: 37152 - protein, 421 aa, Bacillus clausii KSM-K16
MAAEKIQTQNGVLNVPNEPIVPFIEGDGTGPDIWAAASRVLDAAVEKAYNGERKIHWKEILAGEKAYNETGEWLPAETLDAVREYLIAIKGPLTTPIGGGIRSLNVALRQELDLFTCLRPVRYFTGVPSPVKRPEDTDMVIFRENTEDIYAGIEFKEGSDEVKKLIAFLQDELGATNIRFPETSGIGVKPVSKEGTERLVRSAIQYALDEGRKSVTLVHKGNIMKFTEGAFKNWGYELAEREFGDKVFTWAEYDKIVEESGREAADKAQSEAEAAGKIIVKDAIADIFLQQILTRPKEFDVVATMNLNGDYISDALAAQVGGIGIAPGANINYDTGHAIFEATHGTAPKYAGLDKVNPSSVLLSGELLLRHLGWTEAADLIMASMDKTIASKVVTYDFARLMDGATEVSCSGFADELIKNL

SEQ ID NO: 37153 - DNA, 1191 bp, Bacteroides fragilis NCTC 9343
  CDS (1)..(1191): transl_table=11
atgagtaaaattaccaaacagcaaaatggagtattgtcagtgccggatgtaccgacaataccttttataacgggtgatggagtaggagcggaaataactccggccatgcaggcgatagtagatgcggcggtagacatgtcgtatggtggtgtccggcgcatcgaatggaaagaagtactggccggtgaacgtgctttccgggctaccggttcgtggttgccggacgaaacgatggaggttttcaaggagtatctgataggcatcaaaggaccgttgactactccggtaggaggaggaatacgttcgttaaacgtggctttgcgccagacactcgatttatatgtctgcctgcgtccggtacgttggttccgcggagtggtgtctccggtcaaagagcccgaaaaggtgaaaatgtacatctttcgtgagaacacggaagatatctatgccggtatcgaatgggaagcaggcactccggaagctaagaagttctaccggttcttgcacgaagagatgggagtcagtaaagtacgtttccccgaaacctcttcttttggtgtgaaaccggtttcgcgtgaggggacggagcgtctggtacgcgctgcctgccgttatgcgttgcagcatgaattgccctcggtcaccttggtgcacaaaggtaatatcatgaaattcacagaaggaggttttaagaagtgggggtacgaattggctgagcgggagtttgcagatgctcttgcctcaggtaaactggtgatcaaagactgtatagccgatgcctttttgcagaacactcttttgattcctgaagaatattcggtcattgccactctgaatctgaacggagactatatttccgaccaactggctgcgatggtaggtggcattggtattgcaccgggagccaatatcaattatgattccggacacgccatctttgaggccactcatgggacagcccccaatattgccggaaagaatgtggtgaatccctgttcactgatactttcggccgttatgatgcttgaatatataggctggcaagaacccgccgatcttatcgtcgaggcgcttgaagccagttttgccgaggggaaagccactaatgacctggcacgtttcatgcacaaaggccagccgctctctacttcggaatttacccgggaaatcattaaccgaattaaaaattaa

SEQ ID NO: 37154 - protein, 396 aa, Bacteroides fragilis NCTC 9343
MSKITKQQNGVLSVPDVPTIPFITGDGVGAEITPAMQAIVDAAVDMSYGGVRRIEWKEVLAGERAFRATGSWLPDETMEVFKEYLIGIKGPLTTPVGGGIRSLNVALRQTLDLYVCLRPVRWFRGVVSPVKEPEKVKMYIFRENTEDIYAGIEWEAGTPEAKKFYRFLHEEMGVSKVRFPETSSFGVKPVSREGTERLVRAACRYALQHELPSVTLVHKGNIMKFTEGGFKKWGYELAEREFADALASGKLVIKDCIADAFLQNTLLIPEEYSVIATLNLNGDYISDQLAAMVGGIGIAPGANINYDSGHAIFEATHGTAPNIAGKNVVNPCSLILSAVMMLEYIGWQEPADLIVEALEASFAEGKATNDLARFMHKGQPLSTSEFTREIINRIKN

SEQ ID NO: 37155 - DNA, 1257 bp, Pseudomonas fluorescens Pf-5
  CDS (1)..(1257): transl_table=11
atgggatacaagaagattcaggttccagcagtcggcgacaaaatcaccgtcaacgcagaccattctctcaatgttcctaacaacccgattattcctttcatcgaaggcgacggtattggtgttgatatcagcccggtcatgatcaaggttgtcgatgctgcggttaagaaggcttacggcggcgaacgcaagatttcctggatggaagtgtatgccggggaaaaagcgactcaagtgtacgaccaggacacctggcttcctcaggaaaccctggacgcagtgaaggattacgtggtttccatcaagggcccgctgaccactccggtcggtggtggcatccgttccctgaacgtggccctgcgtcagcaactcgatctttatgtatgcctgcgccctgtgcgctggttcgaaggcgtgcccagcccggtgaaaaagccgggtgacgtggacatgaccatcttccgtgaaaactccgaagacatttacgccggcatcgagtggaaagccggctcggcagaagccaccaaggtcatcaagttcctcaaggaggaaatgggtgtcaccaagatccgtttcgacgaaaactgcggcatcggcgtcaagccggtttccctgcagggcaccaagcgtctggcgcgcaaggcgctgcaatatgtagtggataacgaccgcgactcgctgaccatcgtgcacaaaggcaacatcatgaagttcaccgaaggtgccttcaaggaatgggcctacgaagtggcggccgaagagttcggcgcgaccctgctggacggcggtccctggatgcagttcaagaacccgaaaaccggcaagaacgtcatcgtcaaggatgccatcgccgacgccatgctccagcagatcctgctgcgcccggccgaatacgatgtgatcgcgaccctcaacctcaacggtgactacctgtccgacgccctggcggcggaagtgggcggcatcggcattgcgccaggcgccaacctgtccgataccgtggccatgttcgaagccacccacggtaccgcgcccaagtatgccggcaaggaccaggtcaacccgggttcgctgatcctctccgcagagatgatgctgcgccacatgggctggaccgaagcggccgacctgatcatcaagggtaccaatggcgcaatctcggccaagaccgtgacctatgacttcgaacgcctgatggacggtgcaaccctgctgtcttcctcggccttcggcgatgcgctgatctcgcacatgtaa

SEQ ID NO: 37156 - protein, 418 aa, Pseudomonas fluorescens Pf-5
MGYKKIQVPAVGDKITVNADHSLNVPNNPIIPFIEGDGIGVDISPVMIKVVDAAVKKAYGGERKISWMEVYAGEKATQVYDQDTWLPQETLDAVKDYVVSIKGPLTTPVGGGIRSLNVALRQQLDLYVCLRPVRWFEGVPSPVKKPGDVDMTIFRENSEDIYAGIEWKAGSAEATKVIKFLKEEMGVTKIRFDENCGIGVKPVSLQGTKRLARKALQYVVDNDRDSLTIVHKGNIMKFTEGAFKEWAYEVAAEEFGATLLDGGPWMQFKNPKTGKNVIVKDAIADAMLQQILLRPAEYDVIATLNLNGDYLSDALAAEVGGIGIAPGANLSDTVAMFEATHGTAPKYAGKDQVNPGSLILSAEMMLRHMGWTEAADLIIKGTNGAISAKTVTYDFERLMDGATLLSSSAFGDALISHM

SEQ ID NO: 37157 - DNA, 1242 bp, Dechloromonas aromatica RCB
  CDS (1)..(1242): transl_table=11
atgacttctcacatcaaggttccgcaaggtggttcgaaaatcgttccgggtcaggcgattccggataacccgatcatcccgttcatcgaaggcgatggcatcggcatcgacatcacgccggtcatgatcaaggtcatcgatgcggcagttgagaaggcctatggcggcaagaagaaaatccactggatggaagtctatgccggcgaaaagtctacccgcctgtacggttcggacgaatggctgcccaaggaaaccttcgatgccctgaaggaatactccgtctccatcaaggggccgatgacgacgccggttggtggcggcatccgttccctgaacgtggcgctgcgccaggaactggatctctaccagtgcgtccggccggtgcggtatttcaagggcgtgccatccccgctgaagcacccggaactgaccaatatggtcatcttccgcgagaataccgaagacatctacgctggtatcgaatgggcctgtggctctgaaggcgtcaagaaagtcgtcaagttcctgcaggaggaaatgggcgtcaagaaaatccggtttccggagacttccggtattggcatcaagccgatttccatcgaaggaacgtcgcgcctggtccgtgctgcgatcaaatacgccatcgacaatgatcgcaagtcggtgaccatcgtgcacaagggcaatatcatgaagttcacggaagggctgttccgtgatgcctgctacaagctggctcaggatgaattcggggccgaactgatcgacggtggcccgtggtgcaggatcaagaacccgaagaacggtcgtgagatcatcatcaaggattccattgccgatgccttcctgcaacagatcctgctgcgtccggccgagtacgacgtgatcgctactaccaacctgaacggcgactacatctccgatgcgctggcggcccaggtcggtggcatcggtatcgcgccaggggccaacatctccgaccggtacgcctgcttcgaggccacccacggcacggcgccgaagtacgccggcctggacaaggtcaatccgggttccttgatcctctcggccgaaatgatgctgcgccacctcggctggggcgacgccgccaatctggtgctcaaggccatggaagcggcgattggcgacaagcaggtgacctacgacttcgcccgccagatggaaggcgccaacgagttgtcctgctccgaattcggcgatgcgatgattgcccgcatgtaa

SEQ ID NO: 37158 - protein, 413 aa, Dechloromonas aromatica RCB
MTSHIKVPQGGSKIVPGQAIPDNPIIPFIEGDGIGIDITPVMIKVIDAAVEKAYGGKKKIHWMEVYAGEKSTRLYGSDEWLPKETFDALKEYSVSIKGPMTTPVGGGIRSLNVALRQELDLYQCVRPVRYFKGVPSPLKHPELTNMVIFRENTEDIYAGIEWACGSEGVKKVVKFLQEEMGVKKIRFPETSGIGIKPISIEGTSRLVRAAIKYAIDNDRKSVTIVHKGNIMKFTEGLFRDACYKLAQDEFGAELIDGGPWCRIKNPKNGREIIIKDSIADAFLQQILLRPAEYDVIATTNLNGDYISDALAAQVGGIGIAPGANISDRYACFEATHGTAPKYAGLDKVNPGSLILSAEMMLRHLGWGDAANLVLKAMEAAIGDKQVTYDFARQMEGANELSCSEFGDAMIARM

SEQ ID NO: 37159 - DNA, 1251 bp, Ralstonia eutropha JMP134
  CDS (1)..(1251): transl_table=11
atgtaccaacacatcaaggtcccggccggcgagaagatcacggtcaaccaggatttctcgctgaatgtcccggacactccgatcattccttacattgaaggcgatggtacgggcctcgacatcacgcctgtgatgatcaaggtggtggatgccgcggtggaaaaggcctacgccggcaagcgcaagatctcgtggatggaaatctacgccggcgagaagtccaccaaggtctatggcccggacgtgtggctgcctgacgaaaccctggacgtgctcaaggaatacgtcgtctcgatcaagggcccgctgaccacgccggtcggcggcggcatccgctcgctgaacgtggcgctgcgccagcagctcgacctgtacgtgtgcctgcgcccggtgcgctacttcaagggcgtgccttcgccggtgcgcgagccggaaaagaccgacatggtcattttccgcgagaactcggaagacatctacgccgggatcgaatgggaggccgaaagcccgcaggcccagaagctgattgccttcctgcagaacgaaatgggtgtgaagaagatccgcttcccggaaacgtcgggcattggcgtcaagcctgtgtcgaagcagggcacccagcgcctggtgcgcaaggctatccagtacgccatcgataacgacaagccgtcggtcacgctggtgcacaagggcaacatcatgaagttcacggaaggcggtttccgtgactggggctatgagctggcccagaaggaattcggcgccgagctggtcgatggaggcccgtggtgcaagttcaagaactcgaagacgggccgcgacatcgtcatcaaggacgccattgccgacgccttcctgcagcagatcctgctgcgcccggctgagtattcagtgatcgcgacgctgaacctgaacggcgactatatctcggacgcactggcagcacaggtcggtggtatcggcattgcccccggtgcgaacctgtccgactccgtggccatgttcgaagccacgcacggcacggcgccgaagtacgctggcaaggactacgtgaacccgggttcggaaatcctgtcggcagaaatgatgctgcgccacatgggctggaccgaagcggccgacctgatcatcgcctcgatggaaaagtcgatcctgtcgaagaaggtcacttatgacttcgcccgcctgctggaaggtgcgacccaggtgtcgtgctcgggttttggtcaggtgatgatcgaaaacatgtga

SEQ ID NO: 37160 - protein, 416 aa, Ralstonia eutropha JMP134
MYQHIKVPAGEKITVNQDFSLNVPDTPIIPYIEGDGTGLDITPVMIKVVDAAVEKAYAGKRKISWMEIYAGEKSTKVYGPDVWLPDETLDVLKEYVVSIKGPLTTPVGGGIRSLNVALRQQLDLYVCLRPVRYFKGVPSPVREPEKTDMVIFRENSEDIYAGIEWEAESPQAQKLIAFLQNEMGVKKIRFPETSGIGVKPVSKQGTQRLVRKAIQYAIDNDKPSVTLVHKGNIMKFTEGGFRDWGYELAQKEFGAELVDGGPWCKFKNSKTGRDIVIKDAIADAFLQQILLRPAEYSVIATLNLNGDYISDALAAQVGGIGIAPGANLSDSVAMFEATHGTAPKYAGKDYVNPGSEILSAEMMLRHMGWTEAADLIIASMEKSILSKKVTYDFARLLEGATQVSCSGFGQVMIENM

SEQ ID NO: 37161 - DNA, 1242 bp, Thiobacillus denitrificans ATCC 25259
  CDS (1)..(1242): transl_table=11
atgacttatcagcacatccagatccccgctgccggccagaagatcacggtcaacgccgacaacaccctcaacgtgcccgacacgccgatcattcccttcatcgaaggcgacggcacgggcgtcgacatcacgcctgcgatgaagaaggtcgtcgacgcggcggtcgccaaggcctacggcggccggcgccagatcgcctggatggaggtctttgccggcgagaaagccgtcaaggtctacggcggcgaccagtggttgcccgaagaaaccgtttccgccgtcagggactacgtgatttcgatcaagggcccgctgacgacgccgacgtcgggcggcatccgttcgctcaacgtcgcgttgcgccagatcctcgatctctacgtctgcctgcgcccagtgcgctacttcgcgggcgtgcccagcccggtgaaggcgcccgagaaggtcgacatggttatcttccgcgagaacaccgaagacatttacgccggcgtcgaatgggaagccaactccgacgaggcgaagcgcgtcatcaagtacctgcagcggcagatgggcgtgaagaagatccgcttccccgccacctcggcgatcggcatcaagcccgtctcgatcgagggttcggaacggctgatcagaaaagcgatccagtacgcgatcgacaacaagcgccgctcggtgaccctcgtgcacaagggcaacatcatgaagttcaccgaaggcggtttcaagaagtggggctacgaactcgccgcgcgtgagttcggcgccaagctgatcggcgaaggcccgtggatggaattgccgaacggaatcgtgatcaaggacgtgattgccgacgccttcctgcaacagatcctgctgcgccccgacgagtacgacgtgatcgcgacgctgaacctcaacggcgactacatctccgacgcgctggcggcggaagtcggcggcatcggcatcgcgccgggcgcgaacctctcggacaccgtcgcgatgttcgaagccacgcacggcaccgcgccgaagtacgccggcaaggactacgtcaaccccggttcgctgatcctgtcggccgagatgatgctgcgccacctcggctggatcgaagccgccgacctcatcgtcgcgagcatggaaaaggcgatcgcggcgaaggccgtcacctacgacttcgcgcgactcatggaaggcgcgaccgaagtcaagtgctcgcagttcgccgaggcgatggtcgcgaagatgtga

SEQ ID NO: 37162 - protein, 413 aa, Thiobacillus denitrificans ATCC 25259
MTYQHIQIPAAGQKITVNADNTLNVPDTPIIPFIEGDGTGVDITPAMKKVVDAAVAKAYGGRRQIAWMEVFAGEKAVKVYGGDQWLPEETVSAVRDYVISIKGPLTTPTSGGIRSLNVALRQILDLYVCLRPVRYFAGVPSPVKAPEKVDMVIFRENTEDIYAGVEWEANSDEAKRVIKYLQRQMGVKKIRFPATSAIGIKPVSIEGSERLIRKAIQYAIDNKRRSVTLVHKGNIMKFTEGGFKKWGYELAAREFGAKLIGEGPWMELPNGIVIKDVIADAFLQQILLRPDEYDVIATLNLNGDYISDALAAEVGGIGIAPGANLSDTVAMFEATHGTAPKYAGKDYVNPGSLILSAEMMLRHLGWIEAADLIVASMEKAIAAKAVTYDFARLMEGATEVKCSQFAEAMVAKM

SEQ ID NO: 37163 - DNA, 1422 bp, Anabaena variabilis ATCC 29413
  CDS (1)..(1422): transl_table=11
atgtacaacaagattaccccccctacaaccggagaaaaaattaccttcaaaaatggtgagccggttgtgcctgacaatccaattatcccctttattcggggcgatggaacgggaattgatatttggccagctacggaaaaagtactggatgcggcggtagccaaagcctatcaaggtaagcggaaaattagttggtttaagatttacgctggggatgaagcctgtgatttatacgggacttatcagtatttaccagaggataccttaacagccattagggaatatggtgtggcaattaaaggacctttgactactccggtcggtggtggtatccgttccttgaatgtggcactaagacaaatttttgacttatacgcctgtgtacgtccttgccgttattatgcgggtacaccctcacctcacaaaaatcctgaaaagctagatgtcattgtttatcgggaaaacacagaagatatttatctggggattgagtggaaacaaggtagtgaaataggcgatcgcctcatctctatcctcaacaaagaactcatccccgccaccccagaacacggtaaaaagcaaatccccctagatgctgggatagggatcaaacccatcagcaaaactggttcccagcgcctagtacgtcgcgccatcaaacacgcccttacattacccaaacacaagcaacaagtgaccttggtgcataagggtaacatcatgaagtacaccgaaggggctttccgtgattggggttacgaattagccacaagtgagttccgccaagagactgtcaccgaaagggaatcttggattttaagcaacaaggagaaaaacccgaatatatccttggaagacaacgcccgtcaaattgaccctggttttgatgccctgaccccagagaaaaaagcgcaaattgtcaaggaagtagaaacagttcttaactcaatttgggaaacccacggtaacgggaagtggaaagagaaagtgttagtaaatgaccggattgctgacagtatctttcaacaaatccaaaccagaccagatgagtattcgattctggcgacaatgaacttaaacggcgattacttgtctgatgcggcggctgctattgtcggcggcttaggaatggggccaggggcaaatattggcgattcctgcgccgtgtttgaagctacccacggtacagcacccaaacacgccggcttagacagaattaacccaggttcagtcatcttatctggggtgatgatgttggagtatttgggttggcaagaagccgcagacctaattaagaaaggtttaagtgatgcgatcgctaatagccaagtcacctacgatttagctagattactcgaaccaccagttgaacccctaaaatgttctgaatttgccgacgcaattatcaaacatttcggttaa

SEQ ID NO: 37164 - protein, 473 aa, Anabaena variabilis ATCC 29413
MYNKITPPTTGEKITFKNGEPVVPDNPIIPFIRGDGTGIDIWPATEKVLDAAVAKAYQGKRKISWFKIYAGDEACDLYGTYQYLPEDTLTAIREYGVAIKGPLTTPVGGGIRSLNVALRQIFDLYACVRPCRYYAGTPSPHKNPEKLDVIVYRENTEDIYLGIEWKQGSEIGDRLISILNKELIPATPEHGKKQIPLDAGIGIKPISKTGSQRLVRRAIKHALTLPKHKQQVTLVHKGNIMKYTEGAFRDWGYELATSEFRQETVTERESWILSNKEKNPNISLEDNARQIDPGFDALTPEKKAQIVKEVETVLNSIWETHGNGKWKEKVLVNDRIADSIFQQIQTRPDEYSILATMNLNGDYLSDAAAAIVGGLGMGPGANIGDSCAVFEATHGTAPKHAGLDRINPGSVILSGVMMLEYLGWQEAADLIKKGLSDAIANSQVTYDLARLLEPPVEPLKCSEFADAIIKHFG

SEQ ID NO: 37165 - DNA, 1257 bp, Pseudomonas fluorescens PfO-1
  CDS (1)..(1257): transl_table=11
atgggttacaagaagattcaggttccagccgtcggcgacaaaatcaccgtcaacgcagaccattctctcaatgtccctgataacccgatcattcccttcatcgaaggtgacggcattggcgtcgacgtcagccctgtgatgatcaaagtggttgatgctgccgtagagaaagcctacgggggtaagcgcaagatttcctggatggaggtttatgctggcgaaaaagcaactcaggtctatgaccaggacacctggctgccccaggaaaccctggacgcggtcaaggattacgtggtctccatcaaaggcccgctgaccactccggtcggtggcggcatccgttccctcaacgtcgccctgcgccaacagctcgatctctatgtctgccttcgccctgtggtgtggttcgaaggtgtgccgagcccggtgaaaaagcctggcgacgtcgacatggtgatcttccgcgagaactccgaagacatttatgccggtatcgaatggaaagccggctcccctgaggccaccaaggtcatcaaattcctgaaagaagaaatgggcgtcaccaagatccgtttcgaccaggattgcggcatcggcatcaagccggtttccaaagaaggcaccaagcgtctggtgcgcaaggcgctgcaatacgtggtggacaacgaccgcaagtcgctgaccatcgtgcacaagggcaacatcatgaaattcaccgaaggtgccttcaaggactggggctacgaggtggcgaaggaagaattcggcgccgagctgctcgatggcggcccatggatgaaattcaagaacccgaaaaccggccgcgaagtcgtcgtcaaggacgccatcgccgacgccatgctccagcagatcctgctgcgtccggccgaatacgatgtgatcgccaccctcaacctcaacggtgactacctgtccgacgccctggcggcggaagtgggcggtatcggtatcgcgccgggtgccaacctgtccgacaccgtagccatgttcgaggcgacccacggtactgcgccgaaatatgccggcaaggaccaggtcaacccgggttcggtgattttgtcggcggaaatgatgctgcgccacctgggctggaccgaggcggccgacctgatcatcaagggcaccaatggcgccatcaaggccaagaccgtgacctacgacttcgaacgtctgatggaaggcgccacactggtgtcttcttcgggcttcggtgaagcgctgatcaagcacatgtaa

SEQ ID NO: 37166 - protein, 418 aa, Pseudomonas fluorescens PfO-1
MGYKKIQVPAVGDKITVNADHSLNVPDNPIIPFIEGDGIGVDVSPVMIKVVDAAVEKAYGGKRKISWMEVYAGEKATQVYDQDTWLPQETLDAVKDYVVSIKGPLTTPVGGGIRSLNVALRQQLDLYVCLRPVVWFEGVPSPVKKPGDVDMVIFRENSEDIYAGIEWKAGSPEATKVIKFLKEEMGVTKIRFDQDCGIGIKPVSKEGTKRLVRKALQYVVDNDRKSLTIVHKGNIMKFTEGAFKDWGYEVAKEEFGAELLDGGPWMKFKNPKTGREVVVKDAIADAMLQQILLRPAEYDVIATLNLNGDYLSDALAAEVGGIGIAPGANLSDTVAMFEATHGTAPKYAGKDQVNPGSVILSAEMMLRHLGWTEAADLIIKGTNGAIKAKTVTYDFERLMEGATLVSSSGFGEALIKHM

SEQ ID NO: 37167 - DNA, 999 bp, Carboxydothermus hydrogenoformans Z-2901
  CDS (1)..(999): transl_table=11
atggcgcatagagttacattgattcccggagacggaattggtccagaaattgttgaagcagcccggcgggtaattgatgccagcggagcgaatattgaatgggaagtggtggaagccggagaaaaggtaatggccgagtacggtactccgttgcccgagtatgttttggaatctatcaaaaaaaataaagttgctttaaaaggcccgatgaccacacctatcggcacgggatttcgcagcgttaatgttgccttaagaaaagccctggatttatatgccaatgtccggccggcaaaatctttaccgggtgtggttacccgttatgaaaatattgatttaattacggtccgggaaaataccgaagacttatatgccggagttgagcatatggtaggtgatgatgcggcggaaagcatcaaaattattacccggaaagcttcccaaaggattgtccggtttgctttcgaactggcccgcaaagaggggcgaaaaaaggttaccgccgttcataaagccaatatcatgaagtataccgatggcttatttttagcggtggcccgggaagtggccgcggagtatcccgatattgagtttgaggatatgattgttgacgctatggccatgaagttggttcaaactccggaaaaatttgatgtgatggtgatgcccaatctttacggtgatattttgtcggacctctgcgcgggtttggtaggtggccttggagtggcaccgggagccaatatcggtgacgaatatgcagtttttgagccggtgcacggaagtgccccaaagcatgccggccaaaaccgggtaaaccccctggcggagattttatcgggggtgatgatgttaaaacacctgggagaaatggatgctgccgccaaaatcgagcgggctttaaccaaggttcttcccaataaggacatggttacctatgatttaggcgggactgcaaaaacttcagaaatggccgattatattataaaacatttataa

SEQ ID NO: 37168 - protein, 332 aa, Carboxydothermus hydrogenoformans Z-2901
MAHRVTLIPGDGIGPEIVEAARRVIDASGANIEWEVVEAGEKVMAEYGTPLPEYVLESIKKNKVALKGPMTTPIGTGFRSVNVALRKALDLYANVRPAKSLPGVVTRYENIDLITVRENTEDLYAGVEHMVGDDAAESIKIITRKASQRIVRFAFELARKEGRKKVTAVHKANIMKYTDGLFLAVAREVAAEYPDIEFEDMIVDAMAMKLVQTPEKFDVMVMPNLYGDILSDLCAGLVGGLGVAPGANIGDEYAVFEPVHGSAPKHAGQNRVNPLAEILSGVMMLKHLGEMDAAAKIERALTKVLPNKDMVTYDLGGTAKTSEMADYIIKHL

SEQ ID NO: 37169 - DNA, 1425 bp, Prochlorococcus marinus str. MIT 9312
  CDS (1)..(1425): transl_table=11
atgccaaaatttgaaaaattaaatttacctaatcaaggagaaataataactttcaaacacggcaagcctaatgttcctaataatccaattgttccatttattaggggtgatggaactggagttgatatatggccagcaacacaaattgttcttgatgcagcgattaaaaaaagctatggagatgaaagaaaaattaattggtttaaagtctatgcaggagatgaagcttgtgaactttatggaacatataactatctcccccaagatactattgaagcaattaaacacttcggtgtagccatcaagggtcctttaacaactcccatcggaggaggcattagatcacttaatgttgcattaagacaaatctttgatttatatagctgtgttagaccatgcagatattattcaggaactccaagccctcacaaaaaccctcaaaatctggacgttattgtttatagagaaaatactgaggacatctacatggggatcgaatgggaagccgaagatcataattgtcttgaattaattaatcacttaaataacgttgtaataccaagtagtaataatttaaaaaataggtcaattccaaaagggtctggaataggaataaaaccagttagtaaatttggtagccaaagacatattagaaaagctattgagcatgcaaaaaaattatcaggagataaaaggcatgtgactctcgtacataaaggcaatatcatgaaatataccgaaggtgcatttagagattggggatatgaattagcagtaaatgaatttagagaagattgcattacagaaagagaaagctggattttagataatattcagaaaaatccagaaattacaattgaaaataatgctcgtaaaattgaaccaggttttgacaagcttaccaataacaaaaaagcattcatttgcgaagaaattaaagaagttattgcatcaatatcaaatactcatggagatgggaaatggcgagaacttattcttgttgatgatcggatagctgacagtatatttcaacaaattcaaactcgacctcaagaatattcaattcttgcaacattaaacctgaatggagactatgtttctgatgcagctgctgcaattgttggtgggctaggtatggctcctggagcgaatattggagataatgcagcaattttcgaagctacgcatggtactgcgccaaaacatgcaggcttaaataagattaatccaggctcagtcattctaagtggtgtaatgatgcttgaatattttggttggaatgaagcagctaacttaattactaatggtttaagtaaggcaatagagcaaaaaaaagtcacctatgatctagcacgtttaatggaacctaaagtagaacccttatcctgcagcagttttgctgaagaaattatctcaaatttctaa

SEQ ID NO: 37170 - protein, 474 aa, Prochlorococcus marinus str. MIT 9312
MPKFEKLNLPNQGEIITFKHGKPNVPNNPIVPFIRGDGTGVDIWPATQIVLDAAIKKSYGDERKINWFKVYAGDEACELYGTYNYLPQDTIEAIKHFGVAIKGPLTTPIGGGIRSLNVALRQIFDLYSCVRPCRYYSGTPSPHKNPQNLDVIVYRENTEDIYMGIEWEAEDHNCLELINHLNNVVIPSSNNLKNRSIPKGSGIGIKPVSKFGSQRHIRKAIEHAKKLSGDKRHVTLVHKGNIMKYTEGAFRDWGYELAVNEFREDCITERESWILDNIQKNPEITIENNARKIEPGFDKLTNNKKAFICEEIKEVIASISNTHGDGKWRELILVDDRIADSIFQQIQTRPQEYSILATLNLNGDYVSDAAAAIVGGLGMAPGANIGDNAAIFEATHGTAPKHAGLNKINPGSVILSGVMMLEYFGWNEAANLITNGLSKAIEQKKVTYDLARLMEPKVEPLSCSSFAEEIISNF

SEQ ID NO: 37171 - DNA, 1428 bp, Synechococcus elongatus PCC 7942
  CDS (1)..(1428): transl_table=11
atgtacgagaagattcaaccccctagcgaaggcagcaaaattcgctttgaagccggcaagccgatcgttcccgacaacccgatcattcccttcattcgtggtgacggcactggcgttgatatctggcccgcaactgagcgcgttctcgatgccgctgtcgctaaagcctatggcggtcagcgcaaaatcacttggttcaaagtctacgcgggtgatgaagcctgcgacctctacggcacctaccaatatctgcctgaagatacgctgacagcgatccgcgagtacggcgtggcaatcaaaggcccgctgacgacgccgatcggtggtggcattcgatcgctgaacgtggcgctacggcaaatcttcgatctctatgcctgcgtccgcccctgtcgctactacaccggcacaccctcgccccaccgcacgcccgaacaactcgatgtggtggtctaccgcgaaaacaccgaggatatctacctcggcatcgaatggaagcaaggtgatcccaccggcgatcgcctgatcaagctgctgaacgaggacttcattcccaacagccccagcttgggtaaaaagcaaatccgtttggattccggcattggtattaagccgatcagtaaaacgggtagccagcgtctgattcgtcgtgcgatcgagcatgccctacgcctcgaaggccgcaagcgacatgtcacccttgtccacaagggcaacatcatgaagttcacggaaggtgctttccgggactggggctatgaactggccacgactgagttccgaaccgactgtgtgactgaacgggagagctggattcttgccaaccaagaaagcaagccggatctcagcttggaagacaatgcgcggctcatcgaacctggctacgacgcgatgacgcccgaaaagcaggcagcagtggtggctgaagtgaaagctgtgctcgacagcatcggcgccacccacggcaacggtcagtggaagtctaaggtgctggttgacgatcgcattgctgacagcatcttccagcagattcaaacccgcccgggtgaatactcggtgctggcgacgatgaacctcaatggcgactacatctctgatgcagcggcggcggtggtcggtggcctgggcatggcccccggtgccaacattggcgacgaagcggcgatctttgaagcgacccacggcacagcgcccaagcacgctggcctcgatcgcattaaccccggctcggtcatcctctccggcgtgatgatgctggagtacctaggctggcaagaggctgctgacttgatcaccaagggcatcagccaagcgatcgctaaccgtgaggtcacctacgatctggctcggttgatggaaccggcggttgatcaaccactcaagtgctcggaatttgccgaagccatcgtcaagcatttcgacgattag

SEQ ID NO: 37172 - protein, 475 aa, Synechococcus elongatus PCC 7942
MYEKIQPPSEGSKIRFEAGKPIVPDNPIIPFIRGDGTGVDIWPATERVLDAAVAKAYGGQRKITWFKVYAGDEACDLYGTYQYLPEDTLTAIREYGVAIKGPLTTPIGGGIRSLNVALRQIFDLYACVRPCRYYTGTPSPHRTPEQLDVVVYRENTEDIYLGIEWKQGDPTGDRLIKLLNEDFIPNSPSLGKKQIRLDSGIGIKPISKTGSQRLIRRAIEHALRLEGRKRHVTLVHKGNIMKFTEGAFRDWGYELATTEFRTDCVTERESWILANQESKPDLSLEDNARLIEPGYDAMTPEKQAAVVAEVKAVLDSIGATHGNGQWKSKVLVDDRIADSIFQQIQTRPGEYSVLATMNLNGDYISDAAAAVVGGLGMAPGANIGDEAAIFEATHGTAPKHAGLDRINPGSVILSGVMMLEYLGWQEAADLITKGISQAIANREVTYDLARLMEPAVDQPLKCSEFAEAIVKHFDD

SEQ ID NO: 37173 - DNA, 1011 bp, Moorella thermoacetica ATCC 39073
  CDS (1)..(1011): transl_table=11
ttgttgaaacatgtagttactctgattcccggggatggtaccggcccggagttaatcgccgccgccaggcgggtcctggaagccagcggtgcggaactggaatgggaggttatggcagccggggagggcgcccaggagaaatacggcagcgtgttgccagaagagaccctggcttcaatccgtaaaaatggcgtcgcccttaaaggccctatcaccaccccggtgggcaccggcttccggagcgtcaatgtggccctgcggaaagagctggatctctatgccaatgtccggcccttccgcaacttgcccaatgtcccctcacgctatcagggtgttgacctggtgatctaccgggagaacaccgaggacctctatgccggggttgaacatatggtgggtgaagatgcggctgaaagcattaagattattaccaggaagggctccgaacgtatcgcccgggcagcctttgaatacgcccggcgccagggccggaaacgggtgacagccggccacaaggccaatattatgaagttcagcgacggtcttttcctgcggaccttctacgacgtagccagggattatccggaaataacggctgatgaccgtattgtggacaacctgagcatgcagctggtccagaagccggagcaatatgatgtcctggtactgcccaacctttacggcgatatcctctccgacctctgcgccggcctggtgggcggcctgggagtggcccctggagccaatatcggggagaaggcagccgtctttgaaccaatccacggcagcgcacccaagtatgccggccagaataaggtaaatcccctggccactatcctctccggggttatgatgctggaacacctgggcgagaaggaagcagcagccaggatccagcgcgctatcctggcggtcctggcagaaggcaagtacttgacctacgatctgggcggcagtgccggtacgagcgatatggccgacgccatcgtcaggcgactggaagtagaataa

SEQ ID NO: 37174 - protein, 336 aa, Moorella thermoacetica ATCC 39073
MLKHVVTLIPGDGTGPELIAAARRVLEASGAELEWEVMAAGEGAQEKYGSVLPEETLASIRKNGVALKGPITTPVGTGFRSVNVALRKELDLYANVRPFRNLPNVPSRYQGVDLVIYRENTEDLYAGVEHMVGEDAAESIKIITRKGSERIARAAFEYARRQGRKRVTAGHKANIMKFSDGLFLRTFYDVARDYPEITADDRIVDNLSMQLVQKPEQYDVLVLPNLYGDILSDLCAGLVGGLGVAPGANIGEKAAVFEPIHGSAPKYAGQNKVNPLATILSGVMMLEHLGEKEAAARIQRAILAVLAEGKYLTYDLGGSAGTSDMADAIVRRLEVE

SEQ ID NO: 37175 - DNA, 1260 bp, Burkholderia thailandensis E264
  CDS (1)..(1260): transl_table=11
atgccgtatcagcacatcaaggttccggaaggcggtgacaagatcaccgtcaacaaggatttctcgctcaacgtttccgatcagccgatcattccctacatcgagggcgacggcacgggcttcgatatcacgccggtgatgatcaaggtcgtcgacgcggcggtcgagaaggcgtacggcggcaagaagaagatccactggatggagatctacgccggcgagaaggcgacgaaggtctacggtccggacgtgtggctgccggaagagacgctgcaggtgctgaaggagtacgtcgtgtcgatcaaggggccgctcacgaccccggtcggcggcggcatccgttcgctgaacgtcgcgctgcgccaggagctcgacctgtacgtctgcctgcgcccgattcagtacttcaagggcgttccctcgcccgtgcgcgagccggagaagaccaacatggtgatcttccgcgagaactcggaagacatctacgccggcatcgaatgggcggccgaatccgagcaggcgaagaaggtcatcaagttcctgcaggaagagatgggcgtgaagaagatccgcttcccggaaacgtcgggcatcggcatcaagcccgtgtcgaaggaaggcaccgagcgcctcgtgcgcaaggcgatccagtacgcgatcgacaacgaccgcaagtcggtcacgctcgtccacaagggcaacatcatgaagttcacggaaggcacgttccgtgacgccggctatgcgctcgcccagaaggagttcggcgcggtgctgatcgacggcggcccgtggatgaagttcaagaacccgaagacgggcaacgagatcgtgatcaaggattcgatcgccgatgcgttcctgcagcagatcctgctgcgcccggccgagtacgacgtgatcgcgacgctgaacctgaacggcgactacatctcggacgcgcttgccgcgcaagtcggcggcatcggcatcgcgccgggcgcgaacctgtcggattcggtcgcgatgttcgaagcgacgcacggcacggcgccgaagtacgcaggcaaggactacgtgaacccgggttcggaaatcctgtccgccgaaatgatgctgcgccacctcggctggaccgaagcggccgacgtcatcatcgccgcgatggaaaagtcgatcaagcagaagcgcgtcacgtacgacttcgcgcgcctgatggaaggcgcgacgcaagtgtcgtgctcgggcttcggtcaggtgctgatcgaaaacatgcagtaa

SEQ ID NO: 37176 - protein, 419 aa, Burkholderia thailandensis E264
MPYQHIKVPEGGDKITVNKDFSLNVSDQPIIPYIEGDGTGFDITPVMIKVVDAAVEKAYGGKKKIHWMEIYAGEKATKVYGPDVWLPEETLQVLKEYVVSIKGPLTTPVGGGIRSLNVALRQELDLYVCLRPIQYFKGVPSPVREPEKTNMVIFRENSEDIYAGIEWAAESEQAKKVIKFLQEEMGVKKIRFPETSGIGIKPVSKEGTERLVRKAIQYAIDNDRKSVTLVHKGNIMKFTEGTFRDAGYALAQKEFGAVLIDGGPWMKFKNPKTGNEIVIKDSIADAFLQQILLRPAEYDVIATLNLNGDYISDALAAQVGGIGIAPGANLSDSVAMFEATHGTAPKYAGKDYVNPGSEILSAEMMLRHLGWTEAADVIIAAMEKSIKQKRVTYDFARLMEGATQVSCSGFGQVLIENMQ

SEQ ID NO: 37177 - DNA, 1242 bp, Methylobacillus flagellatus KT
  CDS (1)..(1242): transl_table=11
atgtctacaaaaatcaaagtacccactactggcgagaaaatcagcgttaatgcggacaactcgctcaatgtgcccgatcacccgattatcccatttatcgaaggcgacggtatcggcgtcgatatcaccccacccatgcgccatgtcgtcgacagcgccgtcgccaaggcctatggcggcaaacgcgccattgcctggatggaggtatatgccggcgaaaaagccgtgaagacctatggtgacaacacctggctacccgatgaaacactcaaggccgtcaaagattatgtcatttccatcaagggaccgctgaccactcccgtaggcggtggcatccgctcgctcaacgtgaccttgcgccaggaactcgacctgtatgtctgcctgcgtccgatccagtattttcaaggcgtgcccagcccggtcaagcatcctgaaaaaaccaacatggtgattttccgcgagaataccgaggacatctatgccggtatcgaatgggctgccggtaccgacgaggtgaaaaaggtggtggacttcctcagtgacatgggtgtgcgcaagaagatacgcttcccagaagcttccgccatcggcatcaagccggtgtcaatcgacggcagcaagcgcctggtgcgcaaggcgatccagtacgccatcgacaacaaccgcaagtccgtaaccattgcccacaagggcaacatcatgaagttcaccgaaggcggatttaagacttggggttacgaagtcgccaaggaagagttcggtgcagtggaaattgacggcgggccgtggtgcaagctgcccaatggcatcatcatcaaggactgcatcgccgatgccttcctgcaggaaatcctgctgcaccctgcagactacgacgtagtggccaccctaaacctgaacggcgactatatctcagatgcgctcgcagcccaggtaggtggtatcggcattgcgcccggtgccaatatctcggataccgtggccatgttcgaggccacccacggtacggctcccaagatcgcgggcaaggatatcgccaatccaagttcgctgatcctgtcagccgagatgatgttgcgccacctgggatggactgaggccgccgacctggtcattaacggtgtggccaaggcgatccaggcaaagcgtgttacccatgacttctcatcacaaatggaaggcgccacgcaagtcggcagtgcagaattcggtgcggagatcgtcaagcacatgtcatga

SEQ ID NO: 37178 - protein, 413 aa, Methylobacillus flagellatus KT
MSTKIKVPTTGEKISVNADNSLNVPDHPIIPFIEGDGIGVDITPPMRHVVDSAVAKAYGGKRAIAWMEVYAGEKAVKTYGDNTWLPDETLKAVKDYVISIKGPLTTPVGGGIRSLNVTLRQELDLYVCLRPIQYFQGVPSPVKHPEKTNMVIFRENTEDIYAGIEWAAGTDEVKKVVDFLSDMGVRKKIRFPEASAIGIKPVSIDGSKRLVRKAIQYAIDNNRKSVTIAHKGNIMKFTEGGFKTWGYEVAKEEFGAVEIDGGPWCKLPNGIIIKDCIADAFLQEILLHPADYDVVATLNLNGDYISDALAAQVGGIGIAPGANISDTVAMFEATHGTAPKIAGKDIANPSSLILSAEMMLRHLGWTEAADLVINGVAKAIQAKRVTHDFSSQMEGATQVGSAEFGAEIVKHMS

SEQ ID NO: 37179 - DNA, 1035 bp, Burkholderia xenovorans LB400
  CDS (1)..(1035): transl_table=11
atgaatgcgaaggcgcgtgagtcgattcccgccaccctgattccgggcgacgggatcggcccggaggtgacgcaggcgacggtcagggtgctcgaagcgctgggtgccccattcaagtgggacatccaacaggcgggcatggccggcatcgacgaatgtggcgatgcgctgccgcaagcgacgctggacagcatccgcgaaacgaagctggcgctcaaggggccgctgacgacgccgattggcgggggcttccgctccgccaatgtgcgcctgcgcgaagcgttcgaactccacgcgaacatccggccggtgcgcacgatcgtgcccggccgctacgacgatatcgatatcgtgctggtgcgcgaaaacattcaggggctctacgtcgcgcacgagcattacattccgatcggcgacgatccgcgcgccgtggccgtgctgaccggcatgaacacccgcgaagggggccgccgcattgcgcgctgcgcattcgactatgcgctcaggcacggccgcaggaagatcaccgtggtgcacaaagccaatgtactgaaggcgcttaccggcattttcctggaggcggctcgcgaggttgccgccgactacgcaggacgggtcgcgctcgacgaccgcatcgttgatgcctgtgcgatgcagttggtgctcaatccctggcagttcgacatgctgctctgcacgaacctgttcggcgacattctctccgaccagcttgccggcctggtcggcgggttggggctcgcgcccggcgccaatatcggcaaggacacggcgctgttcgaagcggtgcacggatccgctcccgatatcgccggtcgcggcatcgccaaccccgtctcacaactgctggcggcaggcctgatgctggaccacgtggggctcgacgaggacgcgaagcgcctgaggcgggcgatcgccgataccctcaacgaggacaaggtgcgcactcccgatctgggcggtcaggcgaccacgcgcacgttcaccgacgcgctgatcgaacggctcggccattga

SEQ ID NO: 37180 - protein, 344 aa, Burkholderia xenovorans LB400
MNAKARESIPATLIPGDGIGPEVTQATVRVLEALGAPFKWDIQQAGMAGIDECGDALPQATLDSIRETKLALKGPLTTPIGGGFRSANVRLREAFELHANIRPVRTIVPGRYDDIDIVLVRENIQGLYVAHEHYIPIGDDPRAVAVLTGMNTREGGRRIARCAFDYALRHGRRKITVVHKANVLKALTGIFLEAAREVAADYAGRVALDDRIVDACAMQLVLNPWQFDMLLCTNLFGDILSDQLAGLVGGLGLAPGANIGKDTALFEAVHGSAPDIAGRGIANPVSQLLAAGLMLDHVGLDEDAKRLRRAIADTLNEDKVRTPDLGGQATTRTFTDALIERLGH

SEQ ID NO: 37181 - DNA, 1257 bp, Burkholderia xenovorans LB400
  CDS (1)..(1257): transl_table=11
atgccgtatcagcacatcaaggttccgaccggtggtgacaagatcaccgtcaatcccgatttctcgctcaacgtgtcggaccagccgatcattccgtacatcgaaggcgacggcaccggcatcgacatcacgccggtcatgatcaaggtcgtggatgccgctgtggaaaaagcgtatgcaggcaagcgaaaaatccactggatggaaatctacgccggcgagaaatccaccaaggtgtacggcccggatgtgtggctgcccgaagagacgctgcaggtgctcaaggaatatgtcgtctcgatcaagggcccgctcaccacgccggtgggcggcggcatccgttcgctgaacgtcgcgttgcgccaggaactggatctgtatgtgtgcttgcggccggtgcagtatttcaagggcgtgccttcgccggtgcgcgagccggagaaaaccaacatggtgatcttccgcgagaactcggaagacatctacgcgggtatcgagtggccggccgaatcggagcaggcgaaaaaaatcatcaggttcctgcgcgaagaaatgggcgtgaagaagatccgtttcccggaaacgtcggggatcggcatcaagccggtgtcgcgtgaaggaacggagcgtctggtgcgcaaggcgatccagtacgcgatcgaccacgatcgccgttcggtcacgctggtgcacaagggcaacatcatgaagttcaccgaaggcgcgttccgcgactacggttacgcgctggcgcaaaaggaattcgccgcggaactgatcgacggcggcccgtggatgaagatcaagaatccgaaaacgggcggcgacgtcgtcctcaaggacgtgatcgccgacgcgttcctgcagcagatcctgctgcgtccggctgaatacgacgtgatcgccacgctgaacctgaatggcgactacgtatcggatgcgttggccgcgcaggtcggcggtattggtatcgcaccgggcgcgaatatgtcggattcagtcgcgatgttcgaagccacgcacggcaccgcgccgaaatacgccggcaaggactacgtgaatccgggctcggaaattctctcggcagaaatgatgctgcgccatctcggctggaccgaggcggcggatctgatcatcaagtcgatggaaaaatcgattctgcaaaaacgcgtcacatacgatttcgcgcgcttgatggaaggcgcgactcaggtgtcgtgttccggatttggtcaggtgctgatcgaaaatctgtaa

SEQ ID NO: 37182 - protein, 418 aa, Burkholderia xenovorans LB400
MPYQHIKVPTGGDKITVNPDFSLNVSDQPIIPYIEGDGTGIDITPVMIKVVDAAVEKAYAGKRKIHWMEIYAGEKSTKVYGPDVWLPEETLQVLKEYVVSIKGPLTTPVGGGIRSLNVALRQELDLYVCLRPVQYFKGVPSPVREPEKTNMVIFRENSEDIYAGIEWPAESEQAKKIIRFLREEMGVKKIRFPETSGIGIKPVSREGTERLVRKAIQYAIDHDRRSVTLVHKGNIMKFTEGAFRDYGYALAQKEFAAELIDGGPWMKIKNPKTGGDVVLKDVIADAFLQQILLRPAEYDVIATLNLNGDYVSDALAAQVGGIGIAPGANMSDSVAMFEATHGTAPKYAGKDYVNPGSEILSAEMMLRHLGWTEAADLIIKSMEKSILQKRVTYDFARLMEGATQVSCSGFGQVLIENL

SEQ ID NO: 37183 - DNA, 1251 bp, Ralstonia metallidurans CH34
  CDS (1)..(1251): transl_table=11
atgtatcagcacatcaaggtgccggcaggcgagaagatcaaggtcaacgccgatctttcgctgaacgtgccggataatccgatcattccctacatcgaaggtgacggcacgggtgtcgatatcaccccggtgatgctgaaagtggtggatgccgccgtggccaaggcgtatggcggcaagcgcaagatctcgtggatggagatctacgcgggcgagaagtcgaccaaggtctatggcccggatgtgtggctgccggaagagaccatggaagtggtcaaggaatacgtggtgtcgatcaagggcccgctgaccacgccggtcggtggtggcatccgctcgctgaacgtggcactgcgtcagcagctcgatctctatgtctgcttgcgcccggtgcgttatttcaaaggcgtgccgtccccggtgcgcgagcccgagaagaccgacatggtgatcttccgcgagaactcggaagacatctatgccggcatcgagtgggaagccgaaagcgaaggcgcgaagaagctgatcgccttcctgcagaacgaaatgggcgtgaagaagatccgcttcccggaaacgtccggcatcggcatcaagcccgtctcgaaggaaggcacgcagcgcctggtgcgcaaggcgctccagtacgcgatcgacaacgacaagccgtcggtgacgctcgtgcacaagggcaacatcatgaagttcaccgaaggcggcttccgcgactggggctatgaactcgcgcagcaggaatttggcgcggaactggtcgatggcggcccgtggtgcaagttcaagaatccgaagactggccgcgatatcgtcgtcaaggacgctatcgccgacgcattcctgcagcagattctgctgcgtccagctgaatattcggtgatcgccacgctgaacctgaacggtgactacatctccgacgccctggccgcccaggtgggtggcatcggcatcgcaccgggcgcgaacatgtccgattcggtcgccatgttcgaagccacgcacggcaccgcgccgaagtatgcaggcaaggactacgtgaatccaggttcggaaatcctctccgcggaaatgatgctgcgccacatgggctggaccgaagcggccgacctgatcatccgctcgatggagaagtcgatccagtcgaagaaggtcacgtacgacttcgcccggctgctagaaggtgcgacgcaggtgtcgtgctcggggtttggtcaggtgatgatcgacaatatgtaa

SEQ ID NO: 37184 - protein, 416 aa, Ralstonia metallidurans CH34
MYQHIKVPAGEKIKVNADLSLNVPDNPIIPYIEGDGTGVDITPVMLKVVDAAVAKAYGGKRKISWMEIYAGEKSTKVYGPDVWLPEETMEVVKEYVVSIKGPLTTPVGGGIRSLNVALRQQLDLYVCLRPVRYFKGVPSPVREPEKTDMVIFRENSEDIYAGIEWEAESEGAKKLIAFLQNEMGVKKIRFPETSGIGIKPVSKEGTQRLVRKALQYAIDNDKPSVTLVHKGNIMKFTEGGFRDWGYELAQQEFGAELVDGGPWCKFKNPKTGRDIVVKDAIADAFLQQILLRPAEYSVIATLNLNGDYISDALAAQVGGIGIAPGANMSDSVAMFEATHGTAPKYAGKDYVNPGSEILSAEMMLRHMGWTEAADLIIRSMEKSIQSKKVTYDFARLLEGATQVSCSGFGQVMIDNM

SEQ ID NO: 37185 - DNA, 1446 bp, Acidobacteria bacterium Ellin345
  CDS (1)..(1446): transl_table=11
atgtcttataacgggctcccactgcctactgacggcgaaaagatcactttcaaagatggccgcttcgcaattcctaacaatccaatcattccttacatcgaaggcgatggcacgggccgcgatatttggaaggcttccgttcgggtcttcgacgccgctgtgcaaaaggcctatggcggtaagcgcaaagtcgcatggtacgaagtgttcgccggcgagaaggcaaaagagaaattcaatacctggctgcccgacgacaccgtgagtgccttccgcgagctgcgggttggcatcaaggggccgttgactacgccgattggcggcggaatccgttccctcaacgtcacgctgcggcaggtgctcgatctgtattcctgcgtgcgtccggtgaagtactaccagggcatcccttcgccggtgaagcatcccgagcgcatggacatcgtgattttccgcgagaacaccgaagacgtatacgcgggcatcgagtggaagcagggaactgacaaagcgaagaagatcatcgacttcatcaacaaggaaatgctcgcaggcacgaacaagagcatccgcgaagatagcggcatcggtattaagccgatctcggtcacgggcacaaagcgcctggtgaagatgtcgatcgagcacgcgctgaagaccggacggaagtcagtcacgttggtgcataaaggcaacatccagaagttcaccgaaggcgcgttccgtgagtggggctacgaagtggccacgcaggagttccgcgcgcagtgcgtgaccgaacgcgagagctggatcctcgacaacaaggacaagaatcccaacctctcgatcgaagagaacgcgcacatggtcgaacccggcatcgacttcgcgcccgacgatttcaagcagggcgtgtatgcggaagtgaagcaggtgctggacgcaatctatgccagccacggcgatcgccgctggaagagcatgctgatgatcaatgaccgcattgcggactcgatcttccagcagatcgtgacgcgtccggaagaatacagcgtgctggcaacaccgaacctcaacggcgattacatctccgatgcctgcgcagcgcaggtcggcggactcggcatcgcaccgggtgcgaacatcgggcgcgaacacgcgatcttcgaagcgacgcacggcacagcgccgaagtacgccgataaggacgtcatcaacccgggctcagtcattctctcgggcgtgatgatgttcgacttcctcggttgggaagaggcggcacggctcatcgaagactcgatggagcagacaattcaaaagaagacggtgacctacgacttcgagcgcctgatggaaggcgcaaagaaggtgaccaccagtggctttgccaacttgatcatcggcaaaatggaacaccacggcgcgacggacggaaaccatcatcaacacgcggcacacgagtaa

SEQ ID NO: 37186 - protein, 481 aa, Acidobacteria bacterium Ellin345
MSYNGLPLPTDGEKITFKDGRFAIPNNPIIPYIEGDGTGRDIWKASVRVFDAAVQKAYGGKRKVAWYEVFAGEKAKEKFNTWLPDDTVSAFRELRVGIKGPLTTPIGGGIRSLNVTLRQVLDLYSCVRPVKYYQGIPSPVKHPERMDIVIFRENTEDVYAGIEWKQGTDKAKKIIDFINKEMLAGTNKSIREDSGIGIKPISVTGTKRLVKMSIEHALKTGRKSVTLVHKGNIQKFTEGAFREWGYEVATQEFRAQCVTERESWILDNKDKNPNLSIEENAHMVEPGIDFAPDDFKQGVYAEVKQVLDAIYASHGDRRWKSMLMINDRIADSIFQQIVTRPEEYSVLATPNLNGDYISDACAAQVGGLGIAPGANIGREHAIFEATHGTAPKYADKDVINPGSVILSGVMMFDFLGWEEAARLIEDSMEQTIQKKTVTYDFERLMEGAKKVTTSGFANLIIGKMEHHGATDGNHHQHAAHE

SEQ ID NO: 37187 - DNA, 1299 bp, Myxococcus xanthus DK 1622
  CDS (1)..(1299): transl_table=11
atggcgcccccgtcatccggagaaaagatctccctgcagagcggcaagctgtccgtcccggacaacccgatcatccccttcatcgagggcgatggcaccggccgcgacatctggcgtgcgtcccaggcggtgttcgacgccgcggtggagaaggcctacaagggcaagaagaagatcgcctggtacgaagtcctggccggcgagaagtccttcaaggcggtcaacaactggctgcccgaggagacggtcgaggcgttccgcacctatctggtgggcatcaagggccccctgacgacgccggtgggcggcggcatccggtcgctgaacgtggccctgcggcagatgctggacctgtacgtctgcctgcgccccgtgcgctacttcaagggcgtgcccagcccggtgaagatgccggacaaggtcgacatgaccatcttccgtgagaacacggaagacatctacgcgggcatcgagttcgaggccggcacggccgccgcggagaagttcctgggcctgctgaagcaggagttcccgaaggagttcgggaagatccgcttcccgtccgacgtgggcctgggcatcaagccggtgtcccacgagggcagcgaccggctgatccgcgccgccatccagtacgccgtggaccacaagcgcaagagcgtcacgctggtccacaagggcaacatcatgaagttcaccgagggcgccttccgcaagtggggctacgagctggccgcccgggagttcggtgacaaggtctacacctgggaccagtgggaggccaccaaggccgccaagggcgaggacgccgccaacgcggagcagaaggccgcgctggccgccgggaagatcctgatcaaggactccatcgcggacatcaccctgcagcaggtcctcacccgtccggatgagttcgacgtcatcgccacgctgaacctcaacggtgactacctgtcggacgcgctggcggcgcaggtgggcggcatcggcatcgcgccgggcggcaacatcaactacgtcacgggccacgcggtgttcgaggccacgcacggcacggcgcccaagtacgccgaccaggacaaggtgaacccgggctcggtcatcctctccggtgagatgatgttccggcacctgggctggtacgaggcggccgacctgatgatccagggcatggaccgcgccatcgccagcaagacggtgacctacgacttcgcccgcctgatgaagcaggaagggcagagcggcgtctccgaggtcaagtgctccgagttcgggcaggccatcatcaagaacatgtag

SEQ ID NO: 37188 - protein, 432 aa, Myxococcus xanthus DK 1622
MAPPSSGEKISLQSGKLSVPDNPIIPFIEGDGTGRDIWRASQAVFDAAVEKAYKGKKKIAWYEVLAGEKSFKAVNNWLPEETVEAFRTYLVGIKGPLTTPVGGGIRSLNVALRQMLDLYVCLRPVRYFKGVPSPVKMPDKVDMTIFRENTEDIYAGIEFEAGTAAAEKFLGLLKQEFPKEFGKIRFPSDVGLGIKPVSHEGSDRLIRAAIQYAVDHKRKSVTLVHKGNIMKFTEGAFRKWGYELAAREFGDKVYTWDQWEATKAAKGEDAANAEQKAALAAGKILIKDSIADITLQQVLTRPDEFDVIATLNLNGDYLSDALAAQVGGIGIAPGGNINYVTGHAVFEATHGTAPKYADQDKVNPGSVILSGEMMFRHLGWYEAADLMIQGMDRAIASKTVTYDFARLMKQEGQSGVSEVKCSEFGQAIIKNM

SEQ ID NO: 37189 - DNA, 1005 bp, Myxococcus xanthus DK 1622
  CDS (1)..(1005): transl_table=11
atggcgaccacacgaactgtcacgatcatcaatggcgatggcattggccccgaagtcatggcggccaccgttcgcgtcctcgaggcgctcaaggtcccccttgatttcgagtacaaggacgcaggcacggaggtggtggccaagtacggcaccaacctgcctcacgagacggtggaggcggtgctgcgcagcggcatcgcgctcaagggccccacgggcacggtggtgggcggtggcctcccgtcggccaacgtgggcctgcgcaagcggctggacctgtactcgtcgctgcggcccgtgaagagcgtaccgaacgtgaagacgcgctacgagggcgtggacctcgtcgtggtgcgtgagaacacggagagtctctacgccggcctggagcacatcatcgtcccgggcgtggtggagtcgctgaagatcatcaccgagaaggcctccacgcggattgcccgcttcgccttcgagtacgcccgcaagcacggccgcaagaaggtcaccgccgtgcacaaggcgaacatcatgaagctgtcggacggtctcttcctggactgctgccgcaaggtgggccgtgagttcccggacgtcacctacgaggaagtcatcatcgacaacctcgccatgcagctcgtgaaggacccgacgcgcttcgacgtgctggtggcggagaacttctacggcgacgtgctcagcgacctgtgcgcgggcctggtcggcggcctgggcgtggtgccgggcgccaacatcggcgagcgcaccgccgtcttcgaggccgtgcacggcaccgccccggacatcgcgggcaagggcatcgcgaaccccaccgccctgatgatgtccgcggtgatgatgctggaccacctggagctgggcgaggcggcgcgccgcatggagaacgccatctggaaggtgtacggctcgggcgaggtccgcaccggtgacctcggtggcaaggccaccacccgcgagttcaccgacgccatcatcggcgcgctgtag

SEQ ID NO: 37190 - protein, 334 aa, Myxococcus xanthus DK 1622
MATTRTVTIINGDGIGPEVMAATVRVLEALKVPLDFEYKDAGTEVVAKYGTNLPHETVEAVLRSGIALKGPTGTVVGGGLPSANVGLRKRLDLYSSLRPVKSVPNVKTRYEGVDLVVVRENTESLYAGLEHIIVPGVVESLKIITEKASTRIARFAFEYARKHGRKKVTAVHKANIMKLSDGLFLDCCRKVGREFPDVTYEEVIIDNLAMQLVKDPTRFDVLVAENFYGDVLSDLCAGLVGGLGVVPGANIGERTAVFEAVHGTAPDIAGKGIANPTALMMSAVMMLDHLELGEAARRMENAIWKVYGSGEVRTGDLGGKATTREFTDAIIGAL

SEQ ID NO: 37191 - DNA, 1011 bp, Rubrobacter xylanophilus DSM 9941
  CDS (1)..(1011): transl_table=11
gtggcaaggaccgttaccctcatacccggagacggaatagggccggaggtcactggctcggcgaaggaggtcatcggcgcgctcggcgtggacatcgagtgggagatagccgaggccggcgagacggtgatggagagggaggggacgcccctccccgagtacgtgctggagtccatccggcgcaacaaggtggccctgaagggcccgctgaccacccccgtgggcaccggcttccgctcggtgaacgtggccctgcgcaaggagctcgacctctacgccaacatccgcccggcgctcagcctcccggggctcgacctgccgtacagggacatagacatcctgcttttccgggagaacaccgaggatctgtacgcgggcgtcgagcacatggtcggcaagcacgccgccgagtccatcaagatcatcacccgcgagggcaccgagcgcatctgccgcatggccttcgagtactcgcgggaccagggccgcaggcacgtcacggtggtgcacaaggccaacatcatgaagtacaccgacggcctcttccgggaggtcttctacgaggtcgccagagactacgaggacgacttcgaggagatcgacgagcgcatcgtggacaacatggcgatgcagctggtgatgaagccgaacctctacgacgttctggtctgccccaacctctacggggacatcctctcggacctgtgcgccgggctgaccggcgggctcggggtcgccccgggggcgaacatcggggaggacatcgcgctgttcgagccggtgcacggctcggcccccaagtacgccgggcagaaccgggccaaccccttggcgaccctgctgtcggcgaagaacatgctctactacctggggtacggcgaggccgccgaccgcatgcagggggccatcaacgccgccctgaagaaccccgaaacccggacgaaggacctcggcggcagcgccgggacgcgggagttcacccgggcggtgatctccaacctgacgggctag

SEQ ID NO: 37192 - protein, 336 aa, Rubrobacter xylanophilus DSM 9941
MARTVTLIPGDGIGPEVTGSAKEVIGALGVDIEWEIAEAGETVMEREGTPLPEYVLESIRRNKVALKGPLTTPVGTGFRSVNVALRKELDLYANIRPALSLPGLDLPYRDIDILLFRENTEDLYAGVEHMVGKHAAESIKIITREGTERICRMAFEYSRDQGRRHVTVVHKANIMKYTDGLFREVFYEVARDYEDDFEEIDERIVDNMAMQLVMKPNLYDVLVCPNLYGDILSDLCAGLTGGLGVAPGANIGEDIALFEPVHGSAPKYAGQNRANPLATLLSAKNMLYYLGYGEAADRMQGAINAALKNPETRTKDLGGSAGTREFTRAVISNLTG

SEQ ID NO: 37193 - DNA, 1419 bp, Trichodesmium erythraeum IMS101
  CDS (1)..(1419): transl_table=11
atgtacgaaaaaataacccccccaaccacagggtctaaagtcactttcagtaacggccaacccatcgttcccgacgaccctattatcccatttattaggggcgatggtactggattagatttgtggccagcatctcaaaaagtctttgacgcagcgatcgctactgcctatggagacaaacgcaaaattaattggtttaaaatctacgctggtgatgaagcgtgtgacaaatatggcactttccaatatttgccggaagatactctaaatgccataaaagaatatggtattgccattaaaggtcctttaacaacacccataggtggaggtattcgttccctaaatgtcgcattgcgtcaaattaatgatttatatgcttgtgttcgtccttgtagatattacacgggtacaccttctcctcacaaaacaccggaaaaattagatgtcatcatttaccgggaaaatacagaagatatttatctgggaatagaatggcgcgagggaactgatattgctagcaaattgattgacattttaaataaagacttaattcctgctactctcgaacacggcaaaaagcaaattcgcttcgactctggtattggtattaaacctgtaagtaaaactggttcccaacgtttggttaaacgtgctattcaaaatgctttgcgtttacctaagtccaaacaaatggtaactttggtacataaaggtaatattatgaagtacaccgaaggcgcatttcgtgactggggttatgagttagcaactacagaatttcgtcaagaatgtgtcactgaaagagaatcttggattctttctaataaagaggaaaaccttaatattagtagtgaggaaaattctcgaaaaattgaccctggttatgatgctttaacaccagaaaaacaagcagaaatttgccaagaagttgaggatgtattggcagctatttgggatagtcatgggcatggaaaatggaaagagaaaatcatggtaaatgaccgaattgctgatagtattttccaacaaattcaaactcgaccagaggagtattctattctggcaactatgaatttgaatggggattatttatccgacgcagcagcagctattgttggtggtttaggtatgggtccaggtgctaatattggtgataaatgtgctatttttgaagccactcatggtactgctccaaaacacgcaggtttagatagagtaaaccctggttctttaattctttctggtgtaatgatgttagaatatataggctggcaagaagctgcagatttgattaaaaaaggtattgagatttctatttctaatggtgaggtaacttatgatttagcaagattaatggaaccatctgtgccggctttgaaatgttctgagtttgctgatgcaattatcaagcatttttaa

SEQ ID NO: 37194 - protein, 472 aa, Trichodesmium erythraeum IMS101
MYEKITPPTTGSKVTFSNGQPIVPDDPIIPFIRGDGTGLDLWPASQKVFDAAIATAYGDKRKINWFKIYAGDEACDKYGTFQYLPEDTLNAIKEYGIAIKGPLTTPIGGGIRSLNVALRQINDLYACVRPCRYYTGTPSPHKTPEKLDVIIYRENTEDIYLGIEWREGTDIASKLIDILNKDLIPATLEHGKKQIRFDSGIGIKPVSKTGSQRLVKRAIQNALRLPKSKQMVTLVHKGNIMKYTEGAFRDWGYELATTEFRQECVTERESWILSNKEENLNISSEENSRKIDPGYDALTPEKQAEICQEVEDVLAAIWDSHGHGKWKEKIMVNDRIADSIFQQIQTRPEEYSILATMNLNGDYLSDAAAAIVGGLGMGPGANIGDKCAIFEATHGTAPKHAGLDRVNPGSLILSGVMMLEYIGWQEAADLIKKGIEISISNGEVTYDLARLMEPSVPALKCSEFADAIIKHF

SEQ ID NO: 37195 - DNA, 1257 bp, Pseudomonas aeruginosa UCBPP-PA14
  CDS (1)..(1257): transl_table=11
atgggataccaaaagatccaggtgccggcgaccggtgacaaaatcactgtgaatgccgacatgtccttgagcgtaccgaagaacccgatcatcccgttcatcgagggtgatggcatcggcgtcgatatcagcccggtcatgatcaaggttgtcgacgctgcagtggaaaaagcatacaagggcgagcgcaagatcgcctggatggaagtctacgccggcgagaaggccacccaggtgtatgaccaggacacctggctgccccaggaaaccctggacgccgtgcgcgactacgtggtttccatcaagggtccgctgaccaccccggtcggtggcggcatccgttccctgaacgtggccctgcgccagcaactcgatctctacgtctgccagcgcccggtacgctggttcgaaggcgtgcccagcccggtgaagaagcccggcgacgtagacatggtgatcttccgcgagaactccgaggacatctatgccggcgtcgagtggaaggccggttcgccggaggcggagaaggtcatcaagttcctcaccgaggaaatgggcgtcaagaaaatccgcttcaccgagaactgcggcatcggcatcaagccggtttcccaggaaggcaccaagcgcctggtgcgcaaggccctgcaatacgccgtcgacaacgaccgcagttcggtgaccctggtgcacaagggcaacatcatgaagttcaccgagggtgccttcaaggattggggttacgaagtcgcgcgcgatgaattcggcgccgagctgctggacggcggtccgtggatgcagttcaagaacccgaagaccggcaagaacgtcgtggtcaaggacgtgatcgccgacgccatgttgcagcagattctgctgcgccccgccgagtacgacgtgatcgccaccctgaacctgaacggcgactatctctccgacgccctggcggccgaggtcggcggcatcggcatcgcgcccggcgccaacctgtccgattcggtggccatgttcgaggcgacccacggcaccgcgccgaagtacgccggccaggacaaggtcaacccgggttcgctgatcctctccgcggagatgatgctgcgccacatgggctggaccgaggcggccgacctgatcatcaagggcaccaacggggcgatcgccgccaagaccgtgacctatgacttcgaacgcctgatggacggcgcgaccctgctgtcctgctcggagttcggcgacgcgatgatcgccaagatgtag

SEQ ID NO: 37196 - protein, 418 aa, Pseudomonas aeruginosa UCBPP-PA14
MGYQKIQVPATGDKITVNADMSLSVPKNPIIPFIEGDGIGVDISPVMIKVVDAAVEKAYKGERKIAWMEVYAGEKATQVYDQDTWLPQETLDAVRDYVVSIKGPLTTPVGGGIRSLNVALRQQLDLYVCQRPVRWFEGVPSPVKKPGDVDMVIFRENSEDIYAGVEWKAGSPEAEKVIKFLTEEMGVKKIRFTENCGIGIKPVSQEGTKRLVRKALQYAVDNDRSSVTLVHKGNIMKFTEGAFKDWGYEVARDEFGAELLDGGPWMQFKNPKTGKNVVVKDVIADAMLQQILLRPAEYDVIATLNLNGDYLSDALAAEVGGIGIAPGANLSDSVAMFEATHGTAPKYAGQDKVNPGSLILSAEMMLRHMGWTEAADLIIKGTNGAIAAKTVTYDFERLMDGATLLSCSEFGDAMIAKM

SEQ ID NO: 37197 - DNA, 1260 bp, Acidovorax sp. JS42
  CDS (1)..(1260): transl_table=11
atgaccagctaccagcacatccagattccgccccagggccagaagatcaccgtcaacgccgacatgtcgctgaacgtgccccaccagcccatcatcccgttcatcgagggtgatggcacgggcatggacatcacgcccgtgatgctcaaggtggtggatgcggctgtggcaaagtcttatggcgggcagcgcaagatccactggatggaggtgtatgccggcgagaagtccaccaaggtctatggccccgacgtgtggctgcccgaggagacgctgcacgccgtgcgcgactatgtggtttccatcaaggggccgctcaccacgcccgtgggcggcggcatccgttcgctgaacgtggcgctgcgccaggagctggacctgtacgtctgcctgcgcccagtgcgctacttcaagggcgtgccttcgccggtgcgtgagcccgagaagaccaacatggtcatcttccgcgagaactccgaagacatctatgccggcatcgagttcgaggccgagtcggacaaggccaagaagctcatcaagttcttgcaggaggagttcggcgtcaagaagatccgctttcctgagacatcgggcatcggggtcaagccggtgtcgcgcgagggcacgcagcgcctggtgcgcaaggccatccagtacgccatcgacaatgaccggcccagcgtgaccctggtgcacaagggcaacatcatgaagttcaccgaagggggctttcgtgactggggctatgaactggcagcccaggaatttggcgcgcagctgatcgacggcggcccgtggatgcgcatcaagaatccccgcaccggcaaggacatcaccatcaaggacagcatcgccgacgccttcctgcagcagatcctgctgcgcccggccgagtacagcgtgatcgccacgctgaacctgaatggcgactacatctccgacgcattggcggcgcaggtgggcggcatcggcatcgccccgggtgccaacctgtccgacagcgtggcgatgttcgaggccacccatggcacggcccccaagtacgcgggaaaggactatgtcaacccgggctccgagatcctctcggccgagatgatgttgcgccacatgggctggaccgaggcggccgacctgatcatcagttccatggagaaggccatccagagcaagaaggtgacctatgactttgcgcgcctcatggacggggccacgcaggtgagctgctcgggcttcgggcaggtgatgatcgaccacatgtaa

SEQ ID NO: 37198 - protein, 419 aa, Acidovorax sp. JS42
MTSYQHIQIPPQGQKITVNADMSLNVPHQPIIPFIEGDGTGMDITPVMLKVVDAAVAKSYGGQRKIHWMEVYAGEKSTKVYGPDVWLPEETLHAVRDYVVSIKGPLTTPVGGGIRSLNVALRQELDLYVCLRPVRYFKGVPSPVREPEKTNMVIFRENSEDIYAGIEFEAESDKAKKLIKFLQEEFGVKKIRFPETSGIGVKPVSREGTQRLVRKAIQYAIDNDRPSVTLVHKGNIMKFTEGGFRDWGYELAAQEFGAQLIDGGPWMRIKNPRTGKDITIKDSIADAFLQQILLRPAEYSVIATLNLNGDYISDALAAQVGGIGIAPGANLSDSVAMFEATHGTAPKYAGKDYVNPGSEILSAEMMLRHMGWTEAADLIISSMEKAIQSKKVTYDFARLMDGATQVSCSGFGQVMIDHM

SEQ ID NO: 37199 - DNA, 1491 bp, Crocosphaera watsonii WH 8501
  CDS (1)..(1491): transl_table=11
atgaggagtttaacctattttgggagtttaataaaagagcaacccttgattaatgatcattgtatgtacgaaaaactgacagcacccaccacaggttctaaaattacctttgaagacggtaaccccattgttcctaatgatcccattattcccttcattcgtggggacggaacaggaatcgatatttggcctgctacggagaaagtgatcgacgctgcggtaaaaactgcctacggagacagcaaaaaaattaactggtttaaggtgtatgcaggggatgaagcttgtgatcagtatggaacttatcaatatttgcccgaagataccttaaccgctatcaaagagtatggtatcgccatcaaaggacccctgacaaccccagtcggtgggggtattaggtctcttaacgtcgctttacgacaaatttttgaattatacgcttgtgtgcgtccctgtcgctattatcctgggactccttccccccataagtctcctgaaaaattaaatgtgatcgtctatcgggaaaataccgaggatatctacttaggaattgagtggacagaaggcacagaaattgctcaaaagttaatcaactatttgaacaatgaactgatacctgcaacggcagaacatgggaaaaaacagattcgtatagactcaggaattggggttaaacccattagtaaaactggttctcaacggttggttcgtcgggcaattgaacacgccttacgtttgccaaaagctaaacaaatggttactttagtgcataaaggtaacattatgaaatacactgaaggagcctttagagattggggatatgagttagcaacctcagaatttagagatgtttgtgttaccgaaagagaatcgtggattttgagtaacaaagaaggtaaggctgatatttctatcgaagataatgccagaaaagttgaacccggttatgatagtttgacccctgaaaagaaacaagaaatttgtgacgaggttaaaggagttattgacgctatttgggacagtcatggggatggtaaatggaaagaaaagatcatggtaaatgatcgcattgcggatagtattttccaacaaattcaaacccgtcccgatgaatattcgatcctggcaaccatgaacttaaatggggattatttatccgacgctgcggccgctgttgtggggggtttaggtatgggccctggggcaaatattggcgatacttgcgctatttttgaggcaactcatggcaccgcacctaaacacgcaggactggatagaattaatcctggatctgttattctttctggggtgatgatgttagaatatatgggctggcaagaagccgcagacctcattaaaaaaggtattgggaatgcgatcgcaaatcgtcaggtaacctatgatctcgctcgtttgatggaacctaaagttgatcctccactgaaatgttcagaatttgctcaggcaataattgattattttaatgattaa

SEQ ID NO: 37200 - protein, 496 aa, Crocosphaera watsonii WH 8501
MRSLTYFGSLIKEQPLINDHCMYEKLTAPTTGSKITFEDGNPIVPNDPIIPFIRGDGTGIDIWPATEKVIDAAVKTAYGDSKKINWFKVYAGDEACDQYGTYQYLPEDTLTAIKEYGIAIKGPLTTPVGGGIRSLNVALRQIFELYACVRPCRYYPGTPSPHKSPEKLNVIVYRENTEDIYLGIEWTEGTEIAQKLINYLNNELIPATAEHGKKQIRIDSGIGVKPISKTGSQRLVRRAIEHALRLPKAKQMVTLVHKGNIMKYTEGAFRDWGYELATSEFRDVCVTERESWILSNKEGKADISIEDNARKVEPGYDSLTPEKKQEICDEVKGVIDAIWDSHGDGKWKEKIMVNDRIADSIFQQIQTRPDEYSILATMNLNGDYLSDAAAAVVGGLGMGPGANIGDTCAIFEATHGTAPKHAGLDRINPGSVILSGVMMLEYMGWQEAADLIKKGIGNAIANRQVTYDLARLMEPKVDPPLKCSEFAQAIIDYFND

SEQ ID NO: 37201 - DNA, 1275 bp, Exiguobacterium sibiricum 255-15
  CDS (1)..(1275): transl_table=11
atggctacaattcaaggcgaaaacatcacagtaacagacggaacacttaacgtaccgaattcaccaatcattccattcatcatcggtgatggcactggacctgatatttggaatgctgcagttcgtgtcttcgacgctgctgtcgaaaaagcatataacggcgagaagaaaattgagtggaaagaagtctacgccggagaaaaagccttcaacaaaacaggcaactggcttcctgaagaaacacttgatctgattcgtgaacatatcatcgcaatcaaaggaccactcacgacaccagtcggcggcggaatccggtcgttaaacgttgcgcttcgtcaagaacttgatttatatacatgtcttcgtccggtccgttacttcacaggcgttccttcaccggttaaacgtccagaagatacagatatggtcatcttccgcgaaaacacagaagatatctatgctggaatcgagtacgcatcaggcagcgaagaagcacaaaaattacttaacttcctgcaaacagagatgggtgtcaacaagatccgtttccctgaaacatctggtctcggaatcaagccgatttcaaaagaaggaacagaacgtcttgtccgtgcagcaatcgaatatgcacttgaaaacaaacgcgcttcattgacgctcgtccacaaaggaaacatcatgaagttcacggaaggcgcattcaaaaactggggttatgaactcgcagaacgtgaatatgcagaacacgtcttcacatggaaccaatatgaccgtatcaaagatgaagaaggtgctgatgcagcgaacaaagcacagtctgaagcagaagcagccggcaaattgatcgttaaagactcgattgctgatatcttcttacaacaaatcttgacgcgtccaaaagaattcgatgtcgttgcaacaatgaacttaaacggagactacatttcagatgcgcttgcagcacaagtcggcggaatcgggattgcaccgggtgccaacatcaactacatgacgggccacgcaatctttgaagcgactcacggtacagcaccgaagtatgcaggacttgataaagtaaacccatcttctgtcattctttcaggagaaatgatgttccgtcacctcggatggaatgaagtcgcagacttaatcattcagtcaatggaaaaatcaattgaaggcaaagtcgtcacatatgatttcgcacgtctcatggatggcgcaacagaagtgaaatgttctgaattcgcagatgaactcatcaagaatatgtaa

SEQ ID NO: 37202 - protein, 424 aa, Exiguobacterium sibiricum 255-15
MATIQGENITVTDGTLNVPNSPIIPFIIGDGTGPDIWNAAVRVFDAAVEKAYNGEKKIEWKEVYAGEKAFNKTGNWLPEETLDLIREHIIAIKGPLTTPVGGGIRSLNVALRQELDLYTCLRPVRYFTGVPSPVKRPEDTDMVIFRENTEDIYAGIEYASGSEEAQKLLNFLQTEMGVNKIRFPETSGLGIKPISKEGTERLVRAAIEYALENKRASLTLVHKGNIMKFTEGAFKNWGYELAEREYAEHVFTWNQYDRIKDEEGADAANKAQSEAEAAGKLIVKDSIADIFLQQILTRPKEFDVVATMNLNGDYISDALAAQVGGIGIAPGANINYMTGHAIFEATHGTAPKYAGLDKVNPSSVILSGEMMFRHLGWNEVADLIIQSMEKSIEGKVVTYDFARLMDGATEVKCSEFADELIKNM

SEQ ID NO: 37203 - DNA, 1182 bp, Streptococcus suis 89/1591
  CDS (1)..(1182): transl_table=11
atggcagaaaaaatcctaatgagagagggacggttaattgtcccagattgtcccgttattccctatattgaaggagatggtattggcagggatatttggtcagtcagtcaaaaagttattgatgctgcagtgaaaaaagcctatgcaggtcaacgttctattcagtggagggaggttttggcaggagaaaaggcttatgaattaacgggaacttctttgccgaatgagacactggaaataatccgtgagcatttagttgcaatcaaaggtcccttgggaacgccgattgggaaaggtcatcgttctcttaatgttgcacttcgtcaagaattagatttgtatgcctgtgtgcgcccgattcgctattttaagggagtgccaagtccgctgaaagagcctgaaaagacggatattactatttttcgtgaaaatacagaagatatttatgcaggtattgaatgggaggctggttcagatgaggttgccaaagtcatttcctttctgcaagaagaaatgggagtggtaaatatccgttttccagaatcttcaagtattggtatcaaaccgatttcggaagaagggagtaaacgcctcattcgctctgcaatagaatatgccctagaacatcaattgaagatagtgaccttagttcataagggaaatattcaaaagtttacagaaggcggtttccgcaagtggggttatgaattggcgaaagaagaatttgctacagaacttgcagaggggactttggtagtaaatgacattattgcggataactttctgcagcagattttattggcgccggaaaacttccaagtggttgctcttacaaatctaaatggagattatgcatcagatgctcttgcggctcaggtcggaggaataggcatctcaccgggtgctaatattaattatcagacaggtcatgctatctttgaagcgacacatggaactgctcctgatattgcaggaaaggatttggctaatccatgttccctcttgctttcggcttgtatgatgttagaatatataggctggaaagaagcggctactttaattattcaggccttggaggacgcttttataaataaaaatgttacgcttgattttgctaaaattttggacgttgctcatcaatctactagtcaattttcagaagttctaatagattctatttaa

SEQ ID NO: 37204 - protein, 393 aa, Streptococcus suis 89/1591
MAEKILMREGRLIVPDCPVIPYIEGDGIGRDIWSVSQKVIDAAVKKAYAGQRSIQWREVLAGEKAYELTGTSLPNETLEIIREHLVAIKGPLGTPIGKGHRSLNVALRQELDLYACVRPIRYFKGVPSPLKEPEKTDITIFRENTEDIYAGIEWEAGSDEVAKVISFLQEEMGVVNIRFPESSSIGIKPISEEGSKRLIRSAIEYALEHQLKIVTLVHKGNIQKFTEGGFRKWGYELAKEEFATELAEGTLVVNDIIADNFLQQILLAPENFQVVALTNLNGDYASDALAAQVGGIGISPGANINYQTGHAIFEATHGTAPDIAGKDLANPCSLLLSACMMLEYIGWKEAATLIIQALEDAFINKNVTLDFAKILDVAHQSTSQFSEVLIDSI

SEQ ID NO: 37205 - DNA, 1446 bp, Synechococcus sp. WH 5701
  CDS (1)..(1446): transl_table=11
atggcgtccaccccagctcccgcctacgaccagctgaccccccccagcagcggcacagccatccgcttcgagaacggcctgccggtggtgccgaacgacccgatcattcccttcatccgcggcgatggcaccggagtggacatctggcccgcgacccagcgggtgctggatgcggcggtggccaaggcctacggcggcgagcgccgcatcgagtggttcaaggtctacgccggcgatgaggcctgcgacctctacggcacctatcagtacctgccccaggacaccctgaccgccatcgagcaatacggcgtggcgatcaaggggccgctcaccaccccgatcggtggcggtatccgctcgctgaacgtggccctgcgccagattttcgatctctattgctgcgtgcgcccctgccgctactacgccggcacccccagcccccacaagcggccccaggacctggacgtggtggtgtacagggagaacaccgaagacatctacatggggatcgagtgggaagccactgatccggtctgcgtggagctgatcgcccatctcaacgacacagtgatcccggccaacggcaagctcggcaagcgccgcatccccgatggctccggcatcggcatcaagccggtgagcaaggccggcacccagcgccatgtgcgcaaggcgatccagcacgccctgggcctggagggcagcaagcgccacgtgaccctggttcacaaggggaacatcatgaagttcaccgaaggggcattccgcgactggggctatgagctggccacaagcgaattccgcggtcagtgcatcacggaacgggagagttggatcctcggcaacctggaggagaagccgggcctgagcatcgaggacaacgcccggctgatcgagcccggttacgacagcctcacccccgaaaagaaggcggcggtggacaccgaggtgaaggaggtgctggccgccatcggcgaaagccacggcaatggtcagtggaaatcgatggtgatggtcgacgaccgcatcgccgacagcatcttccagcagattcagacccggccccaggagtattcagtgctctgcaccctcaacctcaacggcgactacatctccgatgcagccgctgccgtggtgggcggcctgggcatggcgccgggggccaacatcggcgacagcgccgccatcttcgaggccacgcacggtaccgcgccgaagcatgcgggcctcgatcggatcaatccaggttcggtgatcctctctggcgtgatgatgctggagttcatgggctggcaggaagccgccgatctgatcacccaaggcatcagcgctgcgatcgccagcggccaggtcacctatgacctggccagactgatggaacctcgggtggagccggtcagttgctccggcttcgccgaggcagtgatcggccacttcgatccctga

SEQ ID NO: 37206 - protein, 481 aa, Synechococcus sp. WH 5701
MASTPAPAYDQLTPPSSGTAIRFENGLPVVPNDPIIPFIRGDGTGVDIWPATQRVLDAAVAKAYGGERRIEWFKVYAGDEACDLYGTYQYLPQDTLTAIEQYGVAIKGPLTTPIGGGIRSLNVALRQIFDLYCCVRPCRYYAGTPSPHKRPQDLDVVVYRENTEDIYMGIEWEATDPVCVELIAHLNDTVIPANGKLGKRRIPDGSGIGIKPVSKAGTQRHVRKAIQHALGLEGSKRHVTLVHKGNIMKFTEGAFRDWGYELATSEFRGQCITERESWILGNLEEKPGLSIEDNARLIEPGYDSLTPEKKAAVDTEVKEVLAAIGESHGNGQWKSMVMVDDRIADSIFQQIQTRPQEYSVLCTLNLNGDYISDAAAAVVGGLGMAPGANIGDSAAIFEATHGTAPKHAGLDRINPGSVILSGVMMLEFMGWQEAADLITQGISAAIASGQVTYDLARLMEPRVEPVSCSGFAEAVIGHFDP

SEQ ID NO: 37207 - DNA, 1248 bp, Pseudoalteromonas tunicata D2
  CDS (1)..(1248): transl_table=11
atgtaccatcaaattgttccaccaagccaaggtgaaaaaattcaggtgttagcaaatgggcaatggatcattcccaatgagccaatcattgcctttattgaaggtgatggtgttggctcagaattaacgcctttaatgcgccaactaattgatagtgcaatattaaaaacctatgaaacggctagaaaaattcattggttagaagtgtataacggcgaaaaggcggctgagctgtatgatggtgattggtttcctgaagaaacgttaaatgcgatccgtgattatcacctggtttataaaggaccacttacaacggcgatgggagccggatttcgctcactcaatgtagcacttcgccatgaaatggatttatttattaatcttagaccaatcaaatcgttgcctaatctcaataccccagtcaaacaccctgaaaatatcgatatggtgatttttcgcgataatagcgaagatctttattcgggcatcgaatttaaagccggttctgcccaagccgatagtttgcttgaatttttacaacagcagctcggtgttaaccgctttcgttttactgagcaatgtggccttggtattaaacatatttcagagcagggcagtaaacgtttagtccgggcagccattgcatttgcgttaaaagagcataaaaccagtgttactttagtacataaaggcgatgtgatgaaattcactgatggtgcttttttaaaatgggcattagaagtggctatcgaagaatttttagcagtccgtcatcctaatggtcgctggtggcaaataatacaaggtgaacatgagctgatcattaaagatgagctgtgtgatgtgatgctgcaaaattgtttattagcacctgagcagtacgatgtgattgctacgaccaacttaaatggtgacttactggttgatagccttacggctcaagttggcatgattggtatggcggcaggggctaatttaagtgaagcactggctttatttgagcctactcatggcacggtcgaaagtttagttggtcaagatgtaatgaatccagtatcaagcattttggcaggcgtgatgatgttacggtttatgaattggcatgacgctgctgataatattgagcaatcgttgcacaaaacattatgtaacaatcaagtgactgaggatatgcagtcacttttacccgatccgacagttcagggtacgcaggcatttgcgcaatgcataatatctcatcttatttag

SEQ ID NO: 37208 - protein, 415 aa, Pseudoalteromonas tunicata D2
MYHQIVPPSQGEKIQVLANGQWIIPNEPIIAFIEGDGVGSELTPLMRQLIDSAILKTYETARKIHWLEVYNGEKAAELYDGDWFPEETLNAIRDYHLVYKGPLTTAMGAGFRSLNVALRHEMDLFINLRPIKSLPNLNTPVKHPENIDMVIFRDNSEDLYSGIEFKAGSAQADSLLEFLQQQLGVNRFRFTEQCGLGIKHISEQGSKRLVRAAIAFALKEHKTSVTLVHKGDVMKFTDGAFLKWALEVAIEEFLAVRHPNGRWWQIIQGEHELIIKDELCDVMLQNCLLAPEQYDVIATTNLNGDLLVDSLTAQVGMIGMAAGANLSEALALFEPTHGTVESLVGQDVMNPVSSILAGVMMLRFMNWHDAADNIEQSLHKTLCNNQVTEDMQSLLPDPTVQGTQAFAQCIISHLI

SEQ ID NO: 37209 - DNA, 1254 bp, Photobacterium sp. SKA34
  CDS (1)..(1254): transl_table=11
atggatagtaaagtagttgtaccagttgaaggtcagaaaattaccctagattctgatggtaaattggtcgttcctaacaacccagtcattccttacattgaaggtgatggtattggtgttgatgtaagccctgcaatgattaaagttgtcgatgcagctgtaaagaaagcctacgctggcgatcgtaaaattgagtggatggaaatctacacaggtgaaaagtcgacacaaatttacggtgaagatgcttggttacctcaagaaacattagattttatccgtgactacaaagtagcaattaaaggcccactgacaacgcctgttggcggtggtattcgctcactgaatgtagcattacgccaagagctagatttatatatctgtgctcgtcctgttcgttattttgatggtgttccaagcccacttaagcaaccagagctaactgacatggttatttaccgtgaaaactctgaagatatctatgcgggtgttgaattccaagccggtactgcggaagcggataaagtgattaaattcctacaagaagaaatgggtgcaactaaaatccgtttcccacaacaatgtggtgtaggtatcaagcctgtatctgaagaaggcacaaagcgtttagtccgtgctgcaattcaatacacaatcgataacgatcgtgattcactaactttggtacacaaaggtaacatcatgaagttcaccgaaggtgccttcaaagattggggttacgaagttgcgctacaagagttcggtgctgaactacttgatggcggcccatggatgactttaaagaatccaaatacgggtaaagagatcgtcgttaaagattgtattgctgatgcattcttgcaacaaattctgcttcgccctgctgagtacgatgttattgcaacgatgaacctaaacggtgattacgtttctgatgcacttgctgcacaggttggtggtattggtattgcacctggcgcaaacattggtgatggtattgcactatttgaagcaacgcacggtactgcgcctaaatacgcaggtcaggataaagtaaacccaggttcacttatcctttctgcagaaatgatgctgcgtcacctaggttgggttgaagccgcagatctaatcattagctcaatggaagctgcgattagcaacaaaacagtgacttatgatttcgagcgtctaatggatggcgcaacattacgtaagtgttctgaatttgctgatgatatgattgaacaaatgtaa

SEQ ID NO: 37210 - protein, 417 aa, Photobacterium sp. SKA34
MDSKVVVPVEGQKITLDSDGKLVVPNNPVIPYIEGDGIGVDVSPAMIKVVDAAVKKAYAGDRKIEWMEIYTGEKSTQIYGEDAWLPQETLDFIRDYKVAIKGPLTTPVGGGIRSLNVALRQELDLYICARPVRYFDGVPSPLKQPELTDMVIYRENSEDIYAGVEFQAGTAEADKVIKFLQEEMGATKIRFPQQCGVGIKPVSEEGTKRLVRAAIQYTIDNDRDSLTLVHKGNIMKFTEGAFKDWGYEVALQEFGAELLDGGPWMTLKNPNTGKEIVVKDCIADAFLQQILLRPAEYDVIATMNLNGDYVSDALAAQVGGIGIAPGANIGDGIALFEATHGTAPKYAGQDKVNPGSLILSAEMMLRHLGWVEAADLIISSMEAAISNKTVTYDFERLMDGATLRKCSEFADDMIEQM

SEQ ID NO: 37211 - DNA, 1254 bp, Oceanospirillum sp. MED92
  CDS (1)..(1254): transl_table=11
atgggatatgacaaaatctcagtaccacaaggcgaaaaaattacagtcaatggtgattactcattgaatgtaccagataacccgatcatcccctacatagaaggggatggtattggcgtggatgtctctccagctatgctcaaggtggtagacgccgctgtcagcaaagcttatggcggtgagaagaagattgcctggatggaggtgtatgcgggagaaaaggcgacctctgtctacgagcaagacacctggcttcctgaagagacgcttgaagcatttaaagaattcgcggtcgggatcaaaggtcccctgacaacgcctgtgggtggcggtatacgttcgttaaacgttgctttgcgtcaggagctggatctctatgtgtgccagcgacctgtgagatggtttaagggggttccaagtcctgtcattaatcctcaagacgtggatatggtgatctaccgagagaactctgaagatatttatgcgggtgtagagtggaaagcgggaacggaagaagcagataaagtgattcgtttcctgaaagaggagatgggagtcactaagatccgctttgatcaaaactgcggcattggcattaaacctgtctcagaagaagctaccaaacggctggtgcgccaggcattacagtactgcgttgataatgaccgtcgttccctgactctggttcataaagggaacatcatgaagtttactgaaggtgcctttaaagactggggctatgagcttgcaaaagaggagttcggagcggatctatatgctggtggcccttcgttaagttttaaaaaccctaaaaccggtaatgagatcatcgtgaaagatgtcattgcagacgccatgttacaacagattctcctgagaccggctgaatatgatgttgtggcaacgcttaatttgaatggtgattatctctctgatgcgctggctgctgaagtgggtgggataggtatcgcaccgggtgcaaatttatctgatgaagtcgctatctttgaagcaacgcatggaacggcccctaaatatgcagggcaagacaaggttaatccgggctccgtcatattatctgcagagatgatgttacgtcatatgggatggacagacgcggcggatctcatcattaaagggatggatggcgcaattactgctaaaaacgtgacctatgactttgaaaggcttatggacgatgcaacattactgagttgctcagaatttgccgacgccataattgatcgaatgtag

SEQ ID NO: 37212 - protein, 417 aa, Oceanospirillum sp. MED92
MGYDKISVPQGEKITVNGDYSLNVPDNPIIPYIEGDGIGVDVSPAMLKVVDAAVSKAYGGEKKIAWMEVYAGEKATSVYEQDTWLPEETLEAFKEFAVGIKGPLTTPVGGGIRSLNVALRQELDLYVCQRPVRWFKGVPSPVINPQDVDMVIYRENSEDIYAGVEWKAGTEEADKVIRFLKEEMGVTKIRFDQNCGIGIKPVSEEATKRLVRQALQYCVDNDRRSLTLVHKGNIMKFTEGAFKDWGYELAKEEFGADLYAGGPSLSFKNPKTGNEIIVKDVIADAMLQQILLRPAEYDVVATLNLNGDYLSDALAAEVGGIGIAPGANLSDEVAIFEATHGTAPKYAGQDKVNPGSVILSAEMMLRHMGWTDAADLIIKGMDGAITAKNVTYDFERLMDDATLLSCSEFADAIIDRM

SEQ ID NO: 37213 - DNA, 1254 bp, marine gamma proteobacterium HTCC2207
  CDS (1)..(1254): transl_table=11
atgggatatcagcatatccagatacccgaatctggtaaaaaaataaccgtaaattcagacttttcactcaatgttccaaacaatccaattgtgccttttattgaaggcgacggcattggcgtagatatcactccagtgatgatcaaagtgatcgacgcagcaattaaaaaagcctacgccggcgagagagagatctcttggatggaagtgtactgtggtgagaaagccgctgagctttacgaaggtgactggttccccgctgagacattagaagcagttaaagaatttgccgtttcgatcaaaggtccattgactactcctgtaggcggcggtttccgctcgttgaacgtggctctgcgtcaagagctggatctatttgtttgtcagcgtccagtgcgttggtttcaaggcgttccctctcccgttaagcagccgaacaaggttgatatgtgcatcttccgtgagaactcagaagatatttatgcaggtatcgagtggaaagctggtagtgaagaagccaccaaggttatcaagttcctccaagaagagatgagcgttactaagattcgttttgacgagaactgcggtatcggtgttaagcctgtatcagagcagggcactaagcgtcttgttagcaaagcgatccagtacgccatagatcaaaacaagccatctgtgactattgttcacaagggcaatatcatgaaattcaccgaaggcgcattctgcgattggggttatgaagtcgctcgcgagcagttcgatgcacagcctctcgacggtggcccttggcacgtcgttaagaatccaaacactggcgaagacattgttattaaagatgtgattgccgatgcgatgttgcagcagattattctgcgtcccgatgagtacagcgtgattgctacgttgaacctcaacggcgactatatttctgatgcactggccgctcaggtcggtggtatcggtattgctccaggcgctaacttgtctgatgacgtggctatctttgaagccactcacggtactgcacctaagtatgctggccaagacaaagtaaatcctggctcactgatcttgtcagccgagatgatgctgcgtcatatgggttggggcgaagctgctgacctagtgatcaaaggtattgaaggcgcaatctctgagaagaaagtcacttatgatttcgagcgactaatggacgacgcaacattgatgtcttgttcagaatttggcgatgtgatgattgaaaatatgtaa

SEQ ID NO: 37214 - protein, 417 aa, marine gamma proteobacterium HTCC2207
MGYQHIQIPESGKKITVNSDFSLNVPNNPIVPFIEGDGIGVDITPVMIKVIDAAIKKAYAGEREISWMEVYCGEKAAELYEGDWFPAETLEAVKEFAVSIKGPLTTPVGGGFRSLNVALRQELDLFVCQRPVRWFQGVPSPVKQPNKVDMCIFRENSEDIYAGIEWKAGSEEATKVIKFLQEEMSVTKIRFDENCGIGVKPVSEQGTKRLVSKAIQYAIDQNKPSVTIVHKGNIMKFTEGAFCDWGYEVAREQFDAQPLDGGPWHVVKNPNTGEDIVIKDVIADAMLQQIILRPDEYSVIATLNLNGDYISDALAAQVGGIGIAPGANLSDDVAIFEATHGTAPKYAGQDKVNPGSLILSAEMMLRHMGWGEAADLVIKGIEGAISEKKVTYDFERLMDDATLMSCSEFGDVMIENM

SEQ ID NO: 37215 - DNA, 1290 bp, Rickettsiella grylli
  CDS (1)..(1290): transl_table=11
atgacttatcacgctattcagatcccaccttttggcaaggcaatctcggtaaacgccgattattctctcaatgtacccgaagaacccattattcctttcattgaaggggatgggattggaatcgatatcacgccagcgatgcagtacgttgtcaatgccgctatcaaaaaagcgtatggtgataaacgtcggattgcgtggatggaaatctatgccggtgataaagccactcggatttatggcgataaccagtgcttacccgatgaaacgcttgctgcaatacgtcattatgtcgtctctatcaaaggtcctttaacgacaccggttggtggtggtattcgctctttaaatgttgctttgcgccaacaattggatctttatgtgtgtttacggcctatccgttatttcaaaggtgtaccgagcccattacgtgaacctgacaaaacccatatggttattttcagagaaaattctgaagatatttacgcgggcattgaatggcaagcagacagtcaagaagccaaaaaaatgatcgcttttttacaacacgacatgggcgttaaaaaaattcgttttcctgcacagtgtggtattggcattaaaccggtgtcaaaagaaggttcacaacgtttagtcaagcgcgccattcaatatgctatcgaccacgatcttccttcagtcactttagtgcataaagggaatattatgaaatttactgaaggtgcgtttaaagagtggggctatgcagtcgcgaaagaacaatttggcgcgaaactgctcaatggagggccttggatgcaattaaaaaatccaaaaacagaaaaagagattatcattaaagatttcatcgcggatgcttttttacaacagattttactacgtcctgaagaatatagcgtcatagcgaccttaaatctaaacggtgattacatttcagatgctttagcggcccaagtgggtggcatcggcattgcgccaggtgctaatttgagcgataacgttgcgatgtttgaagccacacacggcacagcgcctaaatatgcaggccaaaataaggtcaatccaggctcgttaattctatctgccgaaatgatgctccgttatctcggttggaatgaagccgcgtgtcatattataacgggcatggaaggcgctatccaatccaaaacggtcacctatgatttcgcccgtttaatgaacaatgcgaaagaagtgagttgttctgatttcgctcaatctattgtcgatcatatgtgtcacaaacagtccttaaccgcgacaactttttaa

SEQ ID NO: 37216 - protein, 429 aa, Rickettsiella grylli
MTYHAIQIPPFGKAISVNADYSLNVPEEPIIPFIEGDGIGIDITPAMQYVVNAAIKKAYGDKRRIAWMEIYAGDKATRIYGDNQCLPDETLAAIRHYVVSIKGPLTTPVGGGIRSLNVALRQQLDLYVCLRPIRYFKGVPSPLREPDKTHMVIFRENSEDIYAGIEWQADSQEAKKMIAFLQHDMGVKKIRFPAQCGIGIKPVSKEGSQRLVKRAIQYAIDHDLPSVTLVHKGNIMKFTEGAFKEWGYAVAKEQFGAKLLNGGPWMQLKNPKTEKEIIIKDFIADAFLQQILLRPEEYSVIATLNLNGDYISDALAAQVGGIGIAPGANLSDNVAMFEATHGTAPKYAGQNKVNPGSLILSAEMMLRYLGWNEAACHIITGMEGAIQSKTVTYDFARLMNNAKEVSCSDFAQSIVDHMCHKQSLTATTF

SEQ ID NO: 37217 - DNA, 1425 bp, Synechococcus sp. RS9916
  CDS (1)..(1425): transl_table=11
atggctcagttcgagaagctcaccgcccccacccagggcacaccggtccgcttcgagaacggccagcccgtagtggccaacgacccgatcattccgtttatccgcggcgatggcaccggcgtggacatctggccagccacccagaaagtgctggatgcggctgtggccaaggcctatggcggcgccaagcgaatcgagtggttcaaggtctacgccggtgatgaagcctgcgacctctatggcacctaccagtacctgcccgaagacaccctcgaggcgatccgcacctacggcgtcgccatcaagggccctctcaccacgccggtcggaggcgggatccggtcgttgaatgtggccctgcgccagatctttgatctctactgctgcgtgcgcccctgccgttactacgaaggcacccccagcccccacaagcgtccccaggatctggacgtgatcgtctaccgggagaacaccgaagacatctacatggggatcgagtgggaagccgatgacgccgtgggccaggaactacggaaacatctcaacgaggtggtaatccccgccaacggcaagctgggcaagcgccagattcctgaaggggccggcatcggcatcaagccagtgagcaagcacggcagccagcgccacatccgcaaggccatccagcacgccctgcgcctccagggcgacaagcgccacgtgactctggtgcacaagggcaacatcatgaaattcacggaaggcgccttccgcgactggggctatgaactggccaccaccgaattccgcgacgtgtgcatcaccgagcgggaaagctggatcctgggcaacctcgataacgatgcgaacctgagcgtgcaggccaatgcccgcatgatcgaaccgggctacgacagcctcaccccggaaaagaaaggggcgatcgacgccgaagttcaggccgtgattgacaccatcggcgccagccatggcaacggcaagtggagggagatggtgctggtggacgaccgtatcgccgacagcatcttccagcagattcagacccgccctcaggagtattcgatcctcgccaccctgaacctcaacggcgactacatctccgatgccgcggccgccatggtgggcggtctggggatggcccccggcgccaacatcggagcgaatgcggccatcttcgaagccacccacggcaccgccccgaagcatgccggcctcgaccgcatcaaccccggctcggtgatcctcagcggcgtgatgatgctggaattcctcggctggcaagaggccgccgatctgattaccaaagggctcagcgccgccattgccgaccagcaggtcacctatgacctggcccgactgatggagcccaaagtggatgccgtcagctgcagcggcttcgccgaggccatcatcgaacggttctga

SEQ ID NO: 37218 - protein, 474 aa, Synechococcus sp. RS9916
MAQFEKLTAPTQGTPVRFENGQPVVANDPIIPFIRGDGTGVDIWPATQKVLDAAVAKAYGGAKRIEWFKVYAGDEACDLYGTYQYLPEDTLEAIRTYGVAIKGPLTTPVGGGIRSLNVALRQIFDLYCCVRPCRYYEGTPSPHKRPQDLDVIVYRENTEDIYMGIEWEADDAVGQELRKHLNEVVIPANGKLGKRQIPEGAGIGIKPVSKHGSQRHIRKAIQHALRLQGDKRHVTLVHKGNIMKFTEGAFRDWGYELATTEFRDVCITERESWILGNLDNDANLSVQANARMIEPGYDSLTPEKKGAIDAEVQAVIDTIGASHGNGKWREMVLVDDRIADSIFQQIQTRPQEYSILATLNLNGDYISDAAAAMVGGLGMAPGANIGANAAIFEATHGTAPKHAGLDRINPGSVILSGVMMLEFLGWQEAADLITKGLSAAIADQQVTYDLARLMEPKVDAVSCSGFAEAIIERF

SEQ ID NO: 37219 - DNA, 1269 bp, Alteromonadales bacterium TW-7
  CDS (1)..(1269): transl_table=11
atgcaataccaacatataaaaatgccagagcaagggcaacatataacggtagatgagcaagggaagtgggttattccttcagagcctgttattgcctatattaatggagatggagttgggcaagatgttatgcccgttatgagaaatattgtagattgcgctattaaacactgttacaaaaacaagcgaaaaatacattggatgcaagtgtttaatggtgagcaagcagccaagctttacgacggtgattggtttccacaagaaacaatacaggcagtaagagcctgtaaaatagcaataaaagggccattaactacgcctttgggtggagggttccgctctttaaatgtagctttacgccaagaaatggatttatttgtaaatatgcgcactatcaaagggtttagtgctttgccttctcctttaaaaaatccttttttaaccaacattacggttcttcgtgatagcagcgaagatgtatattcaggtattgagtggcaagcagggagcattgaaagtgaaaaaatgctcgactttttatgtgaagaaatgggggtaacacgtcttaggttttcacaagattgcggcataggtataaaaaatatatccaaagaaggctctgaacgattaacacgttttgctcttaattttgcccttaataacaatcgagattctgtcacttttgttcataaaggcaatgtgcttaagtttacagatggtgcatttaaacgttggggttttgcactcgccaaaaaggaatttaatgctattgaacacgaaaatggccgctggctgaaaattgagcgtgctgggcaggcgcctctaataattaaagaagtcattgccgataacatgctgcaacaatgtttaatgaaccctgaacagtttgatgtagtggcaactacgaatcaaaatggggactttttagccgatatgctcagcgctcaagtgggtggtgtgggcattatgcctgctgcaaacttgaataatgatgtggctttttttgaacctactcatggtacatttgagcgaattgcagggcaaaacaaagcgaatccaagcagcagtattttgagcgcagtactcatgcttaaatttatgaaatgggatgaggctgcattaactattgaaaatgctctagaaaacacattagcaagtgggtatgttacttttgatttaacccagcaaggcattgatacttcaaaaactcataactcgacaaccttaagctgcacagactttgcagataaagttatcgagcacttttaa

SEQ ID NO: 37220 - protein, 422 aa, Alteromonadales bacterium TW-7
MQYQHIKMPEQGQHITVDEQGKWVIPSEPVIAYINGDGVGQDVMPVMRNIVDCAIKHCYKNKRKIHWMQVFNGEQAAKLYDGDWFPQETIQAVRACKIAIKGPLTTPLGGGFRSLNVALRQEMDLFVNMRTIKGFSALPSPLKNPFLTNITVLRDSSEDVYSGIEWQAGSIESEKMLDFLCEEMGVTRLRFSQDCGIGIKNISKEGSERLTRFALNFALNNNRDSVTFVHKGNVLKFTDGAFKRWGFALAKKEFNAIEHENGRWLKIERAGQAPLIIKEVIADNMLQQCLMNPEQFDVVATTNQNGDFLADMLSAQVGGVGIMPAANLNNDVAFFEPTHGTFERIAGQNKANPSSSILSAVLMLKFMKWDEAALTIENALENTLASGYVTFDLTQQGIDTSKTHNSTTLSCTDFADKVIEHF

SEQ ID NO: 37221 - DNA, 1299 bp, marine gamma proteobacterium HTCC2143
  CDS (1)..(1299): transl_table=11
gtgatacacgaggttttaattaacttttattcaacggagttttcgatgtcatatcaacacatacaaatacctgacactggcgaaaaaatcacagttaacgctgactactctctcaacgtccctgaccaacctattattccgttcatagaaggagatggcattggcgttgatataactccggtaatggtgaaagttgtagatgccgcggtcgagaaagcctatgggggtcacaaaaaaataagttggatggaaatattcaccggtgagaaggccgccgaaatgtacgacggcgattggtttcccgctgagactctcgacgcgataaaggactattcagtcggtataaaggggccgctgacaacaccagtaggtggcggttttcggtcgctgaacgtggctctacgacaggaattggatttatacacgtgccttcgcccggttagatggtttgaaggtgtgccgtcgcccgttaaggagcccgctaaaactaatatggttatattccgtgagaattcggaggatatctatgcgggtattgagtggcgagcgggttcgcctgaagcgacccgagtcatcgagtttttacagaatgagatgggggtcactaaaatacgttttccagataattgtggtattggcgttaaaccggtctcgaaagaagggactgatcgcctcgtacgcaaggccattcagtatgcaatcgatcaagacttgccctctgtgactcttgtccacaagggcaatatcatgaaatttactgagggtgcctttaaagactggggctaccaactggcgcaaaacgagttcggcggagagctgatagatggtggtccctgggtcagcttaaaaaaccctaatacaggcacagacatagttgtaaaagatgttattgccgatgccatgctacagcaagtgctgctgcgtccagatgagtacagtgttattgcaacgcttaatcttaacggggattatttatccgatgcgctggccgctcaggttggcggaattgggatagcaccaggggccaatctaagcgacaacattgctctctttgaggcaactcacggcactgctccaaagtatgcgggtcaggataaggttaatccggggtcgcttatcctttcagctgaaatgatgctccgacatttaggttggaatgatgccgccgatttaatcattggcgggatgaatggtgccattcaggcgcgaacagtgacctacgactttgagcgtctgatgggcgatgctaccttgctaaaatgctctgagtttggcgacgcaattatcgcaaaaatgtag

SEQ ID NO: 37222 - protein, 432 aa, marine gamma proteobacterium HTCC2143
MIHEVLINFYSTEFSMSYQHIQIPDTGEKITVNADYSLNVPDQPIIPFIEGDGIGVDITPVMVKVVDAAVEKAYGGHKKISWMEIFTGEKAAEMYDGDWFPAETLDAIKDYSVGIKGPLTTPVGGGFRSLNVALRQELDLYTCLRPVRWFEGVPSPVKEPAKTNMVIFRENSEDIYAGIEWRAGSPEATRVIEFLQNEMGVTKIRFPDNCGIGVKPVSKEGTDRLVRKAIQYAIDQDLPSVTLVHKGNIMKFTEGAFKDWGYQLAQNEFGGELIDGGPWVSLKNPNTGTDIVVKDVIADAMLQQVLLRPDEYSVIATLNLNGDYLSDALAAQVGGIGIAPGANLSDNIALFEATHGTAPKYAGQDKVNPGSLILSAEMMLRHLGWNDAADLIIGGMNGAIQARTVTYDFERLMGDATLLKCSEFGDAIIAKM

SEQ ID NO: 37223 - DNA, 1254 bp, marine gamma proteobacterium HTCC2080
  CDS (1)..(1254): transl_table=11
atgtcatacaagcacattaaggttccggaaagcggagacgtgatcacagtcaacgaggacagcagcctgtctgtgcctgacaagcctatcatcccttacatcgaaggtgacggaattggtgtcgacattacgccggtaatgattgatgtcgtcaatgccgcagtagacaaggcctacggggggcaaaaggccatatcttggatggagatatacaccggtgaaaaagcggctgaattgtacgaaggggactggtttcctgaggagacgctggaggccataaaaacctatgccgtcgctatcaagggaccattgacaaccccggtaggtggaggctttcgctcactcaacgtggcgctgcgtcaagagctagatctttacacctgcctgcggccggttcgctggtttgagggtgtcccttctcctgtacgtcgccctgaagactgcaacatggtgatctttcgagagaattcggaagatatatatgcgggcatcgaatatcaggctggaacacctgaagcgcaaaaggttgttgatttcatcattaatgaaatgggcgcgacaaagattcgttttccaacggacgtaggcattggcataaagcctgtctcctctgcgggaaccaagcgcttggttcgtaaagctattcagtatgccatcgatcaaaatctgccatctgtcacccttgtacacaaaggcaacatcatgaaatttaccgagggggcatttcgggattggggttacgagcttgctcaggaagagtttggcgggcagttagtagacggtggtccgtgggtggaaatcaaaaacccaataaccggtgatccgatcatcattaaagatgtgattgctgatgccatgctgcagcaggttttgacgcgtccaaaggaatacagtgtagtcgcaactttgaatcttaatggtgattatctttccgatgctttggccgctcaggtcggtggaattggtatcgctcctggcgctaacctttccgataccgttgcattgtttgaagccacccacggaacagcacctaaatacgctggtcaggacaaggttaatccgggctcgttgattttgtcggccgaaatgatgatgcgccacctaggatggaatgaggccgcagatcttatcgtcgatggtgtgaacggtgcgattcaagccaaaaccgtgacttatgactttgagcgattgatggacggggctactttggtctcatgttctgacttcggaaaagccataataaaagccatgtaa

SEQ ID NO: 37224 - protein, 417 aa, marine gamma proteobacterium HTCC2080
MSYKHIKVPESGDVITVNEDSSLSVPDKPIIPYIEGDGIGVDITPVMIDVVNAAVDKAYGGQKAISWMEIYTGEKAAELYEGDWFPEETLEAIKTYAVAIKGPLTTPVGGGFRSLNVALRQELDLYTCLRPVRWFEGVPSPVRRPEDCNMVIFRENSEDIYAGIEYQAGTPEAQKVVDFIINEMGATKIRFPTDVGIGIKPVSSAGTKRLVRKAIQYAIDQNLPSVTLVHKGNIMKFTEGAFRDWGYELAQEEFGGQLVDGGPWVEIKNPITGDPIIIKDVIADAMLQQVLTRPKEYSVVATLNLNGDYLSDALAAQVGGIGIAPGANLSDTVALFEATHGTAPKYAGQDKVNPGSLILSAEMMMRHLGWNEAADLIVDGVNGAIQAKTVTYDFERLMDGATLVSCSDFGKAIIKAM

SEQ ID NO: 37225 - DNA, 1242 bp, Candidatus Desulfococcus oleovorans Hxd3
  CDS (1)..(1242): transl_table=11
atggcaaatacgcagaagatcacccggaaccccgacggatcgttgaatgtcccggatatgcccgttattccttttatcgaaggggacggcaccggaccggatatatggaaggcggcgaagatggtgctggacgcggcagtggacgcggcctacggcggcagccggaaaatcgcatggcaggaagttcttgccggtgaaaaggcctatgaaaagaccggccagtggctgcccgaagagacgctggacaccatccgggagtacgtggtggccatcaagggccccctgaccacgccggtgggcaagggaatccgcagcctcaacgtctccatccgccagctgctcgacctttacgcctgcgtgcggccggtgcgctacattgatcccattcccagccccatgaaacagccggaaaaggtcaacatggtggtgttccgggaaaacaccgaggatgtctacgccggcatcgagtgggaggcgggcagcgccgaggcggaaaagcttatcgcgttcatgaaaaacgagctgggggcttccgtggccgccggttcgggcatcggcatcaagcccatgagcgaaatcaacacccgccggctggtggcccgggccattgcctatgccatagccaaggggctctcctcggtgaccctgatgcacaagggcaatatcatgaagtttaccgaaggggccttctgcacctggggatacaaggccgccagagagctgtttgccgaccggaccatcaccgaggccgaggtctacgaaaagcacgacggcaaaccgcccgggggcagggtgatgatcaaggaccggatcgcggacatgctgtttcagcagatcctgctgcggccggacgaataccaggtgattgcctgccccaacctcaacggtgactatatttccgacgcgctggcggcccaggccggtgggctgggcatggcgccgggcgccaacatcggcgatgaatgcgcggtgttcgaggccacccacggcacggcccccaagtacgcgggcctggacaaggtcaatcccggttccctgattctttccggcgccatgatgctggaacacatggggtgggacgaggccggcgccatgatctggaaggcccttcagcaggccattgccgacggcgaggtgacctatgacctggcccgccagattgaaggggcccgggaggtcaagtgctccgtgttcgcggaaagggtctgcgaaaagctgcgggccctggggcaacaggcctga

SEQ ID NO: 37226 - protein, 413 aa, Candidatus Desulfococcus oleovorans Hxd3
MANTQKITRNPDGSLNVPDMPVIPFIEGDGTGPDIWKAAKMVLDAAVDAAYGGSRKIAWQEVLAGEKAYEKTGQWLPEETLDTIREYVVAIKGPLTTPVGKGIRSLNVSIRQLLDLYACVRPVRYIDPIPSPMKQPEKVNMVVFRENTEDVYAGIEWEAGSAEAEKLIAFMKNELGASVAAGSGIGIKPMSEINTRRLVARAIAYAIAKGLSSVTLMHKGNIMKFTEGAFCTWGYKAARELFADRTITEAEVYEKHDGKPPGGRVMIKDRIADMLFQQILLRPDEYQVIACPNLNGDYISDALAAQAGGLGMAPGANIGDECAVFEATHGTAPKYAGLDKVNPGSLILSGAMMLEHMGWDEAGAMIWKALQQAIADGEVTYDLARQIEGAREVKCSVFAERVCEKLRALGQQA

SEQ ID NO: 37227 - DNA, 1257 bp, Pseudomonas putida GB-1
  CDS (1)..(1257): transl_table=11
atgggataccagaaaatcaaggttccgaccgacggcgccaagatcaccgtcaatgcagaccattcgctcaacgtgcctgacaatccgatcattccgtacatcgagggcgacgggatcggcatcgatgtctcgcccgtgatgatcaaggtggtcgacgccgccgtgcagaaggcctatggcggcaagcgcaagattgcctggatggaggtgtacgccggcgaaaaagccacccaggtatacgaccaggacacctggctgccgcaggaaaccctcgatgccgtgcgagattacgtggtgtcgatcaagggcccgcttaccaccccggtcggtggcggcatccgctcgctcaacgtggcgctgcgccagcagctcgacctgtacgtgtgcctgcgcccggtgctgtggttccagggtgtgccgagcccggtgaaaaagccgggcgacgtcgacatggtgatcttccgcgagaactccgaggacatttacgcgggcatcgagtggaaggccggctcgcccgaggcgaacaaggtgatcaagttccttaaagaggaaatgggcgtcaccaagatccgtttcgaccaggactgcggcatcggcgtcaagccggtatcccgcgagggcaccaagcgcctggtgcgcaaggccctgcaatacgtggtggacaatgaccgcgagtcgctgaccctggtgcacaagggcaacatcatgaagttcaccgaaggggccttcaaggactggggctacgaggtggcgcgggaggagttcggcgccgaactgctcgatggcggcccgtggatgaagttcaagagccccaagagtggccgcgaggtcatcgtcaaggacgccattgccgacgccatgctgcagcagattttgctgcgtccggccgagtacgacgtgattgccacgctcaacctcaacggtgactacctgtccgacgccctggcggcggaggtgggcggtatcggcattgcgccgggcgccaacctgtccgacaccgtggccatgttcgaggccacccacggcaccgcgcccaagtatgccgggcaggacaaggtcaacccgggctcggtgatactctcggcagaaatgatgctgcgccacatgggctggaccgaggccgccgacctgatcatcaagggcaccaacggcgcgattgcggccaagaccgtgacctacgatttcgagcggctgatggagggggcccggctggtgagcagctcaggttttggcgatgaaatgatcaagcacatgtaa

SEQ ID NO: 37228 - protein, 418 aa, Pseudomonas putida GB-1
MGYQKIKVPTDGAKITVNADHSLNVPDNPIIPYIEGDGIGIDVSPVMIKVVDAAVQKAYGGKRKIAWMEVYAGEKATQVYDQDTWLPQETLDAVRDYVVSIKGPLTTPVGGGIRSLNVALRQQLDLYVCLRPVLWFQGVPSPVKKPGDVDMVIFRENSEDIYAGIEWKAGSPEANKVIKFLKEEMGVTKIRFDQDCGIGVKPVSREGTKRLVRKALQYVVDNDRESLTLVHKGNIMKFTEGAFKDWGYEVAREEFGAELLDGGPWMKFKSPKSGREVIVKDAIADAMLQQILLRPAEYDVIATLNLNGDYLSDALAAEVGGIGIAPGANLSDTVAMFEATHGTAPKYAGQDKVNPGSVILSAEMMLRHMGWTEAADLIIKGTNGAIAAKTVTYDFERLMEGARLVSSSGFGDEMIKHM

SEQ ID NO: 37229 - DNA, 1748 bp, Bacillus israeli
  CDS (242)..(1519): transl_table=11
tttatttacgccgatttttgcaataagccgcacatctggatggttagcccatattttagagcaatatgaaaacaatcgattgattcgtcctcgtgcggaatatacaggaccagaaaaacaagtatttatccctatcgaaaagcgcagctaacaggtaaaatagaaaagggattcctttttcttccctgttaagcatggccatgcttttatacacaaatagagaatacatatttaggaggtaatgattgtggcagaaggtcaaaaaattacaatgacaaatggtactttaaacgttccaaatgatcctataattccgtttattgaaggagacggcactggtcctgatatttggagagctgcgtcaaaagtgctggaagcagctgtagaaaaagcatacaatggcgaaaagaaaatcgtttggaaagaagtgcttgctggtgaaaaagcttttaaagagactggggaatggcttcctcaagaaacgcttgatgtgatacgcgagtatatgattgcgatcaaaggtccgttaacaactcctgtaggtggaggaatccgttctttaaacgttgctcttcgccaagagctggatttatttgtgtgcttaagacctgtccgttatttcaatggagttccttcccctgtaaaacgtcctcaagatacagacatggtaattttccgtgaaaataccgaagacatctatgccggcatagagtatgcaaaagggacagaagaagtaaaaaaagtcattgaatttttacaaaaagagctgggagtaaacaaaatccgtttccctgaaacgtccggaatcggcattaagcctatttctgaagaaggaacgaaacggcttgtccgtgcggccattaactatgcaattgaacacggaagaaaatctgtcacccttgttcataaagggaacattatgaaatttacagaaggcgcgtttaaaaattggggatatgaattggctgagcaagagtttggcgataaagtattcacatgggctgagtatgaccgcattgttgaaaaagaaggaaaagaagcggctaacaaagcgcaagaagaagcagaaaaagctggaaaaattattattaaagatgcaattgcagatattttcctacagcaaattcttactcgtccgcgcgagtttgatgtagtagcaacgatgaatttaaatggagactacatttcggatgctttggctgcacaagtaggcggaatcggtattgctccaggagcaaacattaactacgagacagggcatgcgatttttgaagcaacacacggtacagcaccaaaatacgccggacttgataaagtgaatccatcttccgtaattctttctggagtgcttatgctcgaacatttaggctggaaagaagcagctgatttaatcattcaagcaatggaaaaaacgatcgcttcaaaagttgtcacctatgactttgcacgcctcatggacggagctacggaagtaaaatgctctgaattcggcaatgaattgattaaaaacatgggttaaacaaagaactgagagctgcttctttacgaagtagctctccatttagattcatttttgaaaaatcacttacataaaagagaggatggatgcttgaaatggcgattaaaagaaagaaaatttctgtcattggtgctggatttactggtgcgacaacagcttttttgctggcaaaaaaagagctgggagatgttgtgctcgttgacattccgcaagcagagaatccgacaaa

SEQ ID NO: 37230 - protein, 425 aa, Bacillus israeli
MIVAEGQKITMTNGTLNVPNDPIIPFIEGDGTGPDIWRAASKVLEAAVEKAYNGEKKIVWKEVLAGEKAFKETGEWLPQETLDVIREYMIAIKGPLTTPVGGGIRSLNVALRQELDLFVCLRPVRYFNGVPSPVKRPQDTDMVIFRENTEDIYAGIEYAKGTEEVKKVIEFLQKELGVNKIRFPETSGIGIKPISEEGTKRLVRAAINYAIEHGRKSVTLVHKGNIMKFTEGAFKNWGYELAEQEFGDKVFTWAEYDRIVEKEGKEAANKAQEEAEKAGKIIIKDAIADIFLQQILTRPREFDVVATMNLNGDYISDALAAQVGGIGIAPGANINYETGHAIFEATHGTAPKYAGLDKVNPSSVILSGVLMLEHLGWKEAADLIIQAMEKTIASKVVTYDFARLMDGATEVKCSEFGNELIKNMG

SEQ ID NO: 37231 - DNA, 1095 bp, Nicotiana tabacum
  CDS (1)..(1095)
atggcttttcagattgcgagaagactcctacgtagccgcgctagttcgtcgattaggtatttggatcggagcttcagttcggagtccaattcgaatttgatccgcgctactcttttccccggcgatggtattggccctgagatcgccgactccgtcagacagattttcaagactgctgaggtaccaattgaatgggaagaacactatgtagggaaggagatagaccctagaaccaatagttttctgacatgggagagtcttgaatcagtgagaagaaataaggttggtttgaaagggccaatggctacacctatcgggaaaggtcatcgttccttgaaccttacattgaggaaagagttaaatctatatgccaatgttagaccttgctacagcctacctggatacaagactcgctacgatgatgtcaatctcattactatcagggaaaacactgaaggagagtacagtggtgtggaacatcaagtcgtaaggggtgtggttgaaagtctcaagatcatcactcgtcaagcaagcttaagggttgcggagtacgcgtttcactatgccaaggctcatggaagagagagagtgtctgcaattcacaaagctaacatcatgcaaaagactgatggtcttttccttaagtgttgccgagaggtagcagagaagtaccctgagataaagtatgaggaagttgtcattgacaattgttgtatgatgcttgtgaaaaatccagcactttttgatattttggtgatgcctaacctttatggtgacattatcagtgacctttgtgctggtgtgattggtggtttgggcctaactccaagttgcaatattggtgagggaggtattgctcttgctgaggctgtgcatggttcagcacctgatattgctggaaagaacttggcaaatccaactgctttgcttttgagtgctgtaaccatgctacggcatttggagcttcatgataaagctgatcgtatccaaggtgctgtcctaaacacaattgcggaggggaagtaccgaacaggtgatcttggtggtacttcatcaactactgacttcacaaatgctatctgtgaccatctttaa

SEQ ID NO: 37232 - protein, 364 aa, Nicotiana tabacum
MAFQIARRLLRSRASSSIRYLDRSFSSESNSNLIRATLFPGDGIGPEIADSVRQIFKTAEVPIEWEEHYVGKEIDPRTNSFLTWESLESVRRNKVGLKGPMATPIGKGHRSLNLTLRKELNLYANVRPCYSLPGYKTRYDDVNLITIRENTEGEYSGVEHQVVRGVVESLKIITRQASLRVAEYAFHYAKAHGRERVSAIHKANIMQKTDGLFLKCCREVAEKYPEIKYEEVVIDNCCMMLVKNPALFDILVMPNLYGDIISDLCAGVIGGLGLTPSCNIGEGGIALAEAVHGSAPDIAGKNLANPTALLLSAVTMLRHLELHDKADRIQGAVLNTIAEGKYRTGDLGGTSSTTDFTNAICDHL

SEQ ID NO: 37233 - DNA, 1281 bp, Thermus aquaticus
  CDS (1)..(1281): transl_table=11
atggcttaccagcgcatccagattccgcaggagggcgaaaagatcaccatccaagagggcgtcctgaaggtgccggaccagcccatcatcggcttcattgagggggatgggaccggccctgacatctggagagcggcccaacccgtcctagacgccgccgtggccaaagcctacggcgggcaacggcgcatcgtctgggtggagctttacgccggggaaaaggccaaccaggtctacggggagcccatctggctccccgaggagaccctggagttcatccgggagtacctggtggccatcaagggccccctgaccacgccggtgggcggcggcatccggagcatcaacgtggccctcaggcaggagctggacctctacgcctgcgtgcgccccgtgcgctggttccagggggtgcccagtccggtgaagcacccggagctggtcaacatggtcatcttccgggagaacaccgaggacatctacgccgggattgagtggccggcggggagcgaggaggtaaagaaggtcctagacttcttgaagcgggagttccccaaggcctacgccaagatccgcttccccgagacctcgggcctgggcctgaagcccatctccaaggagggcacggagcgcctggtggaggcggccattgagtacgccatcaaggaggacctccccagcgtgaccctggtccacaaaggcaacatcatgaagttcaccgaaggggccttccgggagtggggctacgccctggcccgggaaaagtacggggccacgcccctggacggcgggccctggcacgtcctcaaaaacccccgcaccggcagggagatcgttatcaaggacatgatcgccgacaacttcctgcagcagatcctcctccgccccgacgaatactcggtgatcgccaccatgaacctgaacggggactacatctccgatgccctggccgcccaggtggggggcatcggcatcgcccccggggccaacatcaactacaagacgggccacgccgtctttgaggccacccacggcaccgcccccaagtacgctggccaggacaaggtgaaccccagcagcgtcatcctctccggggagatgatgcttcgctacctgggctggaacgaggcggcggacctcatcatcagggccatggagaggaccatcagcaagggcctggtcacctacgacttccaccgcctcctggtggccgagggcaagcccgccacgcttcttaagaccagcgagttcggccaggccctgatccagcacatggactga

SEQ ID NO: 37234 - protein, 426 aa, Thermus aquaticus
MAYQRIQIPQEGEKITIQEGVLKVPDQPIIGFIEGDGTGPDIWRAAQPVLDAAVAKAYGGQRRIVWVELYAGEKANQVYGEPIWLPEETLEFIREYLVAIKGPLTTPVGGGIRSINVALRQELDLYACVRPVRWFQGVPSPVKHPELVNMVIFRENTEDIYAGIEWPAGSEEVKKVLDFLKREFPKAYAKIRFPETSGLGLKPISKEGTERLVEAAIEYAIKEDLPSVTLVHKGNIMKFTEGAFREWGYALAREKYGATPLDGGPWHVLKNPRTGREIVIKDMIADNFLQQILLRPDEYSVIATMNLNGDYISDALAAQVGGIGIAPGANINYKTGHAVFEATHGTAPKYAGQDKVNPSSVILSGEMMLRYLGWNEAADLIIRAMERTISKGLVTYDFHRLLVAEGKPATLLKTSEFGQALIQHMD

SEQ ID NO: 37235 - DNA, 1116 bp, Medicago truncatula
  CDS (1)..(1116)
atggcaacaagaagatccatacccctcctcaaacacctcctctcaacccgatcccaatccgaaccattcactatctcaaagcgatgcgtaacctacatgcaccgtcccggcgacggaactccccgtcccgtaaccctaatccccggcgacgggatcggcccactcgtaaccggcgccgttgagcaactaatggaagcgatgcacgcgccagtttacttcgagaaattcgacgtacatggtgacatgaaagctgtacctacggaagttcttgaatcgatccgtaagaataaggtttgtcttaaaggtggattggttactcctatgggtggtggtgttagttcgcttaatgttcagttgaggaaagagcttgatctttatgcttctcttgttaattgttttaatcttcctgggttacctacacgacatgataacgttgatattgtagttattagggagaatactgaaggggagtatgctggtcttgaacatgaggttgttcccggtgtcgtcgaaagtcttaaggtgataacaaagttctgttctgagcgtattgctaaatatgcgttcgagtatgcttacctgaataacagaaagcaagtgactgctgtccacaaagcaaatataatgaagcttgcagatggtttgttcttggaatcttgtcgagaggttgccacaaagtatcctggaattaaatacaacgaaattattgtagacaattgttgcatgcagcttgtttcaaagcccgagcagtttgatgtcatggttaccccaaatctgtatggaaatctagttgcaaatactgcggcaggcattgctggaggcactggagtcatgccaggaggtaatgttggtgctgagcatgctgtgtttgagcagggtgcttcagcaggaaatgttggtaatgagaaagtagcggcacaaaagacagctaacccagtggcgcttcttctctcatcagctatgatgcttaggcatctccagtttcctgcatttgcggaccgtttggaaaacgctgttgaaaaagtcattctagagggcaagtatcggacaaaggatcttggagggacaagcaccacccaagaagttgtcgatgcagtaatagatgctttagattga

SEQ ID NO: 37236 - protein, 371 aa, Medicago truncatula
MATRRSIPLLKHLLSTRSQSEPFTISKRCVTYMHRPGDGTPRPVTLIPGDGIGPLVTGAVEQLMEAMHAPVYFEKFDVHGDMKAVPTEVLESIRKNKVCLKGGLVTPMGGGVSSLNVQLRKELDLYASLVNCFNLPGLPTRHDNVDIVVIRENTEGEYAGLEHEVVPGVVESLKVITKFCSERIAKYAFEYAYLNNRKQVTAVHKANIMKLADGLFLESCREVATKYPGIKYNEIIVDNCCMQLVSKPEQFDVMVTPNLYGNLVANTAAGIAGGTGVMPGGNVGAEHAVFEQGASAGNVGNEKVAAQKTANPVALLLSSAMMLRHLQFPAFADRLENAVEKVILEGKYRTKDLGGTSTTQEVVDAVIDALD

SEQ ID NO: 37237 - DNA, 1077 bp, Medicago truncatula
  CDS (1)..(1077)
atggcttctcagatccttagaagaacactcggaagccgctatttcgcaaaccacagatccttctcttccgattccactccgatccgcgccacccttttccccggcgatggtatcggtcccgaaatcgctgattccgtcaaacagatattccaagctgctgatgcgcaaatagaatgggaagagcattatgtagggactgaagttgaccctagaacaaagagctttctgacatgggaaagtttagaatcagttaggcggaataaggttggcttgaaagggccaatggccacccctatcggtaaagggcatcgttcactaaaccttactctaagaaaagagcttaatttatatgccaatgttcgaccttgctacagccttaatggatacaaaactcgatacgataatgttgatctcatcacaatccgtgaaaataccgaaggcgagtatagtggacttgaacatcaggttgtgaggggtgtagtagaaagtatcaaaatcattacacgtcaagcaagtataagggtagctgagtatgcttttcactacgccaaggaacatggaagaaagagagtgtctgctatacacaaagctaacattatgcaaaagactgatggtcttttcctcaagtgttgccgtgaggttgcagagaaatatcccgagatagtgtacgaggaagttgtcattgacaattgctgcatgatgcttgtgaagaatcctggactctttgatgtattggtgatgcctaacctttacggtgatataatcagcgacctgtgtgctggcttgattgggggattgggcttgacaccaagcctcaacattggtgagggaggtattgcacttgctgaggctgtacatggttcagcacctgatattgctggaaagaatttggcaaatccaacagctttgctgctgagctctgtctcaatgttgcgccatttggatctccatgacaaagcggatcggattcaaaatgccattcttaacacaattgctgaagggaagtaccgaactgctgatcttggtggcagttcaaagacaactgaatttacaaaagcaattattgatcatctttga

SEQ ID NO: 37238 - protein, 358 aa, Medicago truncatula
MASQILRRTLGSRYFANHRSFSSDSTPIRATLFPGDGIGPEIADSVKQIFQAADAQIEWEEHYVGTEVDPRTKSFLTWESLESVRRNKVGLKGPMATPIGKGHRSLNLTLRKELNLYANVRPCYSLNGYKTRYDNVDLITIRENTEGEYSGLEHQVVRGVVESIKIITRQASIRVAEYAFHYAKEHGRKRVSAIHKANIMQKTDGLFLKCCREVAEKYPEIVYEEVVIDNCCMMLVKNPGLFDVLVMPNLYGDIISDLCAGLIGGLGLTPSLNIGEGGIALAEAVHGSAPDIAGKNLANPTALLLSSVSMLRHLDLHDKADRIQNAILNTIAEGKYRTADLGGSSKTTEFTKAIIDHL

SEQ ID NO: 37239 - DNA, 1251 bp, Colwellia psychrerythraea
  CDS (1)..(1251): transl_table=11
atgacaagtaaaatcacagttcccagtataggtgataaaattactgtatctaacggtaaattatcagtgccaaacaatcctatcattccttttatagaaggtgatggtattggtgtggatgttaccccacctatgattaaagtagttgatgctgctattagtaaagcttacggcagtgagagaaaaattgcctggatggaagtttatgcgggtgagaaagcaactcaagtgtatgattctgaaacatggttaccagatgaaacattagaaatgtttaaagaatacaaagttggtattaaagggccattaactacgcctgttggtggtggaatgcgttcgttgaatgtagccttacgtcagattttagatttgtatgtttgccaacgtccagtgcaatggtttacaggcgtaccaagccccgttaaaagacctagtgaagttgatatggttatttttcgtgaaaatacggaagacatatatgctggtattgagtatcaagctggcacagatgcagctaaaaaggttattactttcttaacggaagaaatgggagtgacgaaaatccgctttactgaagattgtggtatcggtattaagcctgtttctaaagaaggcactcaacgtttagtacgccaagcaatacagtatgctattgatcataatagagactctgtaacattagtgcataaaggtaatatcatgaaatttaccgaaggcgcttttaaagattggggttatgaattagcttgtgaagagtttggagcagagttaattgatggtggaccttggtgtagtgttaaaaatcctaaaacaggtaaagaaatcatcataaaagatgtcattgctgacgctatgttgcagcaaatcttgcttcgcccagcagaatatagtgtcatagcaacacttaatttaaatggtgattacttatctgatgcattagcagcacaagtgggtggtattggtatcgccccaggcgctaacttaaatgatgaagtagcaatatttgaggcgactcatggtactgctcctaaatacgcagggaaaaataaagtgaaccccggctctgtgattttatcagcagaaatgatgttacgacatatggggtgggtagaagctgctgatttactgttaaagggaatgtcaggagctattggagctaaaacagttacttatgattttgaacgtttaatggatgatgcgactttagtcacttgttctcaatttggtgattgtattattgaacatatgtaa

SEQ ID NO: 37240 - protein, 416 aa, Colwellia psychrerythraea
MTSKITVPSIGDKITVSNGKLSVPNNPIIPFIEGDGIGVDVTPPMIKVVDAAISKAYGSERKIAWMEVYAGEKATQVYDSETWLPDETLEMFKEYKVGIKGPLTTPVGGGMRSLNVALRQILDLYVCQRPVQWFTGVPSPVKRPSEVDMVIFRENTEDIYAGIEYQAGTDAAKKVITFLTEEMGVTKIRFTEDCGIGIKPVSKEGTQRLVRQAIQYAIDHNRDSVTLVHKGNIMKFTEGAFKDWGYELACEEFGAELIDGGPWCSVKNPKTGKEIIIKDVIADAMLQQILLRPAEYSVIATLNLNGDYLSDALAAQVGGIGIAPGANLNDEVAIFEATHGTAPKYAGKNKVNPGSVILSAEMMLRHMGWVEAADLLLKGMSGAIGAKTVTYDFERLMDDATLVTCSQFGDCIIEHM

SEQ ID NO: 37241 - DNA, 1158 bp, Aspergillus oryzae
  CDS (1)..(1158)
atgtttgccactaggaacttcgctctccctgcccgccaatgcttgcggagcactcgtgtctccccacgcattgcttcgcccttgtcgcagctccgtggttatgccgctgctaccgacgagcgtgtcgctaagttcaagggccagaaggacaccgatggaaagtacactgtcactctgattgagggtgatggcattggtcctgagatctcgcagtccgttaaggacatcttcgctgccgcaaacgcccccatcaagtgggagccagtcgatgttactcctatcttgaaggatggaaagaccgccattcccgatgaagccattgagagcgtgaagaggaactacgtcgccctcaagggaccccttgctactcccgttggcaagggacacgtttctctgaaccttactctccgccgcaccttcaaccttttcgccaacgtgcgtccttgccgttccgttgctggctacgagaccccctacgacaacgtcgataccgtcctgatccgtgagaacaccgagggtgaatactctggcattgagcacgtcgttgtcgatggcgttgtgcagagcattaagctcatcacaaaggaggcctctgagagagttctgcgctttgccttccaatacgctcgttccatcaacaagaagaaggtccgcgtcgtgcacaaggctaccatcatgaagatgtccgatggtctcttcttgaacctcgcccgtgatattgccaaggagttccccgatatcgaattcgacgcagagctgctggacaactcttgcctcaagatcgtcactgaccccacgccttacaacgacaaggttcttgtcatgcctaacctctacggtgacattctttccgacatgtgcgccggtctgatcggtggtcttggtctcactccctccggtaacatcggtaacgagtgctccattttcgaggctgtccacggctctgcccccgacattgccggcaagggcctcgctaaccccactgctctgcttctgagcagtatcatgatgctgcagcacatgaacctcggcgagcatgctgctcgtatccagaaggccacttttgatacccttgccgaaggaaagactctcactggtgacttgggcggcaaggccaagacccacgagtatgctgaggccatcatgaagcgtctgtaa

SEQ ID NO: 37242 - protein, 385 aa, Aspergillus oryzae
MFATRNFALPARQCLRSTRVSPRIASPLSQLRGYAAATDERVAKFKGQKDTDGKYTVTLIEGDGIGPEISQSVKDIFAAANAPIKWEPVDVTPILKDGKTAIPDEAIESVKRNYVALKGPLATPVGKGHVSLNLTLRRTFNLFANVRPCRSVAGYETPYDNVDTVLIRENTEGEYSGIEHVVVDGVVQSIKLITKEASERVLRFAFQYARSINKKKVRVVHKATIMKMSDGLFLNLARDIAKEFPDIEFDAELLDNSCLKIVTDPTPYNDKVLVMPNLYGDILSDMCAGLIGGLGLTPSGNIGNECSIFEAVHGSAPDIAGKGLANPTALLLSSIMMLQHMNLGEHAARIQKATFDTLAEGKTLTGDLGGKAKTHEYAEAIMKRL

SEQ ID NO: 37243 - DNA, 1161 bp, Aspergillus oryzae
  CDS (1)..(1161)
atgttttccctaaggacagcgcagcccgcgcaatctttccttcgtcgcgctgcggtgacagctcccaccgtccgctcctccttggcagcaagatccttcgctagcgttcagtcggacatcttcaagccgaccaagtatggcggcaaatacacggtcacgcttattccaggtgatggaatcggtgctgaagttgctgaatcggtcaagaccatttttaaagccgataatgtgcccattgagtgggagcaggtagatgttagtggtgttgatgcgggcaacaaacactcggaagaactttttaaggaatctatcgcttcccttcgccgcaacaagctgggtctcaagggtatcctcttcactcctgttgagcgctcgggccaccaatcattcaatgttgctctccgacaggagcttgatatttttgcctcaattgttctgatcaagaacatcccgggctacaagacacgccatgagaatgtcgacctttgcatcatccgtgagaacaccgagggagaatactctggccttgaacatcagtctgttcagggtgtcgtcgagtcgctgaaaattatcactcgtgccaaatctgagcgtatctctaaatttgcctttggctttgccctggcaaacaacaggaagaaggtcacctgcattcacaaggcaaacatcatgaaattggccgacggtctgttccgtagcactttccacaaggttgccgagaactatccgactctggaggtcaacgatatgattgttgacaatgcatccatgcaggccgtgtcccggccccagcagtttgatgtcatggtcatgcccaatctgtacggcggaattctttctaatgtcggtgcagcccttgttggcggcccaggcgttgtccctggctgcaacatgggtcgcgacgttgctgtatttgaacccggctgccgtcatgtcgggctcgatatcaagggcaaggaccaggcgaaccctagtgctatgattctctccgggtctatgcttctgcgccacctcggcttggatgatcacgcaaacagaatctccaaggctgtgtacgatgtcattggtgaaggtaaaacgagaacccgcgacatgggtggtcaggctaccacccatgaattcaccagggccgttctggacaagatggaggctgctttgtaa

SEQ ID NO: 37244 - protein, 386 aa, Aspergillus oryzae
MFSLRTAQPAQSFLRRAAVTAPTVRSSLAARSFASVQSDIFKPTKYGGKYTVTLIPGDGIGAEVAESVKTIFKADNVPIEWEQVDVSGVDAGNKHSEELFKESIASLRRNKLGLKGILFTPVERSGHQSFNVALRQELDIFASIVLIKNIPGYKTRHENVDLCIIRENTEGEYSGLEHQSVQGVVESLKIITRAKSERISKFAFGFALANNRKKVTCIHKANIMKLADGLFRSTFHKVAENYPTLEVNDMIVDNASMQAVSRPQQFDVMVMPNLYGGILSNVGAALVGGPGVVPGCNMGRDVAVFEPGCRHVGLDIKGKDQANPSAMILSGSMLLRHLGLDDHANRISKAVYDVIGEGKTRTRDMGGQATTHEFTRAVLDKMEAAL

SEQ ID NO: 37245 - DNA, 1080 bp, Aspergillus oryzae
  CDS (1)..(1080)
atggctgccgctaggacgcttcgcataggtctcatccccggtgacggtatcggccgggaggtcattccggccggtaggaaagtgttggaatctctcccagcttctctcaacctcaatttcagcttcgtcaacctggatgctggtttcgataccttcaagcagaccggcactgccctgcccgacaagactgtcgagaccttgaagaaggaatgtgatggtgctttgtttggagctgtcagctccccgagcaccaaggtcgccggctactcgtcccctattgtcgctctccgcaagaagttggacctctatgccaacgtccgtccagtcaagtctaccattggcggtggacggaaccccgtcgatctggtcatcgtccgcgagaacaccgaggacttgtacgtgaaggaggagcagaccaaggacacccccaacggtaaggttgcggaggctatcaaacggatctccgagaatgcctcattccggatctcctccattgcaggagagatcgccctgcgccggcagaagatccgcgacgcggcttccactacgggcctgcgcacgaagcccatggtgaccatcacccacaagtccaacgtgctgtcgcaaaccgacggcctcttccgtgagactgcccgcaaggctcttgctgccgagcgcttttcctccgtggaggtggaggagcagattgtcgactcgatggtgtacaagcttttccgccagcctgagtactacgacgtcattgttgcccctaatctctacggtgatatcctgtccgacggtgccgctgccctggtcggtagcttgggtcttgtccccagcgccaacgttggtgacggctttgccattggtgagccctgccacggtagtgcgcctgacattgagggtcagggcattgccaaccctatcgccaccctgcgtagtgcagccctgatgctggagttcttgggcgaggaaggtgctgccgccaagatctacaccgccgttgatgccaacttggacgagggcaagtacctctcccctgacatgggtggaaaggcttcgacccaggaggtccttgacgacgttctgaagaggctgtaa

SEQ ID NO: 37246 - protein, 359 aa, Aspergillus oryzae
MAAARTLRIGLIPGDGIGREVIPAGRKVLESLPASLNLNFSFVNLDAGFDTFKQTGTALPDKTVETLKKECDGALFGAVSSPSTKVAGYSSPIVALRKKLDLYANVRPVKSTIGGGRNPVDLVIVRENTEDLYVKEEQTKDTPNGKVAEAIKRISENASFRISSIAGEIALRRQKIRDAASTTGLRTKPMVTITHKSNVLSQTDGLFRETARKALAAERFSSVEVEEQIVDSMVYKLFRQPEYYDVIVAPNLYGDILSDGAAALVGSLGLVPSANVGDGFAIGEPCHGSAPDIEGQGIANPIATLRSAALMLEFLGEEGAAAKIYTAVDANLDEGKYLSPDMGGKASTQEVLDDVLKRL

SEQ ID NO: 37247 - DNA, 1158 bp, Neurospora crassa
  CDS (1)..(1158)
atgctctccagaaactccatgcgccttgctcgggccgttgcccagcccaccccccgcctcgcccgcggcttcgccagcgtccaggacactcctgcgcagaccctccagtccgacatcttcaagcccaccaagtacggcggcaagtacaccgtcaccctcatccccggtgacggtatcggtgccgaggttgccgagtccgtcaagaccgtcttcaaggccgacaatgtccccattacctgggagcagatcgaggtttcgggtgtccaggacaacgccagccgcaccgaggaggctttccagcaggccgttgcctctctgaggaggaacaagctcggtctcaagggtatcctccacacccccatcagccgctccggccaccagagcttcaacgtcgccatgcgccaggagctcgacatctacgcctccatctcgctcgtcaagaacctccccggcctccaaacccgccacaaggacgtcgatctctgcatcatccgtgagaacaccgagggtgagtactccggtctcgagcaccagtctgtcgatggcgtcgtcgagtccctcaagatcatcacccgcgccaagtccgagcgcatcaccaagttcgccttccagttcgcccttgccaaccagcgcaagaaggttacctgcattcacaaggccaacatcatgaagcttgccgatggtctcttccgcggcaccttcaaccgcctcgccaaggacttccctcagctcgagtgcaacgacatgatcgtcgataacgcctccatgcagtgcgtcagcaagccccagcagttcgacgttatggtcatgcccaacctttacggtggcattctctccaacatcgccgctgcccttgtcggtggccccggtgtcgtccccggctgcaacatgggccgtgacgtcgccgtctttgagcccggctgccgtcacgtcggtcttgatattcagggcaaggaccaggccaaccctaccgctctccttctcagcggtaccatgctcctccgccacctcggtcttgatgaccacgccaaccgcatctccaacgccgtctacgacgtcattgctcagggcaaggtccgcacccgcgatatgggcggcgaggcctccacccacgagttcactcgcgccatcctcgactccatggagaagtctctctaa

SEQ ID NO: 37248 - protein, 385 aa, Neurospora crassa
MLSRNSMRLARAVAQPTPRLARGFASVQDTPAQTLQSDIFKPTKYGGKYTVTLIPGDGIGAEVAESVKTVFKADNVPITWEQIEVSGVQDNASRTEEAFQQAVASLRRNKLGLKGILHTPISRSGHQSFNVAMRQELDIYASISLVKNLPGLQTRHKDVDLCIIRENTEGEYSGLEHQSVDGVVESLKIITRAKSERITKFAFQFALANQRKKVTCIHKANIMKLADGLFRGTFNRLAKDFPQLECNDMIVDNASMQCVSKPQQFDVMVMPNLYGGILSNIAAALVGGPGVVPGCNMGRDVAVFEPGCRHVGLDIQGKDQANPTALLLSGTMLLRHLGLDDHANRISNAVYDVIAQGKVRTRDMGGEASTHEFTRAILDSMEKSL

SEQ ID NO: 37249 - DNA, 1320 bp, Thermoproteus tenax
  CDS (1)..(1320): transl_table=11
atgtcagattacctagagaaaataaaggcgcagatacccaatatccagccgtttgccggcaaatacgctgagcccgtcgagggctcgtacataacttacacaggcccaggacagttgaaagtaccagataaggtagtcataggctacattgagggcgacggcacagggcctgaggtcgcctacgccgccattaaggtggccaacgcggccgtcgagagggcctacggcaagtcgcgcagagtgctctggtatgaggtgctcgtggggtctaaggctgagaaaatattgggcagtagactgcccgatcagagcgtggaagtgctaaagaagatcagagtgttcctcaaggcgcctttagagacgcctgtgggcggcggcttccgtagccttaacgtaacattgagacagatatttgacctctacgccaacatcaggcccgtcaagtacttccccggtctaccctcgcctctgaagaggccggagagcgtagacttagtcatattcagagagaacactgaggacgtctatatgggcattgaatggccttggaattcgccggaggccgccaaggtgagagagttcttgaggagagagctcaaagtcgatataagggacgacgccggcataggcataaagcccataagcaagttcgggacccagaggatagcgcggctcgcgttgaagttcgctgtggagaacaagagaagggtcgtcaccataatgcacaaaggaaatattcagaagtacacggagggcgcgtttagagattgggcctatgaggtggccaagaacgagttcagagaccacgtggttctggaggaggagttggcccagtatggaggcaaagtgccgccgggcaagatcttggtcaatgataggatagccgacaatatgttgcaacagctgttaacgcgcaccggcgagtacgacgtcatcctagcgcccaatctcaatggggactacgtgagcgatgaggcggcgggcctagtgggcggactcggcgtggcgcccggcatagatgtgggcgattgggggatgatggccgagccagtgcatggcactgcgcccaaatacacgggcaagaactacgtcaaccccactgcgactatcctggcgcttgagctgctcttcaggttcatcggctggagagaggccgctgacttgataacgaggggcgtcagcaaggcctactcagaggggtacttcaccggcgacttagccaggcagatgaccgatgaggaaaggaaagttgtaaaggaagtgcttggaactcaagaatttgctgagaaagtagctgagataatcaaaaccgagctataa

SEQ ID NO: 37250 - protein, 439 aa, Thermoproteus tenax
MSDYLEKIKAQIPNIQPFAGKYAEPVEGSYITYTGPGQLKVPDKVVIGYIEGDGTGPEVAYAAIKVANAAVERAYGKSRRVLWYEVLVGSKAEKILGSRLPDQSVEVLKKIRVFLKAPLETPVGGGFRSLNVTLRQIFDLYANIRPVKYFPGLPSPLKRPESVDLVIFRENTEDVYMGIEWPWNSPEAAKVREFLRRELKVDIRDDAGIGIKPISKFGTQRIARLALKFAVENKRRVVTIMHKGNIQKYTEGAFRDWAYEVAKNEFRDHVVLEEELAQYGGKVPPGKILVNDRIADNMLQQLLTRTGEYDVILAPNLNGDYVSDEAAGLVGGLGVAPGIDVGDWGMMAEPVHGTAPKYTGKNYVNPTATILALELLFRFIGWREAADLITRGVSKAYSEGYFTGDLARQMTDEERKVVKEVLGTQEFAEKVAEIIKTEL

SEQ ID NO: 37251 - DNA, 2115 bp, Hydrogenobacter thermophilus
  CDS (777)..(2042): transl_table=11
aagcttgacaagaagtttaacaaagtggtctctgttggtatgtttgaacatgtgggaaagggaaggcacagaaagttctttagagtggtggagaaagttattcatgagggggggctctttcttcttcatactatagggaaggttctgccagagagccagagcaggtggatcagaaagtatatattcccgggtgggtatatacctgcacttacagagatacttgaagcatcaaaaggtttgggttttaacctcatagatatagatgactggaggcttcactactatagaacacttagagagtggagaaaaagattttatcagcatacccgagatgttgtacagaagcacggtgaggaattctttcgtatgtgggagctttatcttgtttcttccgccgtctcattcctaacagggtccaaccatcttttccagattctattctccaagggtgttctcaataactacccgattatgaaaagacagtttatagtcaataattttgtggtttaacaaagaaagggctaaactgaggtcttggatggattgcttaaagaattagataaaagagctgagagaacttgagataaaggacaatgtattgaacaaggtttttcatgcagaccttttgggagcattgaacatagtggataggggatagtaagcagggagtattacttcctgcagggtggatggaaaaacttggaacttaaaacccagttttttcatagctgaggtgttaaaatattgaaatcataactgacggagaggtgaaagcgatgttaaaggtggaaagtgtttataggtgggaaggtagcctgaaggtgccacaagaaggaaagtttataaaactcaaggaggacaaaagtatagaagtgcctaactttcccatcatacctttcatagagggggatggaataggtgccgagattatgcctgccatgatacacatagtaaatactgccgtagagaaggcttacggaggttcaagaaacatcttttgggtagagcttctggccggggacaaggctgaagaaaagacaggcaagcgtatgccagaagagactatagagtttttaaaggaagcggttgttggcataaagggacctcttggcacacccgtaggtaagggaggtaaatctctcaatgctatcttgcgccagtctatggacttctattcagccataagacctgtctattggctgggtcagcctgcacccatacctaaccccgagagggtcaatgtggctgtctttagagaaaattctgacgatgtttatatgtccatagagtacatgcctaaggaggaaaggacgcagaaggttaggaagttctttattgaagagatgggagtgtccgaatatgcccttcccgaggattgtggcatcacggtaaagcctatgagtgagtttaagacaaaaaggcatgtaagaaaagctctccgttgggctttgcagaataacaaaaaggtggtagctgttgtaggcaaaggcaacataatgaaagctacggaaggtgcctttatgaactgggcttttgaggtggcaaaagagcctgagtttgaaggaaaagtgataacggagggagagccaaaagatggtcaggttttgatggttaaagttatcaccgatcagatgctcatgcagctggtgttaaagccggaggcttaccatgtgataataactcaaaacctgaatggagattacatatctgaccttgcctccgcattggtgggtggtccagggtttgtgcccagcggaaacataggtgacggatatgccctgtttgaaagcactcacggaaccgcctacgacatagcaggcaaaggtattgccaatcctctatcgctgacgctgtccggtgctatgatgcttgaatacttgggttggaaagaagcctccgagcttatatactccgcagtcaaaaggaccatagctgaaaggcttggaacgccggacatagctaacggctttagaaagcagggattggaagctaaagagcttaccaccttagagtttgctaaagctatagccgataggatttaactcaagacttgcctttatcctgaatatgcccaggtcaacgacggactcttttggcacatcaaagggtaagctt

SEQ ID NO: 37252 - protein, 421 aa, Hydrogenobacter thermophilus
MLKVESVYRWEGSLKVPQEGKFIKLKEDKSIEVPNFPIIPFIEGDGIGAEIMPAMIHIVNTAVEKAYGGSRNIFWVELLAGDKAEEKTGKRMPEETIEFLKEAVVGIKGPLGTPVGKGGKSLNAILRQSMDFYSAIRPVYWLGQPAPIPNPERVNVAVFRENSDDVYMSIEYMPKEERTQKVRKFFIEEMGVSEYALPEDCGITVKPMSEFKTKRHVRKALRWALQNNKKVVAVVGKGNIMKATEGAFMNWAFEVAKEPEFEGKVITEGEPKDGQVLMVKVITDQMLMQLVLKPEAYHVIITQNLNGDYISDLASALVGGPGFVPSGNIGDGYALFESTHGTAYDIAGKGIANPLSLTLSGAMMLEYLGWKEASELIYSAVKRTIAERLGTPDIANGFRKQGLEAKELTTLEFAKAIADRI

SEQ ID NO: 37253 - DNA, 1020 bp, Oryza sativa subsp
  CDS (1)..(1020)
atgcccaggccaggggacgggaacccgcgcgccgtgacgctgatcccgggggacgggatcgggccgctcgtgacgggggccgtgcagcaggtgatggaggtgatgcacgcgccggtctacttcgagacctacgaggtccgcggcgacatgcccaccgtgccgcccgccgtcatcgagtccatccgccgcaacaaggtgtgcctcaagggcggcctcgccacccccgtcggcggcggggtctcctccctcaacatgcagctccgcaaggagctcgacctctacgcctcgctcgtcaactgctccaacttccccggcctccccaccaggcaccaggacgtcgacatcgtcgtcatcagggagaacaccgagggggagtactcggggctcgagcacgaggtcgtgcccggcgtcgtcgagagcctcaaggtgataacaaagttttgctctgagaggattgccaaatatgcttttgagtatgcttaccttaacaaccgaaagaaagtcacagcagtgcataaagcaaacatcatgaagcttgctgatggtttgttcttggaatcttgccgtgaggttgcctcaaagtatcctggtattcagtataatgagatcattgtcgacaactgctgtatgcaacttgttgcaaagcctgagcaatttgatgtcatggttacaccaaacctttatggcaatttggttgctaacacggctgcaggtattgctggagggacaggtgttatgcctggaggtaatgtgggtcaggaccatgctgtctttgagcaaggtgcttctgcaggaaacgtcggaaacgagaacatcttagagcagaagaaagcaaaccctattgcgctgcttctatcatccgccatgatgttgaggcatttgcagttcccgtcattcgccgaccggctggagacggcggtgaagcgtgtcattgcggaaggcaagtacagaacaaaggatctaggcggcaccagcaccacccaggaagtcactgatgcagtaatcgccaatctggattag

SEQ ID NO: 37254 - protein, 339 aa, Oryza sativa subsp
MPRPGDGNPRAVTLIPGDGIGPLVTGAVQQVMEVMHAPVYFETYEVRGDMPTVPPAVIESIRRNKVCLKGGLATPVGGGVSSLNMQLRKELDLYASLVNCSNFPGLPTRHQDVDIVVIRENTEGEYSGLEHEVVPGVVESLKVITKFCSERIAKYAFEYAYLNNRKKVTAVHKANIMKLADGLFLESCREVASKYPGIQYNEIIVDNCCMQLVAKPEQFDVMVTPNLYGNLVANTAAGIAGGTGVMPGGNVGQDHAVFEQGASAGNVGNENILEQKKANPIALLLSSAMMLRHLQFPSFADRLETAVKRVIAEGKYRTKDLGGTSTTQEVTDAVIANLD

SEQ ID NO: 37255 - DNA, 1299 bp, Myxococcus xanthus
  CDS (1)..(1299): transl_table=11
  misc_feature (794)..(794): n is a, g, c or t
  misc_feature (968)..(968): n is a, g, c or t
atggcgcccccgtcatccggagaaaagatctccctgcagagcggcaagctgtccgtcccggacaacccgatcatccccttcatcgagggcgatggcaccggccgcgacatctggcgtgcgtcccaggcggtgttcgacgccgcggtggagaaggcctacaagggcaagaagaagatcgcctggtacgaagtcctggccggcgagaagtccttcaaggcggtcaacaactggctgcccgaggagacggtcgaggcgttccgcacctatctggtgggcatcaagggccccctgacgacgccggtgggcggcggcatccggtcgctgaacgtggccctgcggcagatgctggacctgtacgtctgcctgcgccccgtgcgctacttcaagggcgtgcccagcccggtgaagatgccggacaaggtcgacatgaccatcttccgtgagaacacggaagacatctacgcgggcatcgagttcgaggccggcacggccgccgcggagaagttcctgggcctgctgaagcaggagttcccgaaggagttcgggaagatccgcttcccgtccgacgtgggcctgggcatcaagccggtgtcccacgagggcagcgaccggctgatccgcgccgccatccagtacgccgtggaccacaagcgcaagagcgtcacgctggtccacaagggcaacatcatgaagttcaccgagggcgccttccgcaagtggggctacgagctggccgcccgggagttcggtgacaaggtctacacctgggaccagtgggaggccaccaaggccgncaagggcgaggacgccgccaacgcggagcagaaggccgcgctggccgccgggaagatcctgatcaaggactccatcgcggacatcaccctgcagcaggtcctcacccgtccggatgagttcgacgtcatcgccacgctgaacctcaacggtgactacctgtcggacgcgctggnggcgcaggtgggcggcatcggcatcgcgccgggcggcaacatcaactacgtcacgggccacgcggtgttcgaggccacgcacggcacggcgcccaagtacgccgaccaggacaaggtgaacccgggctcggtcatcctctccggtgagatgatgttccggcacctgggctggtacgaggcggccgacctgatgatccagggcatggaccgcgccatcgccagcaagacggtgacctacgacttcgcccgcctgatgaagcaggaagggcagagcggcgtctccgaggtcaagtgctccgagttcgggcaggccatcatcaagaacatgtag

SEQ ID NO: 37256 - protein, 432 aa, Myxococcus xanthus
  misc_feature (265)..(265): The Xaa at location 265 stands for Ala, Asp, Gly, or Val.
  misc_feature (323)..(323): The Xaa at location 323 stands for Ala, Glu, Gly, or Val.
MAPPSSGEKISLQSGKLSVPDNPIIPFIEGDGTGRDIWRASQAVFDAAVEKAYKGKKKIAWYEVLAGEKSFKAVNNWLPEETVEAFRTYLVGIKGPLTTPVGGGIRSLNVALRQMLDLYVCLRPVRYFKGVPSPVKMPDKVDMTIFRENTEDIYAGIEFEAGTAAAEKFLGLLKQEFPKEFGKIRFPSDVGLGIKPVSHEGSDRLIRAAIQYAVDHKRKSVTLVHKGNIMKFTEGAFRKWGYELAAREFGDKVYTWDQWEATKAXKGEDAANAEQKAALAAGKILIKDSIADITLQQVLTRPDEFDVIATLNLNGDYLSDALXAQVGGIGIAPGGNINYVTGHAVFEATHGTAPKYADQDKVNPGSVILSGEMMFRHLGWYEAADLMIQGMDRAIASKTVTYDFARLMKQEGQSGVSEVKCSEFGQAIIKNM

SEQ ID NO: 37257 - DNA, 1448 bp, Brassica napus
  CDS (82)..(1188)
ccacgcttccgactcttcttcatcttcttcctctgacgatcattttcagaagaacagattccgatcaaaaacttgcggaagatgtctcgccgccaatccctctctctactgaagaatatcggtagattcaccaccgggtcccaaacccagacccgatccgtgacttacatgccgagacccggcgacgggaagccacgaccggtgacgttgatccccggagacggagtaggacctctggtgacaaacgcggtggagcaagtgatggaggcgatgcacgcgcccgtgtacttcgagcccttcgacgttcacggagacatgaagagtttgccggaggggttgctggagtcgataaagaagaacaaggtttgtttgaaaggagggctcaagactcccgtaggtggaggtgtgagctcgctgaatgttaacttgaggaaggagcttgatctgtttgcttctttggtcaactgttttaatttgcctgggttagggtctcgtcatgagaacgttgatatagtggtgattagagagaacactgaaggtgagtatgcagggcttgagcatgaagttgttcctggtgttgttgagagccttaaggtgattacaaagttttgttccgagcgtattgcaaagtatgcgttcgagtacgcctacttgaacaacaggaagaaagttacagcagtgcacaaggccaacatcatgaagctcgcggatggtctgttcttggaatcttgtcaagaggttgctaagaagtatccaagcatcgcctacaacgagatcattgttgataactgctgtatgcaacttgtagctagaccagagcaattcgacgtcatggtgacacccaatctctatggtaatctagttgcaaacactgctgctggtattgctggcggcactggagtcatgcctggaggaaacgtaggagcagagtatgcggtgtttgagcaaggtgcatcagcggggaacgtggggaaggacacgacggaagagcagaagaatgcaaatcctgtggcgttgctgctctcatcagccatgatgcttagacatcttcagttcccttcttttgctgataggcttgaaaccgcggtgaagagagtcattgctgaaggaaaatgcaggactgaagatcttggcggaaagagtacaacccaagaggtcgttgatgccgtcatttcaaatttggattgagtcattcatcactcctcgagataggtggtatacatgattcacaccacgctggtctacaggtgtgtacctctatttttcccacatttttttcaagataactcggaagtgggttccgtaactcccactcaaaagatactagttgatatatttttaattgggttgtcgtcaaattgcgattttgctctcccaagaagaaaggaaaggatacatacttgtatgatccttttgttaaaaaaaaaaaaaaaaaaaaaaaaaaaaaa

SEQ ID NO: 37258 - protein, 368 aa, Brassica napus
MSRRQSLSLLKNIGRFTTGSQTQTRSVTYMPRPGDGKPRPVTLIPGDGVGPLVTNAVEQVMEAMHAPVYFEPFDVHGDMKSLPEGLLESIKKNKVCLKGGLKTPVGGGVSSLNVNLRKELDLFASLVNCFNLPGLGSRHENVDIVVIRENTEGEYAGLEHEVVPGVVESLKVITKFCSERIAKYAFEYAYLNNRKKVTAVHKANIMKLADGLFLESCQEVAKKYPSIAYNEIIVDNCCMQLVARPEQFDVMVTPNLYGNLVANTAAGIAGGTGVMPGGNVGAEYAVFEQGASAGNVGKDTTEEQKNANPVALLLSSAMMLRHLQFPSFADRLETAVKRVIAEGKCRTEDLGGKSTTQEVVDAVISNLD

SEQ ID NO: 37259 - DNA, 1104 bp, Brassica napus
  CDS (1)..(1104)
atgtctcgcagatcgctaactctcctcaagaacctcgccagaaactcaaacgcctcatgcatccaaacccgatccgtgacctacatgccccgacccggcgacggatccccgcgcgcagtgaccctcatccccggcgatgggatcggccctctggtgacgaacgccgtggagcaggtgatggaagcgatgcacgcgccgatctacttcgagaagtacgacgtgcagggggagatgagccgcgtgccggcggaggtgatggagtcgatacggaagaacaaggtgtgcttgaaaggcgggctcaagacccccgtgggcggcggcgtgagctcgctcaacgtgcagctgaggaaggagcttgacctctttgcctcgcttgtcaactgcttcaacttgcccgggttgcccaccaggcatgagaatgttgatatcgttgtgattagggagaatactgaaggcgagtatgctgggcttgagcatgaggttgttcctggtgttgttgagagtcttaaggtgatcacgaagttctgttcggagcgtatagcgaagtatgcttttgagtatgcttacctgaacaacaggaagaaagtgacggcggtgcacaaggctaacatcatgaagcttgctgatggtttgttcttggagtcttgtcgtgaggttgctaaaaagtatccagggatcacttacaatgagattattgtcgataactgctgcatgcaacttgtagccaagccagagcagtttgacgtcatggtaacacccaatctctatggtaatttagttgcaaacactgccgctggtattgctggaggcaccggagtcatgcctggaggaaacgtgggggctgaccatgcggtgtttgagcaaggtgcatcagcaggaaatgtcgggaaagactcgatagtaagggaaaacaaagcaaacccagtggcgttgcttctctcatcagccatgatgcttagacatcttcagtttccttcatttgctgaccggctcgaaacagcagtgaagaaagtgatctctgaaggaaagtgccggactaaagatcttggtggacaaagcactactcaagaggtcgttgacgcagtcattgcaaagttggagtga

SEQ ID NO: 37260 - protein, 367 aa, Brassica napus
MSRRSLTLLKNLARNSNASCIQTRSVTYMPRPGDGSPRAVTLIPGDGIGPLVTNAVEQVMEAMHAPIYFEKYDVQGEMSRVPAEVMESIRKNKVCLKGGLKTPVGGGVSSLNVQLRKELDLFASLVNCFNLPGLPTRHENVDIVVIRENTEGEYAGLEHEVVPGVVESLKVITKFCSERIAKYAFEYAYLNNRKKVTAVHKANIMKLADGLFLESCREVAKKYPGITYNEIIVDNCCMQLVAKPEQFDVMVTPNLYGNLVANTAAGIAGGTGVMPGGNVGADHAVFEQGASAGNVGKDSIVRENKANPVALLLSSAMMLRHLQFPSFADRLETAVKKVISEGKCRTKDLGGQSTTQEVVDAVIAKLE

SEQ ID NO: 37261 - DNA, 2326 bp, Thiobacillus thiooxidans
  CDS (768)..(2057): transl_table=11
gccgaggtttatctggcgagtccggaaacctgtgcggcctgcgctctgactggagagattactgatccccgcgatttgggcctggcacctattcacgtcgatttgccaggacagttcctggtggatgatcgcatggtgctggcccctgcgcctgagggcacggaggttgaaattattcgcggtccgaatattgccaagttaccggcaggtaaggccgcgcccgcgcatctggcaggcgaggtgctgattcgtctcgaagacgatatcacgaccgatcatattatgccggcgggggccaaggtgctgccgttgcgctccaatctgcccgcaatctccgaatttgtttttcatatggtggatgaaactttcccgagtcgggccaaggcatccggcggcggttttattgtggcgggtcataattatggtcaggggtcgagccgcgaacatgctgctttggcaccgcgctatctgggcgttcggggggtgttggtacagtcttttgcccggattcatctcgccaatctgattaatttcgggatattgccgctcacttttgtgcatgctgaagattacgccaaggtgcaggcgggtgatcagctgggcctcgatctgtcgggcctgactctggggaaatccctgatgttgcgcgatgagacgcagggtctggatattgaagcgatgccgcaacttgccagcgcccgtgatctggaattgattttgaagggtggggccttgtcctgggcgagcgaacaactggagcaggtgtcatgacgacccatattcagaaacccgcaacaggcagtcccttaacactgctgaatggggtgttgcaggtgcctgatcaacccattattcccttcattgaaggcgacggaattggttgtgatgtaaccccggccatgcgcagtgtggtggatgcggcagtggccaaagtctatggaggacagcggcagattgcctggatggagttgtttgcaggtcagaaggccgtgcaactgtatggtgaagggcagtatttgcccgatgagaccatggccgccattcgggaatataaagtcgccatcaaaggtcctctggaaactccggtgggcggggggattcgtagcctgaatgtggccatgcgtcaggatcttgatttgtatgtctgcctccggccggtgcgttattttgaggggacgcccagccccatgcggcatccggaaaaagtggatatggtcatttttcgcgaaaactccgaggacatttacgccggtattgaatggcctgcgggtagtcccgaagcagaaaaaatcatccgttttctgcgggaagaaatgggcgtcacaaaaatccgctttcccgacagctctgccattggcatcaaacccgtatcgacggaaggttcggaacgtctgatccggcgtaccattcaatacgctctggaacatggcaagccctctgtgagtctggtgcacaagggtaatatcatgaaattcaccgaaggcggtttccgtgactggggttatgccctggcggagcgggagttcgccggtcgggtgtttacctggaggcaaaaggccgccatcagcaaggcagagggtaaggcggcagggcagaaagccgagcagcaggccattgccgacgggaagctgatcatcaaggacgtgattgccgataattttctgcagcagattttgctgcgcccggaagattactctgtggttgccacgctgaacttgaatggtgactatgtttctgatgccctggccgcagaagtagggggtattggtatggcacccggtgccaacctttctgatacccacgcgatttttgaagctacccatggtacggcaccggatattgccgggcagggcaaagccaaccccagctcgctgattttgtcggctgtcatgatgctggagcatctgggctggggagaagctgctcaggcgattgtggcggccatgaatgccaccattgcggctggtgaagtcaccggtgatctggcggccttgcggggtgatgtgccggcactgagcaccacagagtttacggcagcactgatccggcgtttttaaaggaactttcatgaatctgcatgagtatcaggccaagcgtttgttggccgaagaggggattccggtcccccgcgccattcccgctttttcggtgcgtgaagccgtgaatcaggcgcgtgaactgggcggtccggcctgggtggtgaaagcccaggtgcatgccggaggccggggcaaagctggtggggtgcgggtcgttcacagtattgccggagtggaaaaagccgcccaggagctgcttggaaaaccattggtaaccgcccagaccg

SEQ ID NO: 37262 - protein, 429 aa, Thiobacillus thiooxidans
MTTHIQKPATGSPLTLLNGVLQVPDQPIIPFIEGDGIGCDVTPAMRSVVDAAVAKVYGGQRQIAWMELFAGQKAVQLYGEGQYLPDETMAAIREYKVAIKGPLETPVGGGIRSLNVAMRQDLDLYVCLRPVRYFEGTPSPMRHPEKVDMVIFRENSEDIYAGIEWPAGSPEAEKIIRFLREEMGVTKIRFPDSSAIGIKPVSTEGSERLIRRTIQYALEHGKPSVSLVHKGNIMKFTEGGFRDWGYALAEREFAGRVFTWRQKAAISKAEGKAAGQKAEQQAIADGKLIIKDVIADNFLQQILLRPEDYSVVATLNLNGDYVSDALAAEVGGIGMAPGANLSDTHAIFEATHGTAPDIAGQGKANPSSLILSAVMMLEHLGWGEAAQAIVAAMNATIAAGEVTGDLAALRGDVPALSTTEFTAALIRRF

SEQ ID NO: 37263 - DNA, 1981 bp, Ralstonia eutropha
  CDS (307)..(1635): transl_table=11
gctgggttagacgcccggccaacctacacgcacgcgccaaccgtcggccgccgtccggttgtcccaagaactgcctcatggtgcaaaaggccttgttcaggcaaatcaggttcatgggccgcaagtatgcccgcagcgccccgccgggccggaaaatcgccggacctgggtccggcccgattggcggatgatgaaaaattgctgcataatacggaattagtcttgtgtcttatataagactgaaggcagcccaggatggcgccagggtgatgcaatgcagcacgggcgcgcagaaggcccgctacaatgccacagcgccatctccccgaatctcgccgaccggccatgaaccggcggcagtcacaaccgttccgtactggagacgtcatgtaccaacatatcaaggttccggccggcgaaaagatcacggtcaaccaggacttttcgctgaatgtcccggacaatccgatcattccttacatcgaaggcgacggtacgggcctcgatatcaccccggtgatgatcaaggtggtcgacgcggctgtggccaaggcctattgcggcaagcgcaagatcgcctggatggagatctacgccggcgagaagtccaccaaggtctacggcctggacgtgtggctgccggacgaaaccctggaggtgctcaaggattacgtggtctcgatcaagggtccgctgaccacgccggtgggcggcggcatccgctcgctgaacgtggcactgcgccagactggacctgacgtctgcctgcgcccggtgcgctacttcaagggcgtgccctcgcggtgcgtgagctcggaaaagaccgacatggtgatcttccgcgagaactcggaagacatctacgccggcatcgaatgggcggcggaaagcgagcatgcgaagaagctcatcaagttcctgcaggacgagatgggcgtgaagaagatccgcttcccgcgaacctcgggcatcggcatcaagccggtctcgcgcgagggcaccgagcgtctggtgcgcaaggcgatccagtacgccatcgacaacgacaagccgtcggtgacgctggtgcacaagggcaacatcatgaagttcaccgaaggtggcttccgtgactggggctacgagctggcgcataaggaattcggcgccgagctggtcgacggcgggccgtggtgcaagttcaagaacccgaagaccggcaaggacatcgtgatcaaggacgccattgccgacgccttcctgcagcagatcctgctgcgtccggccgaatactcggtgatcgccacgctgaacctgaacggcgactatgtctccgacgcgctggccgcacaggtcggcggcatcggcatcgccccgggcgccaatatgtctgactcggttgccatgttcgaggccacccacggcaccgcgccgaagtacgccggcaaggactacgtcaacccgggctcggaaatcctgtcggccgaaatgatgctgcgtcacatgggctggaccgaagccgcggacctgatcatctcgtcgatggagcagtcgatcctgtccaagaaggtgacgtatgacttcgcccgcctgctggaaggcgcgacgcaggtgtcgtgctcgggctttggccaggtgatgatcgacaatatgtaagcacggactcccgctgcggcggcgacctgacaaggaaaaccctggtgccgtctggtcggcgccggggttttttcttgcccgggcgccactgttgcctagaacgtcaggggttggactgacgagcctggcggccgaggagacaggcatggacgatcccttccgtcgcaccggttacggtgcgccctcttctacaaggacccgctggcggcctggactggctggagcgcgcttcagcttgagcgggtcatggtgatctgcgacagcaggaccagctggtgcattctgaatgcgtttcggcgacagtacctgatggtggcagcgagtggcggactttacgcagcctggc

SEQ ID NO: 37264 - protein, 442 aa, Ralstonia eutropha
MPQRHLPESRRPAMNRRQSQPFRTGDVMYQHIKVPAGEKITVNQDFSLNVPDNPIIPYIEGDGTGLDITPVMIKVVDAAVAKAYCGKRKIAWMEIYAGEKSTKVYGLDVWLPDETLEVLKDYVVSIKGPLTTPVGGGIRSLNVALRQTGPDVCLRPVRYFKGVPSRCVSSEKTDMVIFRENSEDIYAGIEWAAESEHAKKLIKFLQDEMGVKKIRFPRTSGIGIKPVSREGTERLVRKAIQYAIDNDKPSVTLVHKGNIMKFTEGGFRDWGYELAHKEFGAELVDGGPWCKFKNPKTGKDIVIKDAIADAFLQQILLRPAEYSVIATLNLNGDYVSDALAAQVGGIGIAPGANMSDSVAMFEATHGTAPKYAGKDYVNPGSEILSAEMMLRHMGWTEAADLIISSMEQSILSKKVTYDFARLLEGATQVSCSGFGQVMIDNM

SEQ ID NO: 37265 - DNA, 1260 bp, Halobacterium volcanii
  CDS (1)..(1260): transl_table=11
atgagctacgaccagattgaggttccggacgacggcgagaaaatcacggtcgacgaggagacgggcgagctctccgtccccgacaacccgattattccgatcatccacggcgacggaatcggaacggacgtcggccccgccgcacagaaggtcctcgacgccgccgccgaggcgaccggccgctctgtctcttggatgcgcgtctacgccggttcgtccgcccgcgacaagtacgacgagaacctcccggaggacacggtaagcgccatccgcaaccaccgcgtcgcaatcaagggcccgctcacgacacccgtcggtgccggcttccgctcgctcaacgtcgcgctccgcaagaagctcgacctctacgcgaacgtccgcccgacctaccacctcgacggcgtcccgtcgcccgtgaagaacccctcggcgatggacatggtcacgttccgcgagaacaccgaagacgtgtacgccggcatcgagtgggaagccggcaccgacgaggtccagaaggtcaaggagttcgtcgaagaagagatgggcgcggacggcgtcatccacgacggtcccgtcggcatcggcatcaagcccatcaccgagttcgggacgaagcgcctcgtccgcgaggctatcgagtacgccctcgaaaacgaccgcccgtcggtcacgctcgtccacaagggcaacatcatgaagttcaccgagggtgccttccgtgactggggctacgaactcgcagaagaggagttcggcgacgtcaccatcaccgaagacgaactgtgggaagagtacgacggcaagcgtcccgaggacaaggtcgttgtcaaggaccgcatcgccgacaacatgctccagcagcttctcacccgcaccgccaactacgatgtcatcgccacgatgaacctcaacggcgactacatgtccgacgccgccggcgcgcagattggcggcctcggcatcgcccccggtgcgaacttcggtgagggcctctgtctcgcagagcccgtccacggctccgcacccaagtacgccggcaaggacaaggtcaacccgaccgcgatgattctctccggccgtctcatgttcgagtacatgggctggaaggacgccggtaagctcatccgcgacaccgtcgagaagaccatctcggacggcgacgtgacctacgacctcgaacgccagatcgagggcggcaacaagctcgccacgagcgagtacgccgacaaggtcgtcgagaacatcaaagagttagcttaa

SEQ ID NO: 37266 - protein, 419 aa, Halobacterium volcanii
MSYDQIEVPDDGEKITVDEETGELSVPDNPIIPIIHGDGIGTDVGPAAQKVLDAAAEATGRSVSWMRVYAGSSARDKYDENLPEDTVSAIRNHRVAIKGPLTTPVGAGFRSLNVALRKKLDLYANVRPTYHLDGVPSPVKNPSAMDMVTFRENTEDVYAGIEWEAGTDEVQKVKEFVEEEMGADGVIHDGPVGIGIKPITEFGTKRLVREAIEYALENDRPSVTLVHKGNIMKFTEGAFRDWGYELAEEEFGDVTITEDELWEEYDGKRPEDKVVVKDRIADNMLQQLLTRTANYDVIATMNLNGDYMSDAAGAQIGGLGIAPGANFGEGLCLAEPVHGSAPKYAGKDKVNPTAMILSGRLMFEYMGWKDAGKLIRDTVEKTISDGDVTYDLERQIEGGNKLATSEYADKVVENIKELA

SEQ ID NO: 37267 - DNA, 1284 bp, Coxiella burnetii
  CDS (1)..(1284): transl_table=11
atgacggagttaaccggagtatccatcgtgacttaccaacacatcaaagttcccagcgaaggtgaaaaaatcaccgttaataaagccgttttagaagttcctgaccgacccattattccctttatcgaaggagatgggattggtattgatatcacgcccgtcatgaaaaacgtggtcgatgccgccgtggaaaaatcctacgctggaaagcgaaaaattgaatggatggagatctacgccggagaaaaggctacgaaagtgtatggcaaagacaattggctgcctgatgagacactcgaagccattaaagaataccaagtggccattaaaggtcccttaaccacgccggttgggggtggcatacgttcgctcaatgtcgcgctgcgccaacagttagacctgtatgtttgccttaggcccgtccgttattttacgggtgtgccaagcccggtcaaaacgcctgaaaaggtgaatatggtgattttccgcgaaaattccgaagatatttacgccggaattgaatggccggcgggaagcccggaagcggtgaaattaatcaactttcttcaaaacgaaatgggcgtaaagaaaatccgtttcccggaaacggcggggatagggattaaaccggtttctaaagaaggcacgagccgtttagtacgccgagcgattcaatatgccattgataatgaccgcgattccgtgacgctcgtccataaaggtaacatcatgaaattcacggagggagcttttaaagattggggctatgaagtcgctgtcaaagaatttggagcaaagcccttagatggcggaccctggcatgtctttgagaatccgaaaacaggccaaaagattacgattaaagacgttattgccgacgcctttttacaacaaattttattgcgtcccgccgagtacagcgtcatcgccaccctgaacctcaatggagattatatctccgacgcgttagcggccgaagtcggcggcattggcattgctccgggcgctaatttaagcgacaccgtcggtctttttgaagccactcatgggacagcgcctaaatatgcggggcaagataaagtcaatccaggctctctaattttatcagcagaaatgatgctccgttacctaggctggaaagaagccgccgaccttgtcgttcaaggtattgagggggcgattgaaagtaaaacagtaacttacgattttgcccgtttgatgaccggcgccaaagaagtaagtgcctctcagttcgccaaagccataattaagcatattctgtag

SEQ ID NO: 37268 - protein, 427 aa, Coxiella burnetii
MTELTGVSIVTYQHIKVPSEGEKITVNKAVLEVPDRPIIPFIEGDGIGIDITPVMKNVVDAAVEKSYAGKRKIEWMEIYAGEKATKVYGKDNWLPDETLEAIKEYQVAIKGPLTTPVGGGIRSLNVALRQQLDLYVCLRPVRYFTGVPSPVKTPEKVNMVIFRENSEDIYAGIEWPAGSPEAVKLINFLQNEMGVKKIRFPETAGIGIKPVSKEGTSRLVRRAIQYAIDNDRDSVTLVHKGNIMKFTEGAFKDWGYEVAVKEFGAKPLDGGPWHVFENPKTGQKITIKDVIADAFLQQILLRPAEYSVIATLNLNGDYISDALAAEVGGIGIAPGANLSDTVGLFEATHGTAPKYAGQDKVNPGSLILSAEMMLRYLGWKEAADLVVQGIEGAIESKTVTYDFARLMTGAKEVSASQFAKAIIKHIL

SEQ ID NO: 37269 - DNA, 1284 bp, Coxiella burnetii
  CDS (1)..(1284): transl_table=11
atgacggagttaaccggagtatccatcgtgacttaccaacacatcaaagttcccagcgaaggtgaaaaaatcaccgttaataaagccgttttagaagctcctgaccgacccattattccctttatcgaaggagatgggattggtattgatatcacgcccgtcatgaaaaacgtggtcgatgccgccgtggaaaaatcctacgctggaaagcgaaaaattgaatggatggagatctacgccggagaaaaggctacgaaagtgtatggcaaagacaattggctgcctgatgagacactcgaagccattaaagaataccaagtggccattaaaggtcccttaaccacgccggttgggggtggcatacgttcgctcaatgtcgcgctgcgccaacagttagacctgtatgtttgccttaggcccgtccgttattttacgggtgtgccaagcccggtcaaaacgcctgaaaaggtgaatatggtgattttccgcgaaaattccgaagatatttacgccggaattgaatggccggcgggaagcccggaagcggtgaaattaatcaactttcttcaaaacgaaatgggcgtaaagaaaatccgtttcccggaaacggcggggatagggattaaaccggtttctaaagaaggcacgagccgtttagtacgccgagcgattcaatatgccattgataatgaccgcgattccgtgacgctcgtccataaaggtaacatcatgaaattcacggagggagcttttaaagattggggctatgaagtcgctgtcaaagaatttggagcaaagcccttagatggcggaccctggcatgtctttgagaatccgaaaacaggccaaaagattacgattaaagacgttattgccgacgcctttttacaacaaattttattgcgtcccgccgagtacagcgtcatcgccaccctgaacctcaatggagattatatctccgacgcgttagcggccgaagtcggcggcattggcattgctccgggcgctaatttaagcgacaccgtcggtctttttgaagccactcatgggacagcgcctaaatatgcggggcaagataaagtcaatccaggctctctaattttatcagcagaaatgatgctccgttacctaggctggaaagaagccgccgaccttgtcgttcaaggtattgagggggcgattgaaagtaaaacagtaacttacgattttgcccgtttgatgaccggcgccaaagaagtaagtgcctctcagttcgccaaagccataattaagcatattctgtag

SEQ ID NO: 37270 - protein, 427 aa, Coxiella burnetii
MTELTGVSIVTYQHIKVPSEGEKITVNKAVLEAPDRPIIPFIEGDGIGIDITPVMKNVVDAAVEKSYAGKRKIEWMEIYAGEKATKVYGKDNWLPDETLEAIKEYQVAIKGPLTTPVGGGIRSLNVALRQQLDLYVCLRPVRYFTGVPSPVKTPEKVNMVIFRENSEDIYAGIEWPAGSPEAVKLINFLQNEMGVKKIRFPETAGIGIKPVSKEGTSRLVRRAIQYAIDNDRDSVTLVHKGNIMKFTEGAFKDWGYEVAVKEFGAKPLDGGPWHVFENPKTGQKITIKDVIADAFLQQILLRPAEYSVIATLNLNGDYISDALAAEVGGIGIAPGANLSDTVGLFEATHGTAPKYAGQDKVNPGSLILSAEMMLRYLGWKEAADLVVQGIEGAIESKTVTYDFARLMTGAKEVSASQFAKAIIKHIL

SEQ ID NO: 37271 - DNA, 1284 bp, Coxiella burnetii
  CDS (1)..(1284): transl_table=11
atgacggagttaaccggagtatccatcgtgacttaccaacacatcaaagttcccagccaaggtgaaaaaatcaccgttaataaagccgttttagaagttcctgaccgacccattattccctttatcgaaggagatgggattggcattgatatcacgcccgtcatgaaaaacgtggtcgatgccgccgcggaaaaatcctacgctggaaagcgaaaaattgaatggatggagatctacgccggagaaaaggctacgaaagtgtatggcaaagacaattggctgcctgatgagacactcgaagccattaaggaataccaagtggccattaaaggtcccttaaccacgccggtggggggtggcatacgttcgctcaatgtcgcgctgcgccaacagttagacctgtatgtttgccttaggcccgtccgttattttacgggtgtgccaagcccggtcaaaacgcctgaaaaggtgaatatggtgattttccgcgaaaattccgaagatatttacgccggaattgaatggccggcgggaagcccggaagcggtgaaattaatcaacttccttcaaaacgaaatgggcgtaaagaaaatccgtttcccggaaacggcggggatagggattaaaccggtttctaaagaaggcacgagccgtttagtacgccgagcgattcaatatgccattgataatgaccgcgattccgtgacgctcgtccataaaggtaacatcatgaaattcacggagggggcttttaaagattggggctatgaagtcgctgtcaaagaatttggagcaaagcccttagatggcggaccctggcatgtctttgagaatccgaaaacaggccaaaagattacgattaaagacgttattgccgacgcctttttacaacaaattttattgcgtcccgccgagtacagcgtcatcgccaccttgaacctcaatggagattatatctccgacgcgttagcggccgaagtcggcggcattggcattgctccgggcgctaatttaagcgacaccgtcggtctttttgaagccactcatgggacagcgcctaaatatgcggggcaagataaagtcaatccaggctctctaattttatcagcagaaatgatgctccgttacctaggctggaaagaagccgccgaccttgtcgttcaaggtattgagggggcgattgaaagcaaaacagtaacttacgattttgcccgtttgatgaccggcgccaaagaagtaagtacctctcagttcggcaaagccataattaagcatattctgtag

SEQ ID NO: 37272 - protein, 427 aa, Coxiella burnetii
MTELTGVSIVTYQHIKVPSQGEKITVNKAVLEVPDRPIIPFIEGDGIGIDITPVMKNVVDAAAEKSYAGKRKIEWMEIYAGEKATKVYGKDNWLPDETLEAIKEYQVAIKGPLTTPVGGGIRSLNVALRQQLDLYVCLRPVRYFTGVPSPVKTPEKVNMVIFRENSEDIYAGIEWPAGSPEAVKLINFLQNEMGVKKIRFPETAGIGIKPVSKEGTSRLVRRAIQYAIDNDRDSVTLVHKGNIMKFTEGAFKDWGYEVAVKEFGAKPLDGGPWHVFENPKTGQKITIKDVIADAFLQQILLRPAEYSVIATLNLNGDYISDALAAEVGGIGIAPGANLSDTVGLFEATHGTAPKYAGQDKVNPGSLILSAEMMLRYLGWKEAADLVVQGIEGAIESKTVTYDFARLMTGAKEVSTSQFGKAIIKHIL

SEQ ID NO: 37273 - DNA, 1284 bp, Coxiella burnetii
  CDS (1)..(1284): transl_table=11
atgacggagttaaccggagtatccatcgtgacttaccaacacatcaaagttcccagccaaggtgaaaaaatcaccgttaataaagccgttttagtagttcctgaccgacccattattccctttatcgaaggagatgggattggcattgatatcgcgcccgtcatgaaaaacgtggtcgatgccgccgtggaaaaatcctacgctggaaagcgaaaaattgaatggatggagatctacgccggagaaaaggctacgaaagtgtatggcaaagacaattggctgcctgatgagacactcgaagccattaaagaataccaagtggccattaaaggtcccttaaccacgccggtggggggtggcatacgttcgctcaatgtcgcgctgcgccaacagttagacctgtatgtttgccttaggcccgtccgttattttacgggtgtgccaagcccggtcaaaacgcctgaaaaggtgaatatggtgattttccgcgaaaattctgaagatatttacgccggaattgaatggccggcgggaagcccggaagcggtgaaattaatcaacttccttcaaaacgaaatgggcgtaaagaaaatccgtttcccggaaacggcggggatagggattaaaccggtttctaaagaaggcacgagccgtttagtacgccgagcgattcaatatgccattgataatgaccgcgattccgtgacgctcgtccataaaggtaacatcatgaaattcacggagggggcttttaaagattggggctatgaagtcgctgtcaaagaatttggagcaaagcccttagatggcggaccctggcatgtctttgagaatccgaaaacaggccaaaagattacgattaaagacgttattgccgacgcctttttacaacaaattttattgcgtcccgccgagtacagcgtcatcgccaccttgaacctcaatggagattatatctccgacgcgttagcggccgaagtcggcggcattggcattgctccgggcgctaatttaagcgacaccgtcggtctttttgaagccactcatgggacagcgcctaaatatgcggggcaagataaagtcaatccaggctctctaattttatcagcagaaatgatgctccgttacctaggctggaaagaagccgccgaccttgtcgttcaaggtattgagggggcgattgaaagtaaaacagtaacttacgattttgcccgtttgatgaccggcgccaaagaagtaagtacctctcagttcggcaaagccataattaagcatattctgtag

SEQ ID NO: 37274 - protein, 427 aa, Coxiella burnetii
MTELTGVSIVTYQHIKVPSQGEKITVNKAVLVVPDRPIIPFIEGDGIGIDIAPVMKNVVDAAVEKSYAGKRKIEWMEIYAGEKATKVYGKDNWLPDETLEAIKEYQVAIKGPLTTPVGGGIRSLNVALRQQLDLYVCLRPVRYFTGVPSPVKTPEKVNMVIFRENSEDIYAGIEWPAGSPEAVKLINFLQNEMGVKKIRFPETAGIGIKPVSKEGTSRLVRRAIQYAIDNDRDSVTLVHKGNIMKFTEGAFKDWGYEVAVKEFGAKPLDGGPWHVFENPKTGQKITIKDVIADAFLQQILLRPAEYSVIATLNLNGDYISDALAAEVGGIGIAPGANLSDTVGLFEATHGTAPKYAGQDKVNPGSLILSAEMMLRYLGWKEAADLVVQGIEGAIESKTVTYDFARLMTGAKEVSTSQFGKAIIKHIL

SEQ ID NO: 37275 - DNA, 1074 bp, Nicotiana tabacum
  CDS (1)..(1074)
atggctcgaaaatccttcccaatcctaaaacaactcatccaacaatccaccaatcgttttttcaccactaacgcgtcgccacgagccgtgacgctgatcccaggcgacggcgttggtccactggtaaccgattcagtggaacaagtgatgcaggcgatgaaagcacccgtttacttcgagcgatacgaagtacgcggtgatatgaaatgtataccggaggaagtaattgattcaattaagaagaataaggtttgtttaaaaggagggttaaagacaccggtcggcggaggtgttagttcgctgaatgtgcttatgaggaaagaacttgatctgtccgcttctattgtgcattgtttcactttcccagggttgcctacgcggcatgaggatgtggatattgttgtgattagggagaatactgagggagagtatgcaggtcttgagcatgaggttgttcctggcgtcgttgagagccttaaggtgataacaaaatattgttcagagcgtatagcaaaatttgcgtttgagtatgctgatgtaaacaaaagaaagaaggtcacagctgtgcacaaagccaacattatgaaacttgcagatggtcttttcctaaaatcttgtagggaagttgcaagtaaatatccagaaatacagtatgaggagattattgtggacaactgctgcatgcaacttgtctcaaggccagaacaatttgatgtcatggtgactcccaacctctacggaaatctaattgcaaatacagctgctggtttagctggtggcacaggagtcttgccaggaggaaatgttggactgatcaagccagtttttgagcaaggtgcttcacctgggaatgttggccatgaaaaaattttgaagcttaagaaagcaaatccagtggcacttcttctgtcgtcagcaatgatgcttcgacatcttgaatttccatcatttgctgatcgtttagaaacagctgtaaaacgtgtaatagcagagggaaaagtcaggacaaaggaccttggaggggatagcactacccaagaagttgttgatgcaattatagctgctctagactaa

SEQ ID NO: 37276 - protein, 357 aa, Nicotiana tabacum
MARKSFPILKQLIQQSTNRFFTTNASPRAVTLIPGDGVGPLVTDSVEQVMQAMKAPVYFERYEVRGDMKCIPEEVIDSIKKNKVCLKGGLKTPVGGGVSSLNVLMRKELDLSASIVHCFTFPGLPTRHEDVDIVVIRENTEGEYAGLEHEVVPGVVESLKVITKYCSERIAKFAFEYADVNKRKKVTAVHKANIMKLADGLFLKSCREVASKYPEIQYEEIIVDNCCMQLVSRPEQFDVMVTPNLYGNLIANTAAGLAGGTGVLPGGNVGLIKPVFEQGASPGNVGHEKILKLKKANPVALLLSSAMMLRHLEFPSFADRLETAVKRVIAEGKVRTKDLGGDSTTQEVVDAIIAALD

SEQ ID NO: 37277 - DNA, 1448 bp, Nicotiana tabacum
  CDS (70)..(1185)
acaccctaatttccatgccccaaattcaatagtcaaaccactcaaccccatcgatctattttccgatcaatggccaaacgaaccctacctcttctcaggcacctcctcagctccccatcccatggcttttcccattcattaacgtcaacccgatccgtcacctacatgccccgacccggtgatggcacaccacgcgccgtcactctcatccctggtgacgggatcgggccgctcgtcaccggcgctgtcgaacaagtcatggacgcgatgcacgctcctgtgtacttcgagcgatacgacgttcacggcgacatgaagagtgtgcctccagaggttatggaatcgatccggaagaataaggtctgtttaaaaggaggattgaagactcctgtgggtggtggtgttagttcccttaacgttcagcttaggaaggagcttgatctatatgcttcccttgttcactgcttcaacttgcaaggattacctacgcgtcatgagaacgtggatattgttgtcatcagggaaaatactgagggtgaatattccggcttggaacatgaggttgttcctggtgtcgttgaaagccttaaggtgatgacaaagttttgctcggaacgaattgcaaaatatgcctttgaatatgcatacctcaacaatcgcaaggtattgactgctgtgcacaaagcaaacattatgaaacttgcagatggtttatttttggagtcttgtcccgaggttgcaaccaaatatcctgggatcaagtacaatgaaatcattgtggacaactgttgcatgcaacttgtttcaaggcctgagcaatttgatgttatggtcactccaaatctctacggaaatctggtggcaaatacagcagctggtattgctggaggcactggtgttatgcctggaggcaatgtgggggctgaccatgctgtgtttgagcaaggtgcttcagcaggaaatgtaggaaatgagaagatactagagcaaaagaaggcgaatccagttgccttgtttctttcatcagccatgatgttgagacatctgcagtttccttcatttgcagatagactaaagacttcggtgaagcgtgtaattgctgagggtaaatacatgaccaaagatcttggtggaaattgcaccacccaagaaatcacggatgctgtcattgcaaatctggactaatttcaaaaccacttctatctcttttattctcgagatgattcatgctacatgtctttaattcatcattcttgtgatgactttaattgttctctacttccgttggtgcggcgtgcctttcaaggtggcatattccacaaaataatgtgaatctcctaagtggaaatattgaagatacaggatccaagtttatagccatttctttcttatagcatgtttttgtaacgaaggttaataaattcaaggtataccaacttttgacttgg

SEQ ID NO: 37278 - protein, 371 aa, Nicotiana tabacum
MAKRTLPLLRHLLSSPSHGFSHSLTSTRSVTYMPRPGDGTPRAVTLIPGDGIGPLVTGAVEQVMDAMHAPVYFERYDVHGDMKSVPPEVMESIRKNKVCLKGGLKTPVGGGVSSLNVQLRKELDLYASLVHCFNLQGLPTRHENVDIVVIRENTEGEYSGLEHEVVPGVVESLKVMTKFCSERIAKYAFEYAYLNNRKVLTAVHKANIMKLADGLFLESCPEVATKYPGIKYNEIIVDNCCMQLVSRPEQFDVMVTPNLYGNLVANTAAGIAGGTGVMPGGNVGADHAVFEQGASAGNVGNEKILEQKKANPVALFLSSAMMLRHLQFPSFADRLKTSVKRVIAEGKYMTKDLGGNCTTQEITDAVIANLD

SEQ ID NO: 37279 - DNA, 1167 bp, Ajellomyces capsulata
  CDS (1)..(1167)
atgttctctctgagaaccgcgcagccagcgcagtctcttttccgcgctgcgacgaatacttactcgacatctctccctcgctccgcaattgctgctagatcattcgctaccgtgcaatcggacatcttcaagcctaccaagtatggcggcaaatacacagttacgctgatcccaggcgacggcatcggcacggaagtagcagaatcagtgaaaacaattttcaaagccgataatgtaccaattgagtgggagcaggtcgacgttagcgggttggacgccgggaataaacattcggaagatttgttcaaagaatctattgcctcgctgaagcgcaacaagctcggtctcaagggtatccttcacaccccagttgagcgatccggccatcaatcgttcaatgttgccctacgtcaggaactagatatctatgcgtctatcgttttgattaagaacattcccggctacaagaccagacatgacaatgtcgacctctgcattatccgtgaaaataccgaaggcgaatattctggcctcgagcatcagtctgtcagcggcgtcgtcgaatctctcaagataattactcgtgccaagtcagaacgaattgccaagtttgcttttagctttgctctagccaacaaccgtaagaaggttacctgcatccacaaggccaacatcatgaaattggccgacggccttttccgctccaccttccataaagttgccgaaagctaccccactctagaaacgaatgatatgattgtggataatgcatctatgcaagcggttgctcgtcctcagcagtttgacgtcatggttatgcctaacctttacggaggaatcctctccaacgttggagctgctctcgtcggtggccccggtattgtacctggttgcaacatgggtcgcgatgtggctgtcttcgaaccgggatgtcgacacgttggacttgatattaaaggcaaggatcaagctaaccccacagccttgattctttctggatccatgctcctgcgccacttgggtctcgatgagcatgccaacagaatctccaaggcagtttatgacgtgattggagaaggcgtcacccgcacgcgcgatatgggtggtcaagcttccacccatgaattcacccgtgctgtcctcgataagatggaatcagctctgtaa

SEQ ID NO: 37280 - protein, 388 aa, Ajellomyces capsulata
MFSLRTAQPAQSLFRAATNTYSTSLPRSAIAARSFATVQSDIFKPTKYGGKYTVTLIPGDGIGTEVAESVKTIFKADNVPIEWEQVDVSGLDAGNKHSEDLFKESIASLKRNKLGLKGILHTPVERSGHQSFNVALRQELDIYASIVLIKNIPGYKTRHDNVDLCIIRENTEGEYSGLEHQSVSGVVESLKIITRAKSERIAKFAFSFALANNRKKVTCIHKANIMKLADGLFRSTFHKVAESYPTLETNDMIVDNASMQAVARPQQFDVMVMPNLYGGILSNVGAALVGGPGIVPGCNMGRDVAVFEPGCRHVGLDIKGKDQANPTALILSGSMLLRHLGLDEHANRISKAVYDVIGEGVTRTRDMGGQASTHEFTRAVLDKMESAL

SEQ ID NO: 37281 - DNA, 1104 bp, Arabidopsis thaliana
  CDS (1)..(1104)
atgtctcgcagatcgctaactctcctcaagaatctagctagaaacgcgaatggatcaggtattcaaacccgatccgtgacttacatgcccagacccggtgacggagcaccacgcgcagtgacgctgatccccggagatggaatcggtcctctggtgacgaacgccgtggaacaggtgatggaagcgatgcacgctccgatcttcttcgagaagtacgatgttcacggagaaatgagccgtgtgccgccggaagtgatggagtcgataaggaagaataaggtttgtttgaaaggtgggcttaagactcctgttggtggtggtgttagttctcttaacgtccagcttaggaaagagcttgacctctttgcttctctggtcaactgttttaatttgcctggtttacctactcgccatgagaatgttgacatcgttgtcatcagagagaacactgaaggtgagtacgcggggcttgagcacgaggttgttcctggtgtcgttgagagtctgaaggtgatcacgaagttctgttcggagcgtattgcaaagtatgcttttgagtatgcctacctgaacaacaggaagaaagttacagcggtgcataaggctaacatcatgaaacttgcggatggtttgttcttggaatcttgtcgcgaggttgcgaaaaagtatcccagcatcacctacaatgaaatcattgttgataactgctgtatgcaacttgtagccaaaccagagcaattcgatgtcatggtaacgccgaatctctatgggaatttagttgcaaacactgctgctggtattgctggaggcacaggagtcatgcctggaggaaatgttggggctgaccatgcggtattcgagcaaggtgcatcagcaggaaatgttgggaaagacaagatagtattggaaaacaaagcaaacccagtggcattgcttctctcatcagcgatgatgcttagacaccttcagtttccttcatttgctgaccggctcgaaacagcagtgaagaaagtcatcgctgaaggaaagtgccggacgaaagatcttggtggaacaagcacgactcaagaggtcgttgatgcggtcattgcaaaactagactga

SEQ ID NO: 37282 - protein, 367 aa, Arabidopsis thaliana
MSRRSLTLLKNLARNANGSGIQTRSVTYMPRPGDGAPRAVTLIPGDGIGPLVTNAVEQVMEAMHAPIFFEKYDVHGEMSRVPPEVMESIRKNKVCLKGGLKTPVGGGVSSLNVQLRKELDLFASLVNCFNLPGLPTRHENVDIVVIRENTEGEYAGLEHEVVPGVVESLKVITKFCSERIAKYAFEYAYLNNRKKVTAVHKANIMKLADGLFLESCREVAKKYPSITYNEIIVDNCCMQLVAKPEQFDVMVTPNLYGNLVANTAAGIAGGTGVMPGGNVGADHAVFEQGASAGNVGKDKIVLENKANPVALLLSSAMMLRHLQFPSFADRLETAVKKVIAEGKCRTKDLGGTSTTQEVVDAVIAKLD

SEQ ID NO: 37283 - DNA, 1086 bp, Kluyveromyces lactis
  CDS (1)..(1086)
atgttgagacaaggtattgctgctcaaaaaaagtccttcgctaccctagcagctgaacaattgttgccaaagaagtacggtggtcgctacactgtaactttgattccaggtgatggtgttggtaaggaagtgaccgactcagtagtcaagatcttcgaaaacgaaaatattccaatcgactgggaaactatcgacatttctggtctagaaaacactgaaaatgtacaaagagctgtcgaatctttaaagagaaacaaggttggtttgaaaggtatctggcacactccagccgaccaaaccggtcatggctcattgaacgttgctttgagaaagcaactggatattttcgccaatgtcgccttgttcaaatcaattccaggtgtcaagactagattgaataacatcgacatggttatcatcagagaaaacactgaaggtgaatactctggtttagaacacgaatctgttccaggtgtcgttgaatctttgaagatcatgaccagggctaagtcagaaagaattgctagattcgcctttgatttcgccttgaaaaacaacagaaagtcggtctgcgctgttcacaaagctaacatcatgaaattgggtgatggtttgttcagaaacaccgttaatgaaattggtgctaacgaatacccagaactcgatgtcaagaacatcatcgttgacaacgcttccatgcaagctgttgccaagccacatcaattcgatgttttggtgacaccaaacttgtacggttctatcttgggtaacattggttctgctttgatcggtggtcccggtctagtcccaggtgctaacttcggtagagaatacgctgtctttgaaccaggttccagacatgttggtttggacatcaagggtcaaaacgttgctaacccaactgctatgatcttgtcctctactctaatgttgagacatctaggtttgaacgcttacgctgatagaatttccaaagctacatatgatgtcatttctgaaggtaagtcaacaacaagagacatcggtggttcagcctccacttctgagttcaccaacgctgttatcgagaagttagccaagttatga

SEQ ID NO: 37284 - protein, 361 aa, Kluyveromyces lactis
MLRQGIAAQKKSFATLAAEQLLPKKYGGRYTVTLIPGDGVGKEVTDSVVKIFENENIPIDWETIDISGLENTENVQRAVESLKRNKVGLKGIWHTPADQTGHGSLNVALRKQLDIFANVALFKSIPGVKTRLNNIDMVIIRENTEGEYSGLEHESVPGVVESLKIMTRAKSERIARFAFDFALKNNRKSVCAVHKANIMKLGDGLFRNTVNEIGANEYPELDVKNIIVDNASMQAVAKPHQFDVLVTPNLYGSILGNIGSALIGGPGLVPGANFGREYAVFEPGSRHVGLDIKGQNVANPTAMILSSTLMLRHLGLNAYADRISKATYDVISEGKSTTRDIGGSASTSEFTNAVIEKLAKL

SEQ ID NO: 37285 - DNA, 1071 bp, Schizosaccharomyces pombe
  CDS (1)..(1071)
atgttcaaatcactagtaagaaaatcctcagcttttcaaccattaaagtatggaggtaaatacacggtaacgttgattccaggcgatggaattggacgagaaacgagcaatgcagtgacagagatctttaaaacggcaaacgttcctatcgaatttgaagaaattgatgttacaggaatggaaaaaaacaataaatcgtctggagacgcgctacatgaggcaattcaatctctcaagagaaataaagtgggtttaaagggaattctgttcactccatttgaaaaaggaggccatacctcgttcaatgttgccttgagaaaagaactcgatatctatgcctctctagtgctcatcaaaaacattcctggatttaagactcgtcatgacaatgttgattttgcaattattcgtgaaaacactgaaggtgaatactcgggtctcgagcaccagtcggtaccgggagtcgtggaatctttgaaaatcattacagaatacaaatcaaagagaattgcacaatttgcttttgattttgccttacaaaatggccgcaaatcggtcacttgcatccacaaggctaacatcatgaaattggccgacggtctctttcgaaggacgttttacgacgttgctaacggttacgacgctattactcctaaggatttaattgtcgacaatgcctccatgcaggctgtttctcgtccccagcaattcgatgttttagtgatgccgaacttgtacggtagcattcttagcaacattggaagtgctttggtcggtggccccggtgtcattccaggtgccaattttggtcgtgactatgctctattcgagcctggttgccgtcatgttggtttaagtattactggacgtggggaagccaatcctacagctgccatccttagcgcttgcttgatgcttcgtcatttaggcctaaaagattatgctgatcttatcaatgccgctacttattctgtcattgaagagggtaaaaccctgaccaaagacttgggtggttcggcttccactggtgatttcacgcatgccattttagaaagaatggaaagcttataa

SEQ ID NO: 37286 - protein, 356 aa, Schizosaccharomyces pombe
MFKSLVRKSSAFQPLKYGGKYTVTLIPGDGIGRETSNAVTEIFKTANVPIEFEEIDVTGMEKNNKSSGDALHEAIQSLKRNKVGLKGILFTPFEKGGHTSFNVALRKELDIYASLVLIKNIPGFKTRHDNVDFAIIRENTEGEYSGLEHQSVPGVVESLKIITEYKSKRIAQFAFDFALQNGRKSVTCIHKANIMKLADGLFRRTFYDVANGYDAITPKDLIVDNASMQAVSRPQQFDVLVMPNLYGSILSNIGSALVGGPGVIPGANFGRDYALFEPGCRHVGLSITGRGEANPTAAILSACLMLRHLGLKDYADLINAATYSVIEEGKTLTKDLGGSASTGDFTHAILERMESL

SEQ ID NO: 37287 - DNA, 1104 bp, Arabidopsis thaliana
  CDS (1)..(1104)
atgtctcgccaatcgttttctctactgaagaatcttcgtagcatcgcttccggttccaaaatccagacccgatccgtgacttacatgcccagacccggtgacggaaaaccaagaccagtgacgttaatccccggagacggagttggtccgttggtaacaaacgcggttcaacaagtgatggaagcgatgcacgctccggtttacttcgaaccgttcgaagttcatggagatatgaagagtttacctgaaggattgttggaatcgattaagaagaacaaagtttgtttgaaaggtggtctcaagactcccgtcggtggtggtgtgagctctctcaatgttaatctgagaaaggagcttgatctctttgcttctttggtcaactgtttcaatttgcctggtttagcttctcgtcatgagaatgttgatattgttgtgattagagagaacactgaaggtgaatatgcaggtcttgaacatgaagttgttcctggtgttgttgagagccttaaggtgattacaaagttctgttcagagcgtattgcaaagtatgcgtttgagtatgcctacttgaacaacaggaagaaagttacagcagtgcacaaggctaatatcatgaaattggctgatggtttgttcttggagtcttgtcaagaggttgctaagaagtatccaagcattgcttacaatgaaatcattgttgataattgttgtatgcaacttgtggctagaccagagcaattcgatgtcatggtgacgcctaatctctatggtaatctagtggcaaacactgctgctggtattgctggaggtactggagtcatgcctggaggaaatgttggggcggagtatgcggtctttgagcaaggtgcatcagcgggaaacgtggggaaggatacaacggaagagcaaaagaatgcaaaccctgtggctttgttgctgtcatcagccatgatgcttagacaccttcagttcccttcttttgctgacaggcttgaaaccgctgtgaagcgtgttatcgctgaagggaattgtcggactgaagatcttggtggaaacagtaccactcaagaggtcgttgacgctgtcattgcaaatttggattga

SEQ ID NO: 37288 - protein, 367 aa, Arabidopsis thaliana
MSRQSFSLLKNLRSIASGSKIQTRSVTYMPRPGDGKPRPVTLIPGDGVGPLVTNAVQQVMEAMHAPVYFEPFEVHGDMKSLPEGLLESIKKNKVCLKGGLKTPVGGGVSSLNVNLRKELDLFASLVNCFNLPGLASRHENVDIVVIRENTEGEYAGLEHEVVPGVVESLKVITKFCSERIAKYAFEYAYLNNRKKVTAVHKANIMKLADGLFLESCQEVAKKYPSIAYNEIIVDNCCMQLVARPEQFDVMVTPNLYGNLVANTAAGIAGGTGVMPGGNVGAEYAVFEQGASAGNVGKDTTEEQKNANPVALLLSSAMMLRHLQFPSFADRLETAVKRVIAEGNCRTEDLGGNSTTQEVVDAVIANLD

SEQ ID NO: 37289 - DNA, 1107 bp, Kluyveromyces lactis
  CDS (1)..(1107)
atgttcagacaatcaattgtgaagcaatcgtgtagatttttggctaccaagaaacaaccaagtatcggtagatacaccggtaagccaaacccaaagactggtaagtacactgtttccttcattgaaggtgatggtgttggtccagaaatttccaaatccgttaaggcgatcttttccgcagccaaggttcctattgaatgggaaagttgtgatgtgagtccaattttcgttaacggattaactactattccagatccagctgttgcttcaattaacaagaacttgattgctttgaagggtccattggctactccaattggtaagggtcacagatccttgaacttaaccttaagaaagactttcggtttgttcgctaatgtgcgtccagctaaatctatcgagggttacaagactacttacgaaaacgttaacttagttttgatcagagaaaacactgaaggtgaatattctggtatcgaacacgttgttgctccaggtgtcgtccaatccatcaagttgattactcaggatgcttctgaaagagtcattagatacgcttttgaatacgctagagccgttgatagatcaaaggtccttgttgttcacaaatccactatccaaagattggccgatggtttgttcgttgacgttgccaagaaattgtcttctgaataccctgacatcgaactacaaactgaattgctagataacaccgtcttgaagactgtccaacacccagaagcctacgatgatgtcgttgtcgtttgtccaaacttgtacggtgatatcttgtccgatttgaactccggtttgtccgctggttctctaggtttgactccatccgctaacattggtcacaccgtttctatcttcgaagctgtccacggttctgccccagatattgctggtcaaaacaaggctaacccaactgccttgttgctatcctctgtcatgatgttgaaccacatgggtttgactgaacacgccgacaagattgaaaaggctgtcttgaccaccattgcttctgatgctaagaacagaactggtgacttgggtggttctgcttccacatcttctttcactgatgctgtcattgaaagattataa

SEQ ID NO: 37290 - protein, 368 aa, Kluyveromyces lactis
MFRQSIVKQSCRFLATKKQPSIGRYTGKPNPKTGKYTVSFIEGDGVGPEISKSVKAIFSAAKVPIEWESCDVSPIFVNGLTTIPDPAVASINKNLIALKGPLATPIGKGHRSLNLTLRKTFGLFANVRPAKSIEGYKTTYENVNLVLIRENTEGEYSGIEHVVAPGVVQSIKLITQDASERVIRYAFEYARAVDRSKVLVVHKSTIQRLADGLFVDVAKKLSSEYPDIELQTELLDNTVLKTVQHPEAYDDVVVVCPNLYGDILSDLNSGLSAGSLGLTPSANIGHTVSIFEAVHGSAPDIAGQNKANPTALLLSSVMMLNHMGLTEHADKIEKAVLTTIASDAKNRTGDLGGSASTSSFTDAVIERL

SEQ ID NO: 37291 - DNA, 1137 bp, Schizosaccharomyces pombe
  CDS (1)..(1137)
atgtcaatgctttctactttacgtactgcaggttctttacggacgttttcaagaagcgcctgttactcttttagattttcttcaacgaaggctgccgctgggacatatgaaggagtaaagaatgccaacgggaactacacagtaacgatgattgctggcgatggcattggtccagaaattgctcagtctgtagaacgtatatttaaggctgcaaaggtccctatcgaatgggaacgtgtaaaagtatatcctattttgaaaaatggtactactactattcctgatgatgctaaggaatctgttaggaaaaataaagtggctttgaaaggtccattggcaaccccaattgggaagggtcatgtttctatgaaccttactttgcgtcgtactttcggcttgtttgccaatgttcgtccctgtgtatctattacgggatacaaaacaccttatgataacgttaataccgttttgattcgtgagaacactgagggtgaatactcaggcatcgagcatgaagttataccaggcgttgttcaatcgattaaattaattactcgcgcagcatctgagcgtgttattcgttatgcattccaatatgctcgccaaactggcaagaacaacatcaccgtagtccacaaggctaccattatgcgcatggctgacggtttatttttggaatgcgccaaggagcttgcacctgaatatcctgatatcgagcttagggaggaaatcttggataacgcctgcttgaagattgtcaccgatcctgtcccttataacaacacagttatggttatgcccaatttatacggtgatattgtttctgatatgtgcgctggtttaattggcggtcttggtttgactccttccggaaacattggcaaccaagcttccatctttgaagctgttcatggtactgcccctgatattgctggaaaaggtttagccaaccctactgctttactgttatcttctgtaatgatgttgaagcacatgaatttaaatgattatgccaaacgcatcgaatcagctatctttgatacccttgcaaacaatcccgatgctcgcaccaaggatttgggcggcaagtcaaacaatgttcaatataccgatgccattatttctaaactgaagtaa

SEQ ID NO: 37292 - protein, 378 aa, Schizosaccharomyces pombe
MSMLSTLRTAGSLRTFSRSACYSFRFSSTKAAAGTYEGVKNANGNYTVTMIAGDGIGPEIAQSVERIFKAAKVPIEWERVKVYPILKNGTTTIPDDAKESVRKNKVALKGPLATPIGKGHVSMNLTLRRTFGLFANVRPCVSITGYKTPYDNVNTVLIRENTEGEYSGIEHEVIPGVVQSIKLITRAASERVIRYAFQYARQTGKNNITVVHKATIMRMADGLFLECAKELAPEYPDIELREEILDNACLKIVTDPVPYNNTVMVMPNLYGDIVSDMCAGLIGGLGLTPSGNIGNQASIFEAVHGTAPDIAGKGLANPTALLLSSVMMLKHMNLNDYAKRIESAIFDTLANNPDARTKDLGGKSNNVQYTDAIISKLK

SEQ ID NO: 37293 - DNA, 1110 bp, Saccharomyces cerevisiae
  CDS (1)..(1110)
atgttgagaaatactttttttagaaacacctcgaggaggtttttggctactgtaaagcaaccttcaatcggaagatataccggcaaacctaacccttctaccggcaaatacacggtctcgttcattgaaggtgatggtatcggacctgaaatttccaagtctgtaaagaaaatctttagtgcagcaaacgtccccatagaatgggaatcttgtgatgttagccctatctttgtcaacggattaacgaccattcctgaccctgccgtacaatctatcacaaaaaacctggttgcactaaaaggtccactagctacacctattggtaaaggtcacagatctttgaatttgacattgagaaaaacatttgggttatttgccaacgttcgtcccgcaaagtctattgaaggttttaagaccacttacgaaaacgttgatttagttcttatcagagagaataccgaaggtgaatattctggtatcgaacacatagtttgccctggcgttgttcaatctattaaactgatcacaagagatgcctctgagcgagtcattagatacgcttttgaatatgcaagagccatcggcagaccaagagttattgtggtacataaatctactatccagagattagctgatggtttattcgttaatgttgccaaagaactatccaaagagtatcctgaccttactttagaaactgaacttattgataacagtgtgttaaaggtggtcaccaacccatctgcttacacagacgctgtttctgtttgtccaaatctatacggtgatatcttgtccgacttgaactctggtttgagcgccggttctttaggtttaactccatctgccaatattggtcataaaatctcgatctttgaagctgtccatggctctgcccctgatattgccggtcaagataaagcgaatccaactgccctacttttatcttcagtaatgatgttaaaccacatgggtctaacgaatcatgctgaccaaattcaaaatgcagtattgtctactatcgcatcaggtccagaaaacagaacaggtgacttggctggtactgctactacttcatcattcactgaagcagtcatcaagagattataa

SEQ ID NO: 37294 - protein, 369 aa, Saccharomyces cerevisiae
MLRNTFFRNTSRRFLATVKQPSIGRYTGKPNPSTGKYTVSFIEGDGIGPEISKSVKKIFSAANVPIEWESCDVSPIFVNGLTTIPDPAVQSITKNLVALKGPLATPIGKGHRSLNLTLRKTFGLFANVRPAKSIEGFKTTYENVDLVLIRENTEGEYSGIEHIVCPGVVQSIKLITRDASERVIRYAFEYARAIGRPRVIVVHKSTIQRLADGLFVNVAKELSKEYPDLTLETELIDNSVLKVVTNPSAYTDAVSVCPNLYGDILSDLNSGLSAGSLGLTPSANIGHKISIFEAVHGSAPDIAGQDKANPTALLLSSVMMLNHMGLTNHADQIQNAVLSTIASGPENRTGDLAGTATTSSFTEAVIKRL

SEQ ID NO: 37295 - DNA, 1134 bp, Drosophila melanogaster
  CDS (1)..(1134)
atggctgctagattcatacagaaaattctcaatcaactgggtttgattgcagcgcgtgatgctccggcggtgactgcgacgccagcagtgagccaggtcaacgcgactcccgccgccagccggtcctactcctccggcaccaagaaagtcaccctcatccctggcgatggcatcggacctgagatctctgcggccgtgcagaaaatcttcaccgccgccaatgtccccatcgagtgggaggccgtggacgtgacccccgtccggggacccgacggaaagttcggcatcccacaggccgccattgactcggtgaacacgaacaagatcggcctgaagggtcctctgatgacgcccgtcggcaagggccatcggtctctgaatctggccctgcgcaaggagttcaatctgtacgccaacgtgcgtccctgccgcagtctcgagggctacaagacgctgtacgacgatgtggacgtggtcaccatccgtgagaacaccgagggcgagtactccggcatcgagcacgagatcgtcgacggcgtcgttcagagcatcaagctgatcaccgaggaagcctccaagcgtgtggccgagtacgccttccagtacgccaagaacaacaaccgcaagaaggtcaccgtggtgcacaaggcgaacattatgcgcatgtccgatggtctcttcctgcgctgcgtccgcgacatggcccagaagttcccagaaatccagttcgaagagaagtatctggatacggtgtgcctgaacatggtccagaaccccggaaaatacgacgtgctggtcatgcccaatctgtacggtgatattctgtctgacatgtgcgccggtttggtgggcggcctcggcctgacgccctccggcaacatgggcctgaacggtgccctgttcgagtctgtgcacggaaccgcccccgatattgccggcaaggacctggccaatcccactgccctgttgctgtcggcggtcatgatgctgcgccacatggagctcaacacgtacgccgataaaatcgagcgtgccgccttcgagaccatcaaggagggcaaatacctcaccggcgatctgggcggccgtgccaagtgctccgagttcacgaacgagatctgtgccaagctgtag

SEQ ID NO: 37296 - protein, 377 aa, Drosophila melanogaster
MAARFIQKILNQLGLIAARDAPAVTATPAVSQVNATPAASRSYSSGTKKVTLIPGDGIGPEISAAVQKIFTAANVPIEWEAVDVTPVRGPDGKFGIPQAAIDSVNTNKIGLKGPLMTPVGKGHRSLNLALRKEFNLYANVRPCRSLEGYKTLYDDVDVVTIRENTEGEYSGIEHEIVDGVVQSIKLITEEASKRVAEYAFQYAKNNNRKKVTVVHKANIMRMSDGLFLRCVRDMAQKFPEIQFEEKYLDTVCLNMVQNPGKYDVLVMPNLYGDILSDMCAGLVGGLGLTPSGNMGLNGALFESVHGTAPDIAGKDLANPTALLLSAVMMLRHMELNTYADKIERAAFETIKEGKYLTGDLGGRAKCSEFTNEICAKL

SEQ ID NO: 37297 - DNA, 1107 bp, Arabidopsis thaliana
  CDS (1)..(1107)
atggcgagaagatccgtttcgatatttaatcgccttctggcgaatcctccttctccattcacatcactgtcccgatccatcacctacatgcctagacccggagatggagctccacgaaccgtaaccctaattcccggcgacggaatcggacctttggtgaccggtgcggtggaacaggtcatggaagcgatgcacgcgccagtgcatttcgagagatacgaggttctaggaaacatgagaaaagtccctgaagaagtgatcgagtctgtgaagagaaacaaggtttgtctcaaaggtggattagcgactcctgttggtgggggtgtcagttctttgaatatgcaattgaggaaagaactcgatatcttcgcttctcttgtcaattgcatcaatgtccctggattagtgacgcgacacgaaaatgttgatatcgttgtgataagagagaacactgaaggagagtactcaggtctcgagcatgaggttgttcctggtgttgtcgagagccttaaggtgataacaaagttttgttctgagagaatagcgagatatgcatttgagtatgcgtatctaaacaataggaagaaagtgactgctgttcataaagctaacattatgaagcttgcggatgggctcttccttgaatcttgtagagaggttgctaaacattattcggggattacttacaatgaaataatcgtagacaattgctgtatgcagcttgtcgccaagcctgagcaatttgatgtcatggtgacacctaatttgtatggtaaccttatagcaaacacggcggctggaatagccggtggcactggagtgatgccaggagggaatgttggtgcagaacatgcgatattcgagcaaggtgcatcagcagggaatgtggggaatgataagatggtggaacagaagaaagcgaatccggtggctctacttctctcgtcggctatgatgctaagacatctccggtttcctacttttgctgatcggcttgaaacagcagtgaaacaagtgattaaagaaggaaaatatagaacaaaagatcttggaggagattgtaccacgcaggaagttgttgatgctgtcatagcagctcttgagtga

SEQ ID NO: 37298 - protein, 368 aa, Arabidopsis thaliana
MARRSVSIFNRLLANPPSPFTSLSRSITYMPRPGDGAPRTVTLIPGDGIGPLVTGAVEQVMEAMHAPVHFERYEVLGNMRKVPEEVIESVKRNKVCLKGGLATPVGGGVSSLNMQLRKELDIFASLVNCINVPGLVTRHENVDIVVIRENTEGEYSGLEHEVVPGVVESLKVITKFCSERIARYAFEYAYLNNRKKVTAVHKANIMKLADGLFLESCREVAKHYSGITYNEIIVDNCCMQLVAKPEQFDVMVTPNLYGNLIANTAAGIAGGTGVMPGGNVGAEHAIFEQGASAGNVGNDKMVEQKKANPVALLLSSAMMLRHLRFPTFADRLETAVKQVIKEGKYRTKDLGGDCTTQEVVDAVIAALE

SEQ ID NO: 37299 - DNA, 1125 bp, Arabidopsis thaliana
  CDS (1)..(1125)
atgaccatggcagcaaatctagcgcgacggctgatcggaaaccgatcgactcagatccttggagccgtgaactctagctcaggtgcggctagttctgtcgctagggctttctgctcctccaccactccgatcaccgcaactctcttccctggcgatgggatcggtcccgagatcgccgaatctgtcaaaaaggtgtttacaacagctggtgtaccaattgagtgggaagaacactatgttgggactgagatagatccgagaacacagagtttcttgacatgggaaagtctcgaatctgtgcgtagaaacaaagttggtttgaaaggtccaatggctactccaattgggaaaggtcaccgttctttgaacctgactcttaggaaagagcttaatctatatgccaatgttagaccttgttacagtcttcctggttacaaaactcgttacgatgatgttgatctcattaccatcagagaaaacacggaaggagaatacagtggccttgaacatcaggttgttagaggtgtggtggaaagtcttaaaatcattacccgtcaggcgagtttgagagttgcagagtatgcttttctctatgccaagactcatggaagagagagagtttctgctatccacaaagccaacattatgcagaaaactgacggtctctttctcaagtgttgtcgtgaggttgctgagaagtatcctgagatcacttacgaggaggtcgttattgacaactgctgtatgatgcttgtgaaaaacccagcactttttgatgtcttggtgatgccaaacctgtacggtgacattattagcgatctgtgtgccggattggttggaggactaggattgactccaagttgtaatattggagaagatggtgtagcccttgctgaagcagttcacggttctgcacctgatatcgctggaaagaacttggcgaacccaaccgcgttgcttctgagtggagtgatgatgttgcgtcacctgaagttcaacgaacaagcagaacaaatccacagtgcaatcatcaacaccatagcagagggcaaatacagaaccgcggatcttggaggtagttcgaccaccacggaattcacaaaggcaatctgtgatcatctctga

SEQ ID NO: 37300 - protein, 374 aa, Arabidopsis thaliana
MTMAANLARRLIGNRSTQILGAVNSSSGAASSVARAFCSSTTPITATLFPGDGIGPEIAESVKKVFTTAGVPIEWEEHYVGTEIDPRTQSFLTWESLESVRRNKVGLKGPMATPIGKGHRSLNLTLRKELNLYANVRPCYSLPGYKTRYDDVDLITIRENTEGEYSGLEHQVVRGVVESLKIITRQASLRVAEYAFLYAKTHGRERVSAIHKANIMQKTDGLFLKCCREVAEKYPEITYEEVVIDNCCMMLVKNPALFDVLVMPNLYGDIISDLCAGLVGGLGLTPSCNIGEDGVALAEAVHGSAPDIAGKNLANPTALLLSGVMMLRHLKFNEQAEQIHSAIINTIAEGKYRTADLGGSSTTTEFTKAICDHL

SEQ ID NO: 37301 - DNA, 1125 bp, Arabidopsis thaliana
  CDS (1)..(1125)
atgaccatgacagcatttctcgcgagacggcttatcggtaacggatcgagccagattctcgggacttcgagttctagctccggtccgttcatttccgtttctagggctttcttctcctcctccactccgatcaaagctactctctttcccggtgatgggatcggtcccgaaatcgctgaatctgtcaagcaggtgtttactgccgctgatgtggttattgattgggacgaacagtttgttggtactgaagtagatcctagaaccaatagtttcttgacatgggataatcttcaatctgtgcttaaaaacaaggttggtttgaaaggaccaatggctactccaattggaaagggtcaccgttccttgaaccttactcttaggaaagagctgaatttgtatgccaatgttaggccttgttacagtcttcctggttacaaaacccgttatgatgatgttgatctcattaccattcgtgagaacactgaaggagagtacagtgggcttgaacaccaggtcgtcaagggtgtagtggaaagtcttaaaattattacccgtaaggcgagtatgagagttgccgagtatgcctttctttatgccaagactcacggaaggaagaaagtttctgcaattcacaaagccaacattatgcagaaaactgatggtcttttcctgcagtgttgtgatgaagttgctgcgaagtatcctgagatatattacgagaaggttgttattgacaattgctgtatgatgcttgtgaaaaacccagcactttttgatgtcttggtgatgccaaatctctatggagatattatcagcgatttgtgtgctggacttgttgggggactaggactgactcctagtatgaatattggggaggatggtattgcccttgctgaagctgttcacggctctgcacctgatattgctggaatgaacctggcgaacccaacagctttgctactgagtggagtgatgatgttgcggcacctgaagctcaacaaacaagcagagcaaatccacagtgccatcatcaacacaatagccgagggaaagtatagaactgctgatctcggaggttcctcaactacaacagatttcacaaaagccatctgtgatcatctctaa

SEQ ID NO: 37302 - protein, 374 aa, Arabidopsis thaliana
MTMTAFLARRLIGNGSSQILGTSSSSSGPFISVSRAFFSSSTPIKATLFPGDGIGPEIAESVKQVFTAADVVIDWDEQFVGTEVDPRTNSFLTWDNLQSVLKNKVGLKGPMATPIGKGHRSLNLTLRKELNLYANVRPCYSLPGYKTRYDDVDLITIRENTEGEYSGLEHQVVKGVVESLKIITRKASMRVAEYAFLYAKTHGRKKVSAIHKANIMQKTDGLFLQCCDEVAAKYPEIYYEKVVIDNCCMMLVKNPALFDVLVMPNLYGDIISDLCAGLVGGLGLTPSMNIGEDGIALAEAVHGSAPDIAGMNLANPTALLLSGVMMLRHLKLNKQAEQIHSAIINTIAEGKYRTADLGGSSTTTDFTKAICDHL

SEQ ID NO: 37303 - DNA, 1281 bp, Aquifex aeolicus
  CDS (1)..(1281): transl_table=11
atgaataaaacaacgtttgaaaatgtttactactgggaaggaaaggcacaaatcccccaggaagggcagtttataaagctcaaagaagataaaaccttagaagttccagacaacccgataattcccttcatagagggagatgggataggtcctgaaataacgcaggctatgctccttattatcaacacagcggttgaaaaaacttacaacggaagcaagaagatttactgggtagaactcctcgcgggggataaggcggaagaaaagactggagagaggcttcctcaggaaaccctggacgttttaaaagaatcaatagtaggtataaaaggacccctcggaacgcccgtaggaaaaggtgtccgctccataaactccgccctcaggagggcatttgattactactctgcggtaagacccgtttactggatgggccaggcaactccgattccaaatcctgagagggttgacctcgtagttttcagagaaaacaccgacgacgtctacgcgggagtggagttctttgcgggaacgcccgaagccaaaaaggtaagagaattcctcataaaggagatgggggcaaaagaggaaggcttccccgaagatgtgggaataacggtaaagcccatgagcgagttcaagacaaagagacacgtgaggaaagcactcagatacgcccttgaaaacaacaagaagaacgtcgcggtaataggaaaaggaaacataatgaaggcaacggaaggggccttcataaactgggcttttgaggtagcagaagagcccgaattcaaaggaaaggtagtaacggacccggaagcagagcccggcgaaggacaggtaaaactcacaaaagtgataaccgaccagatgcttatgcaacttgtcctcaagcccgaagcttgggacgtgataatcgctcagaacttgaacggtgactacgtttccgaccttgcagcttctctgataggaggtccaggatttgttccgagcggaaacataggggacggatatgccctctttgaaagcacccacggaacagcttgggacatagcaggcaagggaatagcaaatcccctttcccttacactatctggcgcgatgatgcttgaatacataggctggaaagaagcagctcaaaaggtctacgacgcagtaagaagaacccttgcggaacatataggaacgcccgatatcgcaagcggattccagaaacagggaatagaagctaaagcagtaggcacgatggagttcgccgaagaaatttccaagaggattgagtaa

SEQ ID NO: 37304 - protein, 426 aa, Aquifex aeolicus
MNKTTFENVYYWEGKAQIPQEGQFIKLKEDKTLEVPDNPIIPFIEGDGIGPEITQAMLLIINTAVEKTYNGSKKIYWVELLAGDKAEEKTGERLPQETLDVLKESIVGIKGPLGTPVGKGVRSINSALRRAFDYYSAVRPVYWMGQATPIPNPERVDLVVFRENTDDVYAGVEFFAGTPEAKKVREFLIKEMGAKEEGFPEDVGITVKPMSEFKTKRHVRKALRYALENNKKNVAVIGKGNIMKATEGAFINWAFEVAEEPEFKGKVVTDPEAEPGEGQVKLTKVITDQMLMQLVLKPEAWDVIIAQNLNGDYVSDLAASLIGGPGFVPSGNIGDGYALFESTHGTAWDIAGKGIANPLSLTLSGAMMLEYIGWKEAAQKVYDAVRRTLAEHIGTPDIASGFQKQGIEAKAVGTMEFAEEISKRIE

SEQ ID NO: 37305 - DNA, 1239 bp, Archaeoglobus fulgidus
  CDS (1)..(1239): transl_table=11
atgcagtacgagaaggtcaaacctccagagaacggagaaaagataagatatgaaaacggcaaactcatcgttccagataaccccatcatcccgtatttcgagggagatggcataggcaaggatgtggttccagctgcaatcagagttctcgatgccgctgctgataagattggcaaggaagtcgtctggtttcaggtttatgctggggaggatgcctacaagctctacggcaactatctgcctgatgacacactgaacgccataaaggagttcagagttgccttaaaaggccctctcacaacccccgttggaggtggctacaggagtctaaatgtcacaatcagacaggttctcgacctctatgccaatgttaggccagtctactacctgaaaggagttccaagcccgataaagcatcctgaaaaggtcaacttcgttattttcagggagaacaccgaagacgtttacgctggcattgagtggccgaggggtagcgaggaagcccttaagttaataagattcctcaagaacgagtttggtgtcaccataagggaggactctggaatcggaataaagccgatcagcgagtttgccaccaagaggcttgtcaggatggccatcagatatgcaatagagaacaacaggaaaagcgtgactctcgtccacaagggcaacataatgaagtacacggagggagccttcagggattggggctacgaggtggcaaagcaggagtttggcgagtattgcataacagaggacgagctctgggacaagtacggcgggaagcagcctgagggcaagatcgtggtgaaggacaggattgcggacaacatgttccagcagattctgacgaggacagatgagtatgacgtcattgccctgccaaacctcaatggtgattacctcagcgatgctgctgctgccctgattgggggacttggaatagctccgggcagcaacataggtgatggcattggcgtcttcgagcctgtgcacggctctgcaccgaagtacgctggccagaacaaggtcaaccccacagccgaaattctcacaggagcgctgatgttcgagtacatcggctggaaggatgcgagcgagatgataaagaaagctgtggagatgacgataagcagcggaattgttacctacgacatccaccgccacatgggcgggacgaaggtaggaacgagggagtttgcagaggctgtggttgaaaacctgcagtcgctatga

SEQ ID NO: 37306 - protein, 412 aa, Archaeoglobus fulgidus
MQYEKVKPPENGEKIRYENGKLIVPDNPIIPYFEGDGIGKDVVPAAIRVLDAAADKIGKEVVWFQVYAGEDAYKLYGNYLPDDTLNAIKEFRVALKGPLTTPVGGGYRSLNVTIRQVLDLYANVRPVYYLKGVPSPIKHPEKVNFVIFRENTEDVYAGIEWPRGSEEALKLIRFLKNEFGVTIREDSGIGIKPISEFATKRLVRMAIRYAIENNRKSVTLVHKGNIMKYTEGAFRDWGYEVAKQEFGEYCITEDELWDKYGGKQPEGKIVVKDRIADNMFQQILTRTDEYDVIALPNLNGDYLSDAAAALIGGLGIAPGSNIGDGIGVFEPVHGSAPKYAGQNKVNPTAEILTGALMFEYIGWKDASEMIKKAVEMTISSGIVTYDIHRHMGGTKVGTREFAEAVVENLQSL

SEQ ID NO: 37307 - DNA, 1272 bp, Bacillus subtilis
  CDS (1)..(1272): transl_table=11
gtggcacaaggtgaaaaaattacagtctctaacggagtattaaacgtaccaaacaacccgattatcccatttatcgaaggagacggaaccggtcctgatatttggaacgcggcttcgaaggttttggaagcagcagtagaaaaagcatacaaaggcgaaaagaaaattacatggaaagaagtttacgccggagaaaaggcttataataaaacaggtgagtggctccctgctgaaacattagatgtgatccgcgaatatttcatcgcgattaaaggcccgttaacgacacctgtcggcggcggtatccgttctttgaacgtagcgctcagacaagagcttgacctattcgtctgcttaagacctgtaagatactttactggagtgccgtcaccggtaaaacgccctgaagatactgatatggtcatcttccgtgaaaatacagaagatatttacgcaggcatcgagtatgcaaaaggctctgaagaagtgcaaaagcttatcagcttccttcaaaatgagttaaacgtcaataaaatccgtttccctgagacatcaggtatcggcattaagcctgtttcagaagaaggaacaagccgcttggtcagagctgccattgattatgcgatcgagcatggccgcaaatctgtaacacttgttcacaaaggaaacatcatgaagttcacagaaggcgccttcaaaaactggggctatgaacttgctgaaaaagaatacggagataaagtcttcacatgggctcaatatgaccgcattgctgaagaacaaggaaaagacgctgccaacaaagcgcaaagcgaagcggaagcagcaggaaaaatcattatcaaagacagcattgctgacattttccttcagcagatcttaacgcgtccaaacgagtttgatgtcgttgcgacaatgaacttgaacggagattacatttctgatgctcttgctgcgcaagtcggcggaatcggcattgctcctggagcgaacatcaactacgaaacaggacatgcgattttcgaggcgacgcacggaacggctcctaaatatgcaggccttgataaagtaaacccatcttcagttattctttcaggcgttctgcttcttgagcatttaggatggaacgaagcggctgatttggttatcaaatctatggaaaaaacaatcgcttctaaagtcgtaacttacgattttgccagattaatggacggggcgactgaagtgaaatgttcagagttcggagaagaactgatcaaaaacatggactaa

SEQ ID NO: 37308 - protein, 423 aa, Bacillus subtilis
MAQGEKITVSNGVLNVPNNPIIPFIEGDGTGPDIWNAASKVLEAAVEKAYKGEKKITWKEVYAGEKAYNKTGEWLPAETLDVIREYFIAIKGPLTTPVGGGIRSLNVALRQELDLFVCLRPVRYFTGVPSPVKRPEDTDMVIFRENTEDIYAGIEYAKGSEEVQKLISFLQNELNVNKIRFPETSGIGIKPVSEEGTSRLVRAAIDYAIEHGRKSVTLVHKGNIMKFTEGAFKNWGYELAEKEYGDKVFTWAQYDRIAEEQGKDAANKAQSEAEAAGKIIIKDSIADIFLQQILTRPNEFDVVATMNLNGDYISDALAAQVGGIGIAPGANINYETGHAIFEATHGTAPKYAGLDKVNPSSVILSGVLLLEHLGWNEAADLVIKSMEKTIASKVVTYDFARLMDGATEVKCSEFGEELIKNMD

SEQ ID NO: 37309 - DNA, 1641 bp, Caldococcus noboribetus
  CDS (107)..(1396): transl_table=11
aaggaagccctatgagaagaccttaaaggaaatcttaggcctaacgtaataagactacatttaacctttttaaagcctcgtatgtaccctctacctgggacctttcatggtctctcacccatgcactgcagatgaggctaagcctccttcagagggccagctggcaaggtttgagaacggcaagctcatagtgcctgacaacctaatagttgcttacttcaagggcgacggcatagggcctgagatagttgaaagcgctaagaaggtgcttgacgcagcagttgacaaggcctacgggggcaccaggaggatagtctggtgggaggtgacagctggcgaggaggcccagaaggagtgcggctccctcctgcccgacggcacgcttcaggccttcaagctggctcgcgtcaaccttaaggggcccctgaccacgcccgttggaggcggcttcaggagcctcaacgtgaccctcaggatggtgcttgacctgtactcaaacgtcaggccagtcaagtggtacggccagccgactccgcactgccacccagagaatatagactgggtgatatttagggagaacacggaggacgtctacgctggcatcgagtggcccttcgacagccccgaggcccagaagataagggacttcctcaagaaggagttcggtatagagctgacgccagacacaggcataggcattaagcccatatccaagtggaggacgcagaggcacgtcaggagggccatggagtgggccataaggaacggctataagcacgtgactataatgcacaagggcaacataatgaagtacacggagggcgccttcaggcagtgggcctacgacctcatactctcagagttcagggactacgtggtcaccgaggaggaggttaacaccaagtacggcggcaaggcgccggagggcaagataatagttaatgacaggattgctgacaacatgttgcagcagataataaccaggcccggcgagtacaacgttatagtaacccccaacctgaacggtgactacataagcgacgaggccaacgccctggtgggcggcattggaatggctgcgggacttgacatgggcgatggcatagcggttgcggagccagtccacggcagcgcccccaagtacgctggtaagaacgtcataaacccgaccgccgagatactgagcggcatgtacctgctcagcgacttcgtgggatggccagaggtcaagctgctggttgagtacgcagtcaagcaggcgatagcccacaagcaggtgacctatgacctggccagggagatgggaggggtaacgccaatatcgaccacggagtacaccgatgtcctagttgactacataaggcacgcggacctcaaggccctcaagggccagtgaaggcctgccttagccctcaccctctattttctttaggatatcgcacacctctgagagcctgttgactctgtactttgccacgccctcaagggacccgtcatcaccgatggcaacagggtagccgacaagcttcatggcctctgcgtcccactttgagtcaccgacgtacatgacctccccgaggctgaccccaagttcgccaaccaggagctttagggccctggccttgttgaccccaactgcag

SEQ ID NO: 37310 - protein, 429 aa, Caldococcus noboribetus
MVSHPCTADEAKPPSEGQLARFENGKLIVPDNLIVAYFKGDGIGPEIVESAKKVLDAAVDKAYGGTRRIVWWEVTAGEEAQKECGSLLPDGTLQAFKLARVNLKGPLTTPVGGGFRSLNVTLRMVLDLYSNVRPVKWYGQPTPHCHPENIDWVIFRENTEDVYAGIEWPFDSPEAQKIRDFLKKEFGIELTPDTGIGIKPISKWRTQRHVRRAMEWAIRNGYKHVTIMHKGNIMKYTEGAFRQWAYDLILSEFRDYVVTEEEVNTKYGGKAPEGKIIVNDRIADNMLQQIITRPGEYNVIVTPNLNGDYISDEANALVGGIGMAAGLDMGDGIAVAEPVHGSAPKYAGKNVINPTAEILSGMYLLSDFVGWPEVKLLVEYAVKQAIAHKQVTYDLAREMGGVTPISTTEYTDVLVDYIRHADLKALKGQ

SEQ ID NO: 37311 - DNA, 1269 bp, Staphylococcus aureus
  CDS (1)..(1269): transl_table=11
atgactgcagaaaaaattactcaaggaactgaaggattaaacgtacctaatgagccaattatcccatttattatcggtgatggaattggaccggatatttggaaggcagcaagccgagttatagatgctgctgttgagaaagcctataatggcgaaaaacgcattgaatggaaagaagtgctagctggtcaaaaagcatttgatacaactggcgaatggttacctcaagaaacacttgatacaattaaagaatatttaattgctgttaaaggacctttaacaacaccaattggtggtggtattagatcattaaatgtagctttacgccaagaattagatttatttacttgtttaagaccggtacgttggtttaaaggagtaccatcacctgttaaacgtccacaagatgttgatatggttattttccgtgaaaatactgaagacatttatgctggtattgaatttaaagaaggaacaacagaagttaaaaaggtaattgatttcttacaaaacgaaatgggtgcgacaaatattcgattcccagaaacttcaggtattggtattaagccagtttctaaagaaggtactgagcgattagttagagcagcaattcaatatgctatcgataataaccgtaaatcagttactttagttcataaaggtaatattatgaaatttacagaaggctcatttaagcagtggggttacgatttagcattaactgaatttggtgatcaagtatttacttggcaacaatatgacgaaattgttgaaaaagaaggcagagatgctgctaatgttgcacaagaaaaagctgaaaaagaaggcaagattatcattaaagattctattgctgacattttcttacaacaaattttaactcgtccagctgagcatgatgttgtagcaactatgaacttgaatggtgactacatttcagatgcattagctgcacaagttggtggtattggtattgcgccaggtgcaaacattaattatgaaacagggcatgctatttttgaagcaacacatggtacagctccaaaatatgcaggtttaaataaagtgaatccatcttcagtaattttaagttctgtattaatgttagaacatttaggatggcaagaagcggcagataagattacagattcaattgaagatacaattgcttcaaaagttgttacttatgactttgcccgtttaatggatggtgctgaagaagtttctacatcagcatttgcagatgaattgattaaaaatttaaaataa

SEQ ID NO: 37312 - protein, 422 aa, Staphylococcus aureus
MTAEKITQGTEGLNVPNEPIIPFIIGDGIGPDIWKAASRVIDAAVEKAYNGEKRIEWKEVLAGQKAFDTTGEWLPQETLDTIKEYLIAVKGPLTTPIGGGIRSLNVALRQELDLFTCLRPVRWFKGVPSPVKRPQDVDMVIFRENTEDIYAGIEFKEGTTEVKKVIDFLQNEMGATNIRFPETSGIGIKPVSKEGTERLVRAAIQYAIDNNRKSVTLVHKGNIMKFTEGSFKQWGYDLALTEFGDQVFTWQQYDEIVEKEGRDAANVAQEKAEKEGKIIIKDSIADIFLQQILTRPAEHDVVATMNLNGDYISDALAAQVGGIGIAPGANINYETGHAIFEATHGTAPKYAGLNKVNPSSVILSSVLMLEHLGWQEAADKITDSIEDTIASKVVTYDFARLMDGAEEVSTSAFADELIKNLK

SEQ ID NO: 37313 - DNA, 1182 bp, Streptococcus mutans
  CDS (1)..(1182): transl_table=11
atggcagaaaaagtaagttttgaagaagggaaattacaggtgcctgataagcccgttattccttacattgaaggagatggtgttggtcaggatatttggaagaatgcgcaaatcgtttttgataaagccattgctaaagtttatggaggtcacaagcaggttatttggcgggaggtcttagctggtaaaaaagcttataatgaaacaggcaactggctgcctaatgagactttagaaattatcaagacgcatttacttgctattaaaggtccattggaaactcctgttggaggtggcattcgttccttaaatgttgccctgcgtcaagaattggatctctttgcttgcgtgcgtccagtgcgttatttcaaaggtgtccctagtccacttaagcatcctgaaaaaacggctattaccatttttcgagaaaatactgaagatatttacgcaggtatcgaatggaatgcgggtacagcagaagttcaaaaggtcatcaactttttacaagatgatatgcaggttaagaaaattcgttttccaaaaagcagcagtatagggattaaacctatttcaattgaaggcagccaacgtttgattcgtgcagctatcgaatatgctctggccaacaatctgaccaaggtaactttggttcataaaggaaatattcaaaaattcactgaaggtggctttagaaaatggggctatgaattagcaaaacgtgagtatgctgccgaacttgccagtggtcaattggtagttgatgatattattgctgacaatttcttgcaacaaattctgctcaagcctgagcgttttgatgtagttgccttaacgaatctcaatggagactatgccagcgatgccttagcagcacaagttggcggtattggtatttcgccaggagctaatattaactatcaaacgggacatgctatttttgaagcaacccatggaacggctccagatattgcaggtcaagacttggccaacccatcttctgttttattatcaggctgcatgctttttgactatattggttggtcaaaagtctcagatttaatcatgaaagctgttgaaaaagctattgcaaatggtcaagttaccattgattttgccaaggaactaggggttgaagcattgacaacccgtcagttttctgaagttctattgacttatttatag

SEQ ID NO: 37314 - protein, 393 aa, Streptococcus mutans
MAEKVSFEEGKLQVPDKPVIPYIEGDGVGQDIWKNAQIVFDKAIAKVYGGHKQVIWREVLAGKKAYNETGNWLPNETLEIIKTHLLAIKGPLETPVGGGIRSLNVALRQELDLFACVRPVRYFKGVPSPLKHPEKTAITIFRENTEDIYAGIEWNAGTAEVQKVINFLQDDMQVKKIRFPKSSSIGIKPISIEGSQRLIRAAIEYALANNLTKVTLVHKGNIQKFTEGGFRKWGYELAKREYAAELASGQLVVDDIIADNFLQQILLKPERFDVVALTNLNGDYASDALAAQVGGIGISPGANINYQTGHAIFEATHGTAPDIAGQDLANPSSVLLSGCMLFDYIGWSKVSDLIMKAVEKAIANGQVTIDFAKELGVEALTTRQFSEVLLTYL

SEQ ID NO: 37315 - DNA, 1176 bp, Streptococcus salivarius
  CDS (1)..(1176): transl_table=11
atggcagaaaaaatcgtaatgaaaaatggacagcttcaagtttctgatcgtccaattatcccttttattgaaggcgatggtgttggacatgatatctggaagaatgcccaagcaatctttgataaagcagtagaagtagcctatgaaggaaagcgtcatattgaatggcaagagcttctagccggtaagaaggcttatgacaaaacaggtgaatggttgccgaaagaaactttggaagctattcgagaaagtttagtagctattaagggaccgcttgagacgccagtaggtggtggtatccgttcattaaatgtagcattacgtcaagaacttgatctctacgcttgtgttagacctgttcgttactttgacggagtagcaagtccacttaaggaaccagaaaaaacaaatattactatcttccgtgaaaataccgaagatatttatgctgggattgaatgggaagcaggaacggcagatgtcaagcgcgtgattgagtttctccagacagaaatgaatgttaataaaattcgcttcccagagtcaagtagtatcggaattaagccaatttcaatagaaggaagtaaacgtctcattcgctctgctatcgactatgctctcaagaacaatctaaagaaagtgacattggttcataaagggaatattcaaaaattcacagaaggtggcttccgtaaatggggttatgaagtagctcaggaagactataaagaagaattgctggctggtcgtttagagattaatgatataatcgctgataactttctccaacagattcttttaaatccagaaaaatttgatgttgttgccttaaccaacttgaatggtgattatgccagtgatgccttggctgcacaagttggtggtatcggcatctcccctggagccaacattaactatcaaacaggccatgctatttttgaagcaacacatggaacagctccggatattgcagatcaagataaggctaatccttgctcagttttattatctggctgcatgcttctagattatattggttggactgaggcagctcaactgattacaagtgctattgagaagacatttaaagctgatatctttacagctgacttagcatttgggaaacaagcttattcaacgagtgcctttagcaatcaaattctttcaattatgtga

SEQ ID NO: 37316 - protein, 391 aa, Streptococcus salivarius
MAEKIVMKNGQLQVSDRPIIPFIEGDGVGHDIWKNAQAIFDKAVEVAYEGKRHIEWQELLAGKKAYDKTGEWLPKETLEAIRESLVAIKGPLETPVGGGIRSLNVALRQELDLYACVRPVRYFDGVASPLKEPEKTNITIFRENTEDIYAGIEWEAGTADVKRVIEFLQTEMNVNKIRFPESSSIGIKPISIEGSKRLIRSAIDYALKNNLKKVTLVHKGNIQKFTEGGFRKWGYEVAQEDYKEELLAGRLEINDIIADNFLQQILLNPEKFDVVALTNLNGDYASDALAAQVGGIGISPGANINYQTGHAIFEATHGTAPDIADQDKANPCSVLLSGCMLLDYIGWTEAAQLITSAIEKTFKADIFTADLAFGKQAYSTSAFSNQILSIM

SEQ ID NO: 37317 - DNA, 1428 bp, Synechocystis sp
  CDS (1)..(1428): transl_table=11
atgtacgaaaaacttcagccccccagcgttgggtcaaaaatcacctttgttgcaggtaagcccgtagtacccaacgatccgattattccctacatccggggggacggcaccggggttgatatttggcccgctacggaattagtcatcaatgcagcgatcgccaaggcctatggcggccgagaggaaatcaactggttcaaagtctatgccggggacgaagcctgtgaattgtacggcacttatcagatatttccggaagacactttaacagcgattaaggagtatggggtagccatcaaagggcctctcacaaccccggtgggcggtggtatccgttccctaaacgtggccctgagacaaatttttgacctctacacctgtgtgcggccctgtcgttactatcccggtactccgtctccccacaaaaccccggaaaaattagacattatcgtttatcgggaaaatacggaagatatttacctaggcattgaatgggcggaaggtacggaaggggcgaaaaagttaatcgcttaccttaacgatgaactcattcccacaactccagctttgggcaaaaaacaaattcgcctcgactctggcattggtattaaaccgattagtaagactggttcccaacggttggtgcggcgggctattctccatgctaagcgcttgccgaaagcaaaacagatggtgacgttggtccataagggcaacattatgaagttcaccgaagggccgtttcgggattggggttacgagttggctacgacggaatttcgggcggaatgcgttacggaacgggaatcttggatttgcggcaataaggaaagtaatccggacttaaccattgaggccaacgcccacatgattgaccccggttatgacactttgaccgaagaaaaacaagcggtcattaaacaagaagtggagcaggttttaaattccatttgggaatcccatggtaatggccagtggaaagaaaaagtcatggtcaatgaccgcattgccgatagtattttccaacagatccaaacccgccccgatgagtattccattctggcgaccatgaatttgaacggggattacctttccgatgccgccgccgctgtggtgggaggtttgggcatgggccccggagctaacattggggatagtgcagccatttttgaagccacccacggcactgcccccaaacatgctggtttagaccggatcaaccccggctctgtgatcctttccggcgtaatgatgctggaatttatgggctggcaggaggccgctgatctgattaaaaaaggtatcggagcggcgatcgccaatcgggaagttacctacgatttagcccggttaatggaaccgaaggtggataaacccctaaaatgctccgagtttgcccaggcgatcgtcagtcatttcgatgattaa

SEQ ID NO: 37318 - protein, 475 aa, Synechocystis sp
MYEKLQPPSVGSKITFVAGKPVVPNDPIIPYIRGDGTGVDIWPATELVINAAIAKAYGGREEINWFKVYAGDEACELYGTYQIFPEDTLTAIKEYGVAIKGPLTTPVGGGIRSLNVALRQIFDLYTCVRPCRYYPGTPSPHKTPEKLDIIVYRENTEDIYLGIEWAEGTEGAKKLIAYLNDELIPTTPALGKKQIRLDSGIGIKPISKTGSQRLVRRAILHAKRLPKAKQMVTLVHKGNIMKFTEGPFRDWGYELATTEFRAECVTERESWICGNKESNPDLTIEANAHMIDPGYDTLTEEKQAVIKQEVEQVLNSIWESHGNGQWKEKVMVNDRIADSIFQQIQTRPDEYSILATMNLNGDYLSDAAAAVVGGLGMGPGANIGDSAAIFEATHGTAPKHAGLDRINPGSVILSGVMMLEFMGWQEAADLIKKGIGAAIANREVTYDLARLMEPKVDKPLKCSEFAQAIVSHFDD

SEQ ID NO: 37319 - DNA, 1074 bp, Solanum tuberosum
  CDS (1)..(1074)
atggctcttcagattgcgaaaagactccttcgatgccgcgctgattctgttgcatcctctgttagatttttcgatcggaccttcacttccgaatccaattccaacttgatccgcgctacgcttttccccggcgatggtattggacctgaaatcgccgagtccgtcaggcagatattcaaggttgctgaggtaccaattgaatgggaagaacactatgtggggacggaggtagaccctagaaccaacagctttctaacatgggaaagtcttgaatcagtgagacggaataaggttggtttgaaagggccaatggccactcctattggaaaaggtcatcgttccttgaaccttacattgaggaaggagttaaatctatatgccaatgtcagaccttgctacagcctacctggatataagactcgctacgatgatgtgaatctcatcactattagagagaacactgaaggagagtacagtggtcttgaacatcaagtagtaagaggtgtggttgaaagtctcaagatcattacccgtcaagcaagtttaagggttgcagagtatgcatttcactatgccaagacccatggaagagagagagtgtctgcaattcacaaagccaacatcatgcagaagacagatggtctttttcttaagtgttgccgagaggtcgcggaaaagtaccctgagataaagtatgaggaagttgtcattgacaattgctgtatgatgcttgtgaaaaatccagcactttttgatgttctggtgatgcctaatctttatggtgacataatcagtgatctttgtgctggtttgattggtggtttgggcttaactccaagttgcaatattggcgagggaggtattgcccttgctgaggctgtgcatggttcagcacctgatattgccggaaagaatttggcgaatccaactgctttgcttttgagttctgtctctatgcttcgtcatctagagcttcatgataaagctgatcgcatccaagatgccatcctaaaaacaattgcaggagggaaagtaccgaactggcgaccttggaggcactgctacaacaactga

SEQ ID NO: 37320 - protein, 357 aa, Solanum tuberosum
MALQIAKRLLRCRADSVASSVRFFDRTFTSESNSNLIRATLFPGDGIGPEIAESVRQIFKVAEVPIEWEEHYVGTEVDPRTNSFLTWESLESVRRNKVGLKGPMATPIGKGHRSLNLTLRKELNLYANVRPCYSLPGYKTRYDDVNLITIRENTEGEYSGLEHQVVRGVVESLKIITRQASLRVAEYAFHYAKTHGRERVSAIHKANIMQKTDGLFLKCCREVAEKYPEIKYEEVVIDNCCMMLVKNPALFDVLVMPNLYGDIISDLCAGLIGGLGLTPSCNIGEGGIALAEAVHGSAPDIAGKNLANPTALLLSSVSMLRHLELHDKADRIQDAILKTIAGGKVPNWRPWRHCYNN

SEQ ID NO: 37321 - DNA, 1137 bp, Oryza sativa
  CDS (1)..(1137)
atggcgcggcgatccgcccctctcctccagcgcctcctctcccccactccctccccctccccctccccgccccatcctctcgccgccgccgccgtctcccgccgcaccgtcacctacatgccgcggccgggggacggcgccccgcgcgccgtcacgctcatcccgggcgacggcatcgggcccctcgtcaccggcgccgtgcggcaggtgatggaggccatgcacgcgccggtctacttcgagtcctacgaggtccgcggcgacatgccgacggttccccccgaggtcatcgactccatccgccgcaacaaggtctgcctcaagggcggcctcgccaccccagtcggcgggggtgtctcctccctcaacgtgcagctccgcaaggagctcgacctctacgcctccctcgtcaactgcttcaacctcccggggctgcccaccaggcacgacaacgtcgacattgtcgtcatcagggagaacaccgagggcgagtactccgggcttgagcacgaggtcgtccctggcgtcgtggagagccttaaggtgatcacaaagttctgctctgaaaggattgccaagtatgcttttgagtacgcgtacctcaacaacagaaagaaagtgactgccgtgcataaagcaaacatcatgaagcttgctgatggtttattcttggagtcttgccgtgaggttgcaacaaagtatcctggaattcaatataatgaaatcatcgtggacaactgttgtatgcagcttgttgctaagcctgaacaatttgatgttatggtcacgccaaatctttatggcaatctggtggctaacacggctgcaggtattgctggaggcactggtgtcatgcctggaggtaatgtgggtcaggaccatgctgtcttcgagcaaggagcttctgcaggaaatgttggaaacgtcaaagttgtggagcagaagaaagctaaccccgttgctctgctcctctcatctgccatgatgttgcggcatttgcaattcccatcattcgctgaccggctggagacggcggtgaagcgtgtcatcgcagaaggcaagtacagaaccaaagacttgggcggcagcagcaccacgcaggaagtcacggatgcagtgatcgcgcatcttgattaa

SEQ ID NO: 37322 - protein, 378 aa, Oryza sativa
MARRSAPLLQRLLSPTPSPSPSPPHPLAAAAVSRRTVTYMPRPGDGAPRAVTLIPGDGIGPLVTGAVRQVMEAMHAPVYFESYEVRGDMPTVPPEVIDSIRRNKVCLKGGLATPVGGGVSSLNVQLRKELDLYASLVNCFNLPGLPTRHDNVDIVVIRENTEGEYSGLEHEVVPGVVESLKVITKFCSERIAKYAFEYAYLNNRKKVTAVHKANIMKLADGLFLESCREVATKYPGIQYNEIIVDNCCMQLVAKPEQFDVMVTPNLYGNLVANTAAGIAGGTGVMPGGNVGQDHAVFEQGASAGNVGNVKVVEQKKANPVALLLSSAMMLRHLQFPSFADRLETAVKRVIAEGKYRTKDLGGSSTTQEVTDAVIAHLD

SEQ ID NO: 37323 - DNA, 1008 bp, Oryza sativa
  CDS (1)..(1008)
atgcccaggccaggggacgggaacccgcgcgccgtgacgctgatcccgggggacgggatcgggccgctcgtgacgggggccgtgcagcaggtgatggaggtgatgcacgcgccggtctacttcgagacctacgaggtccgcggcgacatgcccaccgtgccgcccgccgtcatcgagtccatccgccgcaacaaggtgtgcctcaagggcggcctcgccacccccgtcggcggcggggtctcctccctcaacatgcagctccgcaaggagctcgacctctacgcctcgctcgtcaactgctccaacttccccggcctccccaccaggcaccaggacgtcgacatcgtcgtcatcagggagaacaccgagggggagtactcggggctcgagcacgaggtcgtgcccggcgtcgtcgagagcctcaagttttgctctgagaggattgccaaatatgcttttgagtatgcttaccttaacaaccgaaagaaagtcacagcagtgcataaagcaaacatcatgaagcttgctgatggtttgttcttggaatcttgccgtgaggttgcctcaaagtatcctggtattcagtataatgagatcattgtcgacaactgctgtatgcaacttgttgcaaagcctgagcaatttgatgtcatggttacaccaaacctttatggcaatttggttgctaacacggctgcaggtattgctggagggacaggtgttatgcctggaggtaatgtgggtcaggaccatgctgtctttgagcaaggtgcttctgcaggaaacgtcggaaacgagaacatcttagagcagaagaaagcaaaccctattgcgctgcttctatcatccgccatgatgttgaggcatttgcagttcccgtcattcgccgaccggctggagacggcggtgaagcgtgtcattgcggaaggcaagtacagaacaaaggatctaggcggcaccagcaccacccaggaagtcactgatgcagtaatcgccaatctggattag

SEQ ID NO: 37324 - protein, 335 aa, Oryza sativa
MPRPGDGNPRAVTLIPGDGIGPLVTGAVQQVMEVMHAPVYFETYEVRGDMPTVPPAVIESIRRNKVCLKGGLATPVGGGVSSLNMQLRKELDLYASLVNCSNFPGLPTRHQDVDIVVIRENTEGEYSGLEHEVVPGVVESLKFCSERIAKYAFEYAYLNNRKKVTAVHKANIMKLADGLFLESCREVASKYPGIQYNEIIVDNCCMQLVAKPEQFDVMVTPNLYGNLVANTAAGIAGGTGVMPGGNVGQDHAVFEQGASAGNVGNENILEQKKANPIALLLSSAMMLRHLQFPSFADRLETAVKRVIAEGKYRTKDLGGTSTTQEVTDAVIANLD

SEQ ID NO: 37325 - DNA, 1101 bp, Brassica napus
  CDS (1)..(1101)
atgaccatggcggcagcaaccttcgcgaaacgcctgatcggaagccgatctagctcaaccacagccacttccgtcgccagagctttctgctcgtccaccactccaatcaccgcaaccatgttccccggagacgggatcggtcccgagatcgccgaatccgtcaaacaggtgttcacgacggcgggagtgccgattaactgggaagagcactacgtcagcgccgagatcgatccgagaacgcagagcttcttgacctgggagagtctcgaatccgtgcgtaggaacaaagtcggtttgaaaggtccgatggcgactccgatcgggaaaggccaccgttccttgaatctgactcttaggaaagagctgaatctgtacgctaacgttaggccttgctatagtcttcctggttacaagactcgttacgatgatgtgaatctaattactattagggagaatactgagggagagtacagtgggcttgaacatcaggttgttagaggtgtggtggagagtcttaagatcattacgcgtcaggcgagtttgagagttgctgagtatgcttttcactatgctaagactcatgggagagagagagtttccgctattcataaagctaatattatgcagaaaactgatggtcttttcctcaagtgttgtcgtgaggttgctgagaagtatcctgagattacttacgaagaggttgttattgacaactgctgtatgatgcttgtgaaaaacccagcactgtttgatgtattggtgatgccaaacctgtacggtgacattattagtgacttgtgtgctggattggttggaggactaggattgactccaagttgtaatattggggaagatggtgtagctcttgctgaagccgttcacggttctgcacctgatatcgctggaaagaacttggcgaacccaacagcgttgctactgagtggagtgatgatgttgcgtcacctgaagctgaacgaacaagcagaacagatccacagcgcaatcatcaacaccatagctgagggcaaatacagaactgcagatcttggaggtagttcgaccaccacggacttcacaaaagcaatctgtgatcatctctga

SEQ ID NO: 37326 - protein, 366 aa, Brassica napus
MTMAAATFAKRLIGSRSSSTTATSVARAFCSSTTPITATMFPGDGIGPEIAESVKQVFTTAGVPINWEEHYVSAEIDPRTQSFLTWESLESVRRNKVGLKGPMATPIGKGHRSLNLTLRKELNLYANVRPCYSLPGYKTRYDDVNLITIRENTEGEYSGLEHQVVRGVVESLKIITRQASLRVAEYAFHYAKTHGRERVSAIHKANIMQKTDGLFLKCCREVAEKYPEITYEEVVIDNCCMMLVKNPALFDVLVMPNLYGDIISDLCAGLVGGLGLTPSCNIGEDGVALAEAVHGSAPDIAGKNLANPTALLLSGVMMLRHLKLNEQAEQIHSAIINTIAEGKYRTADLGGSSTTTDFTKAICDHL

SEQ ID NO: 37327 - DNA, 1092 bp, Brassica napus
  CDS (1)..(1092)
atgtctcgccgatcaccaactctcctgaaaaacctcgccaattcaagaacccagacccgatccgtaacctacatgcccagacccggcgacggagcgccacgcgccgtgactctaatcccgggcgacgggatcggccctctcgtgaccaacgccgtggagcaggtgatggaagcgatgcacgcgccgatctacttcgagaagtacgacgtccagggggagatgagccgcgtgccggcggaggtgatggagtcgatacggaagaacaaggtgtgcttgaaaggcgggctcaagacccccgtgggcggcggcgtgagctcgctgaacgtgcagctgaggaaggagcttgacctctttgcgtcgctggtcaactgcttcaacttgcccgggttgcccacgaggcatgagaatgttgatatcgttgtgattagggagaatactgaaggggagtatgcggggcttgagcatgaggttgttcctggcgttgttgagagtcttaaggtgatcacgaagttctgttcggagcgtatagctaagtatgcttttgagtatgcttacctgaacaacaggaagaaagtgacggcggtgcacaaggctaacatcatgaagcttgctgatggtttgttcttggagtcttgtcgtgaggttgctaaaaagtatccagggatcacatacaatgagattattgtcgataactgctgcatgcaacttgtagccaagccagagcagtttgacgtcatggtaacacccaatctctatggtaatttagttgcaaacactgccgctggtattgctggaggcaccggagtcatgcctggaggaaacgttggggctgaccatgcggtgtttgagcaaggtgcatcagcaggaaatgtcgggaaagactcgatagtaaggaaaaacaaagcaaacccagtggcgttgcttctctcatcagctatgatgcttagacatcttcagtttccttcatttgctgaccggctcgaaacagcagtgaagagagtgatctctgaagggaagtgccggactaaagatcttggtggacaaagcactactcaagaggtcgttgacgcagtcattgcaaagctggagtga

SEQ ID NO: 37328 - protein, 363 aa, Brassica napus
MSRRSPTLLKNLANSRTQTRSVTYMPRPGDGAPRAVTLIPGDGIGPLVTNAVEQVMEAMHAPIYFEKYDVQGEMSRVPAEVMESIRKNKVCLKGGLKTPVGGGVSSLNVQLRKELDLFASLVNCFNLPGLPTRHENVDIVVIRENTEGEYAGLEHEVVPGVVESLKVITKFCSERIAKYAFEYAYLNNRKKVTAVHKANIMKLADGLFLESCREVAKKYPGITYNEIIVDNCCMQLVAKPEQFDVMVTPNLYGNLVANTAAGIAGGTGVMPGGNVGADHAVFEQGASAGNVGKDSIVRKNKANPVALLLSSAMMLRHLQFPSFADRLETAVKRVISEGKCRTKDLGGQSTTQEVVDAVIAKLE

SEQ ID NO: 37329 - DNA, 1095 bp, Glycine max
  CDS (1)..(1095)
atggcacgaagatccctccctctcctaaagcacctcctcctctcgcggcggatcccggcccgatccgtgacgtacatgcaccggccgggcgacgggtctcctcggcctgtgacgctgatccctggcgacgggatcgggccgatggtgacgggcgcggtggagcaggtcatggaggccatgcatgcgcccgtctactttgagaagttcgaggtccacggccacatgaaggccgtgccgccggaggtcctcgattcgattcggaagaacaaggtctgtctcaagggtggactcgtcacccccatgggtggtggcgtcagttccctcaatgttcagcttcggaaggagcttgatctctatgcttctcttgttaattgtttcaacctccctggccttcccacgcgccatgataatgttgatattgttgtcatcagggagaacaccgaaggcgagtactccggcctcgaacacgaggtcgttcccggcgttgttgaaagccttaaggtaataacaaagttttgttcagagcgaattgctaaatatgcattcgagtatgcttacctgaataacagaaagaaggtgactgccgtgcacaaagcaaatattatgaagcttgctgatggtttattcttggaatcttgtcgagaggttgctacaaagtaccctggaatcaagtataacgaaattattgtggataactgctgtatgcagcttgtttcaaagcctgaacagtttgatgtcatggtgaccccaaatctttatggaaatctagttgcaaacactgcagcaggcattgctggaggcactggagtcatgccaggaggtaatgttggggctgagcacgctgtgtttgagcaaggtgcatcagcgggaaatgtcggtagtgataaaataagggaacaaaagaaagccaatccagtggcgcttcttctctcgtcagctatgatgcttaggcatctccagtttcctgcatttgctgaccgtttggaaactgctgtggaaaaagtcatcctggagggcaaatgccgaacaaaggatcttggagggacaagcaccacccaagaggttgtggatgcagtgatagatgctttagattga

SEQ ID NO: 37330 - protein, 364 aa, Glycine max
MARRSLPLLKHLLLSRRIPARSVTYMHRPGDGSPRPVTLIPGDGIGPMVTGAVEQVMEAMHAPVYFEKFEVHGHMKAVPPEVLDSIRKNKVCLKGGLVTPMGGGVSSLNVQLRKELDLYASLVNCFNLPGLPTRHDNVDIVVIRENTEGEYSGLEHEVVPGVVESLKVITKFCSERIAKYAFEYAYLNNRKKVTAVHKANIMKLADGLFLESCREVATKYPGIKYNEIIVDNCCMQLVSKPEQFDVMVTPNLYGNLVANTAAGIAGGTGVMPGGNVGAEHAVFEQGASAGNVGSDKIREQKKANPVALLLSSAMMLRHLQFPAFADRLETAVEKVILEGKCRTKDLGGTSTTQEVVDAVIDALD

SEQ ID NO: 37331 - DNA, 1107 bp, Brassica napus
  CDS (1)..(1107)
atgtctcgccgccaatctctctccctactgaagaatctcggtagattaacaaccgggtcccaaacccagacccgatccgtgacttacatgcccagacccggtgacgggaagccacgacccgtgacgttgatccccggagacggagtaggtcctctggtgacaaacgcggtggagcaagtgatggaggcgatgcacgctcccgtctacttcgagcccttcgacgttcacggagacatgaagagtttgccggaggggttgctggagtcgatcaagaagaacaaggtttgtctgaaaggagggctcaagactcccgtcggtggaggtgtgagctcgctgaatgttaacttgaggaaggagcttgatctctttgcttctttggtcaactgtttcaatttgcctgggttagagtctcggcatgagaacgttgatatagtggtgattagggagaatactgaaggtgagtatgcagggcttgagcatgaagttgttcctggtgttgttgagagccttaaggtgattacaaagttttgttccgagcgtattgcaaagtatgcgttcgagtacgcctacttgaacaacaggaagaaagttacggcagtgcacaaggccaacatcatgaaactcgctgatggtttgttcctggaatcttgtcaagaggttgctaagaagtatccaagcatcgcctacaatgagatcattgttgataactgctgtatgcaacttgtagctagaccagagcaatttgacgtcatggtgacacccaatctctatggtaatctagttgcaaacactgctgctggtattgctggaggcactggagtcatgcctggaggaaatgttggagcggagtatgcagtgtttgagcaaggagcatcagcagggaacgtggggaaggacacgacggaagagcagaagaatgcaaaccctgtggcgttgctgctctcatcagccatgatgcttaggcatcttcagttcccttcttttgctgataggcttgaaaccgcggtgaagcgtgtcatcgctgaaggaaaatgcaggactgaagatcttggcggaaagagtacaactcaagaggtcgttgatgccgtcatttcaaaattggattga

SEQ ID NO: 37332 - protein, 368 aa, Brassica napus
MSRRQSLSLLKNLGRLTTGSQTQTRSVTYMPRPGDGKPRPVTLIPGDGVGPLVTNAVEQVMEAMHAPVYFEPFDVHGDMKSLPEGLLESIKKNKVCLKGGLKTPVGGGVSSLNVNLRKELDLFASLVNCFNLPGLESRHENVDIVVIRENTEGEYAGLEHEVVPGVVESLKVITKFCSERIAKYAFEYAYLNNRKKVTAVHKANIMKLADGLFLESCQEVAKKYPSIAYNEIIVDNCCMQLVARPEQFDVMVTPNLYGNLVANTAAGIAGGTGVMPGGNVGAEYAVFEQGASAGNVGKDTTEEQKNANPVALLLSSAMMLRHLQFPSFADRLETAVKRVIAEGKCRTEDLGGKSTTQEVVDAVISKLD

SEQ ID NO: 37333 - DNA, 1218 bp, Glycine max
  CDS (1)..(1218)
atggcggcttctctgcaactgttccaatgcaaactagcgagaccctttcggtccttccctttgcgaaggtcaactccccctctgagtctgaggtgttgcgcttcgcccccttcttcctacagcatcactctcattcccggcgatggtatcggccccgaaatcatctctgtggccaaagacgttcttgtcctcgtgggttctctcgaagggatcaaattcgagttccaagaggttcttatgggtggagctgcattggatgccaccggagtccctttacccgatgataccctttctgccgctaagcaatctcatgccgttttgcttggtgctgttggaggttataaatgggataagaacgagaaacatctcaagcctgagactggcttgcttcagatacgtaaagagcttggagtatttgcaaatcttagaccagctaccgtatactctccgttagtggatgcttcaactttgaagagagaggttgctgaaggggtcgatatcatgcttataagggaactcactggaggtatctattttggagaacccaggggctttggcaccaatgaaaatggtgaagagattggctttaatactgagatttatgctacacatgagatagatcgcatagctcattttgcatttaaggttgctcagaagcgttgtgggaaactttgttctgttgacaaagccaatgtactagaggcatcaatgttatggagaaagagatttttggcaatagcgcaagaatatcctgatgttgagctctcacatatgtatgttgataatgcttcaatgcaactaattcgcaatccaaaacagtttgacaccatggtgacaaacaacatttttggcgatatattatcagatgaggcttcaatggtcactggaagtattgggatgcttccttctgctagccttggggcttcgggacctggactttttgaacccatacacggttctgcacctgatattgccggacaggacaaggcaaatccatttgctactgttcttagtgctgctatgcttttgaggtatggcctaggagaagaaaaggcagctaaaagaatagagaatgcagtggtggacactttgaacaggggatttcgaactggtgacatatattctgcaggaacaaagctggtaggatgcaaacagttaggtgaagagataccgaagtcagttgaatctaacgttcatgctggtgctgctacagtgtga

SEQ ID NO: 37334 - protein, 405 aa, Glycine max
MAASLQLFQCKLARPFRSFPLRRSTPPLSLRCCASPPSSYSITLIPGDGIGPEIISVAKDVLVLVGSLEGIKFEFQEVLMGGAALDATGVPLPDDTLSAAKQSHAVLLGAVGGYKWDKNEKHLKPETGLLQIRKELGVFANLRPATVYSPLVDASTLKREVAEGVDIMLIRELTGGIYFGEPRGFGTNENGEEIGFNTEIYATHEIDRIAHFAFKVAQKRCGKLCSVDKANVLEASMLWRKRFLAIAQEYPDVELSHMYVDNASMQLIRNPKQFDTMVTNNIFGDILSDEASMVTGSIGMLPSASLGASGPGLFEPIHGSAPDIAGQDKANPFATVLSAAMLLRYGLGEEKAAKRIENAVVDTLNRGFRTGDIYSAGTKLVGCKQLGEEIPKSVESNVHAGAATV

SEQ ID NO: 37335 - DNA, 1092 bp, Linum usitatissimum
  CDS (1)..(1092)
atggcgttccagcacctcatgaggcgcgctctcagaagccgccccgaccacatcctctccacttcctccgccactaggcctttctcctccgctcccattacggcaactctcttccccggcgacggtatcggccccgagatcgccgagtccgttaagcaggtgttcagggaagctgaggtaccaatacaatgggaagaacattatgttggtactgaaatagatcctagaacccagagctttctgacatgggaaagtttggagtcagtaagaagaaaccgagtgggtctgaaagggccaatggctaccccaatcggcaaaggccatcgttcattgaaccttactctcaggaaagaacttaatttgtatgccaatgtcaggccttgctacagccttcctggttacaaaaccaaatacgatgatgtgaatctcatcaccattcgtgaaaacactgaaggagaatacagtgggcttgagcaccaagtggtgagaggtgtggttgaaagtctcaagatcattactcgtcaggccagtttgagggtggccgaatatgctttctactatgcaaaggctcatggaagagagagagtgtctgccatacataaagctactatcatgcagaaaaccgatggtcttttcctcaagtgctgtcgtgaggttgctgaaaagtatcctgagattacttacgaggaggttgtcattgacaactgttgcatgatgcttgtgaaaaatccagctctttttgatgtactggttatgcctaacctctacggtgacatcatcagtgatctttgtgctggtttgattggtggtctcgggttgacaccaagctgcaatattggagaagggggaattgctcttgctgaggctgtccatggctccgcccctgacattgctgggaagaacttggctaacccaactgctctgctactgagtggtgtgtccatgctgcggcatctagaactccacgataaggcagaaaggattcagaaggccgttctgggcaccattgcggaaggcaagtaccgaacggcagatcttggtggtagctctacgacatctgattttactaaagccatctgcgaccacctttga

SEQ ID NO: 37336 - protein, 363 aa, Linum usitatissimum
MAFQHLMRRALRSRPDHILSTSSATRPFSSAPITATLFPGDGIGPEIAESVKQVFREAEVPIQWEEHYVGTEIDPRTQSFLTWESLESVRRNRVGLKGPMATPIGKGHRSLNLTLRKELNLYANVRPCYSLPGYKTKYDDVNLITIRENTEGEYSGLEHQVVRGVVESLKIITRQASLRVAEYAFYYAKAHGRERVSAIHKATIMQKTDGLFLKCCREVAEKYPEITYEEVVIDNCCMMLVKNPALFDVLVMPNLYGDIISDLCAGLIGGLGLTPSCNIGEGGIALAEAVHGSAPDIAGKNLANPTALLLSGVSMLRHLELHDKAERIQKAVLGTIAEGKYRTADLGGSSTTSDFTKAICDHL

SEQ ID NO: 37337 - DNA, 1215 bp, Linum usitatissimum
  CDS (1)..(1215)
atggcgacttctgtgcaaatcaggtttaatccagtgggcgcagcttcgcaatgtaagcctacgtccaaaatttcccggcgactggttagagtcagttgcgcggccaatgcgtcgccgaaacagcacaccatcactcttctccccggagatggcattggccctgaagttatctccgttgccaagaacgtcctcaaccttactgcttctttggaaggcattgagtttaaatatcaagagatgccgatgggtggatcagcattggatttggttggtgttccattgccagatgaaactcttgctgcggctaaaaaatccgatgcagttcttcttggagcaattggggggtacaaatgggataataatgcaaaacatttgaagccagagactggattgctccagataagagaaggtctgaaagtgtttgcgaatttgaggccagcagctgttttccctcagttggtggaggcttcaacgttgaagaaagaagttgctgaaggtgttgatgttatggttgtgagggagcttacaggaggtatttattttggcaagccaagagggtttaggacagatgaaaatggtgaggaggttggcttcaatactgaggtttatgctgcatatgagattgatcgcattgctcgtgttgcatttgagactgctaggaagcggcaagggaggctttgttctgtggataaagctaatgtcttggaggcatcaatgttgtggagaaggcgcgtaactgccattgctgaagagtatccggacgttgaagtctcacacatgtatgttgacaatgctgctatgcagctaataaggaacccaaaacagtttgatacaatagtgacaaacaacatatttggtgatatactatcggatgaggcatctatgatcacgggaagcatagggatgcttccatcggccagtcttggatcatcaggtcctggactttttgagccaattcatggttctgctcctgacattgctggacaggataaagcaaatccactggcgacaattcttagcgcagcaatgctcttgaaatatggcttagggcaggaaagtgcagcaaagcgaattgagaaggcagtactggataccctagacaagggattccgtacgggtgacatatattcacctggcactaaactggtgggatgcaaggaaatgggggaggcagtgttgagatcagtcgagtcccaggtttctgctgctgtgtga

SEQ ID NO: 37338 - protein, 404 aa, Linum usitatissimum
MATSVQIRFNPVGAASQCKPTSKISRRLVRVSCAANASPKQHTITLLPGDGIGPEVISVAKNVLNLTASLEGIEFKYQEMPMGGSALDLVGVPLPDETLAAAKKSDAVLLGAIGGYKWDNNAKHLKPETGLLQIREGLKVFANLRPAAVFPQLVEASTLKKEVAEGVDVMVVRELTGGIYFGKPRGFRTDENGEEVGFNTEVYAAYEIDRIARVAFETARKRQGRLCSVDKANVLEASMLWRRRVTAIAEEYPDVEVSHMYVDNAAMQLIRNPKQFDTIVTNNIFGDILSDEASMITGSIGMLPSASLGSSGPGLFEPIHGSAPDIAGQDKANPLATILSAAMLLKYGLGQESAAKRIEKAVLDTLDKGFRTGDIYSPGTKLVGCKEMGEAVLRSVESQVSAAV

SEQ ID NO: 37339 - DNA, 1098 bp, Zea mays
  CDS (1)..(1098)
atggcgctccggaggctgctgcaggggagtgtcctgccgcgggtaaccggcagggcttcggcaccggccgtggcgccgttttcaacggaatccggagagaccgtccgtgccacgctctttccgggcgacggcatcgggccagagatcgccgagtctgtcaagcaggtattcaatgttgcaggggtaccaattgaatgggaagaacactatgttggtacagaagttgatcccagaacagagagttttttgacttgggaaagcctggagtcagtgcgtagaaacaaagttggcttgaaaggtcctatggctacacctattggaaagggtcatcgatctttgaatcttacattaaggaaagaacttgggctctatgccaatgtcaggccttgcaacagcctcccaggctacaagaccagatacgatgatgttaaccttgtgacaattcgtgaaaatactgaaggagaatatagtggtcttgagcatcaggttgtgagaggtgttgtagaaagtttgaaaattattacccgccaagcaagtttgagagtggcagaatatgcttttcattatgccaaggccaatggccgggaaagggtctctgcgattcacaaggccaatattatgaggaagacagatggtcttttcctcaagtgttgccgtgaagtggctgagacgtaccctgaaattcaatacgaggaggtcattattgacaattgttgtatgacgcttgtgaagaatcctggtccttttgatgtattagtgatgccaaacctctatggtgacattattagcgatctatgtgctggtttgattgggggcttgggcctaacacccagttgcaatattggtgaaggtggcatttgtctagcagaagctgttcatggttctgctcctgatattgctggcaagaaccttgcgaacccgactgctcttatgctgagtgctgtcatgatgttgcgccacttgcaattcaacgacaaagcagaccggatccacaacgccatcctccagactattgctggggggaagtacaggactgctgatcttggtggaaaggcatcaacatccgagtttacaaatgcagtctgtgatcacatctga

SEQ ID NO: 37340 - protein, 365 aa, Zea mays
MALRRLLQGSVLPRVTGRASAPAVAPFSTESGETVRATLFPGDGIGPEIAESVKQVFNVAGVPIEWEEHYVGTEVDPRTESFLTWESLESVRRNKVGLKGPMATPIGKGHRSLNLTLRKELGLYANVRPCNSLPGYKTRYDDVNLVTIRENTEGEYSGLEHQVVRGVVESLKIITRQASLRVAEYAFHYAKANGRERVSAIHKANIMRKTDGLFLKCCREVAETYPEIQYEEVIIDNCCMTLVKNPGPFDVLVMPNLYGDIISDLCAGLIGGLGLTPSCNIGEGGICLAEAVHGSAPDIAGKNLANPTALMLSAVMMLRHLQFNDKADRIHNAILQTIAGGKYRTADLGGKASTSEFTNAVCDHI

SEQ ID NO: 37341 - DNA, 1104 bp, Helianthus annuus
  CDS (1)..(1104)
atggctctgcatatcgccaaacgcctcctccgcacccgcgccaccacccctaccgtcgcacttttctcagccgttgatcggagcttttcctccacctcttccgatctgatccgcgccactctcttccccggtgacggcatcggtcccgagatcgccgaatctgttaaacaggtattcaatgctgcagaggttccaattgaatgggaagaacattttgtggggacagaagttgacccgaggacccaaagctatctcacatgggaaagtctagagtcagtaagaagaaataaagtgggcttaaaaggcccaatggctacgccaatcggaaaaggacatcgttccttaaaccttacgttgaggaaagaactgaatctgtacgcaaatgtcagaccatgttacagcttacctggttacaagactcgatatgacgatgttaatcttgttaccatccgtgaaaacactgaaggagagtacagtggtcttgaacatcaggtggtgcggggagttgtcgaaagtctcaaaatcatcactcgacaggcaagtctgagggtcgctgaatacgctttttattacgctaaaacacatggtagggagagagtatctgcagtacacaaagctaacatcatgcagaaaaccgatggtctctttttgaagtgctgtcgtgaagttgctgagaagtacccggagattaagtacgaggaagttgtcatcgacaattgctgtatgatgcttgtgaagaatccaacgctgtttgatgttttagtaatgcccaatctttatggtgacatcatcagtgatctgtgtgctggattaattggaggactgggtttaacaccaagcttaaacattggagagggtggtattgctcttgctgaggccgttcatggttcagctcctgatattgctggaaagaatttggcaaacccgaccgctttattactaagtgccgtatcaatgcttcaccatttggacctgaatgaaaaagccgataaaatccaagatgcggttttgaagacaatcgcagaaggcaagtaccgaactggcgatctaggtggccaatcaacaacctcggaatttacaaaagcgatcatcgatcatctttga

SEQ ID NO: 37342 - protein, 367 aa, Helianthus annuus
MALHIAKRLLRTRATTPTVALFSAVDRSFSSTSSDLIRATLFPGDGIGPEIAESVKQVFNAAEVPIEWEEHFVGTEVDPRTQSYLTWESLESVRRNKVGLKGPMATPIGKGHRSLNLTLRKELNLYANVRPCYSLPGYKTRYDDVNLVTIRENTEGEYSGLEHQVVRGVVESLKIITRQASLRVAEYAFYYAKTHGRERVSAVHKANIMQKTDGLFLKCCREVAEKYPEIKYEEVVIDNCCMMLVKNPTLFDVLVMPNLYGDIISDLCAGLIGGLGLTPSLNIGEGGIALAEAVHGSAPDIAGKNLANPTALLLSAVSMLHHLDLNEKADKIQDAVLKTIAEGKYRTGDLGGQSTTSEFTKAIIDHL

SEQ ID NO: 37343 - DNA, 1107 bp, Brassica napus
  CDS (1)..(1107)
atgtctcgccgccaatccctctctctactgaagaatatcggtagattcaccaccgggtcccaaacccagacccgatccgtgacttacatgccgagacccggcgacgggaagccacgaccggtgacgttgatccccggagacggagtaggacctctggtgacaaacgcggtggagcaagtgatggaggcgatgcacgcgcccgtgtacttcgagcccttcgacgttcacggagacatgaagagtttgccggaggggttgctggagtcgataaagaagaacaaggtttgtttgaaaggagggctcaagactcccgtaggtggaggtgtgagctcgctgaatgttaacttgaggaaggagcttgatctgtttgcttctttggtcaactgttttaatttgcctgggttagagtctcggcatgagaacgttgatatagtggtgattagagagaacactgaaggtgagtatgcagggcttgagcatgaagttgttcctggtgtcgttgagagccttaaggtgattacgaagttttgttcggagcgtatagcaaagtatgcgtttgagtatgcgtacctgaacaacaggaagaaagtgacggcagtgcacaaggctaacatcatgaaacttgctgatggtttgttcttggagtcttgtcgagaggttgctaaaaagtatccagggatcacttacaatgagattattgttgataactgctgtatgcaacttgtagccaaaccagagcagttcgacgtcatggtgacacccaatctctatggtaatttagttgcaaacactgctgctggtattgctggaggcactggagtcatgcctggaggaaacgttggggctgaccatgcggtatttgagcaaggtgcatcagcaggaaacgtggggaaagacaagatagtacgagaaaacaaagcgaacccagtggcgttgcttctctcatcagccatgatgctaagacaccttcagtttccttcatttgctgaccggctcgaaacagcagtgaaaagagtcatctccgaaggaaagtgccggactaaagatcttggtggacaaagcactactcaacaggtcgttgacgcagtcattgcaaagctggagtga

SEQ ID NO: 37344 - protein, 368 aa, Brassica napus
MSRRQSLSLLKNIGRFTTGSQTQTRSVTYMPRPGDGKPRPVTLIPGDGVGPLVTNAVEQVMEAMHAPVYFEPFDVHGDMKSLPEGLLESIKKNKVCLKGGLKTPVGGGVSSLNVNLRKELDLFASLVNCFNLPGLESRHENVDIVVIRENTEGEYAGLEHEVVPGVVESLKVITKFCSERIAKYAFEYAYLNNRKKVTAVHKANIMKLADGLFLESCREVAKKYPGITYNEIIVDNCCMQLVAKPEQFDVMVTPNLYGNLVANTAAGIAGGTGVMPGGNVGADHAVFEQGASAGNVGKDKIVRENKANPVALLLSSAMMLRHLQFPSFADRLETAVKRVISEGKCRTKDLGGQSTTQQVVDAVIAKLE

SEQ ID NO: 37345 - DNA, 1239 bp, Brassica napus
  CDS (1)..(1239)
atggcggcggctctgcagactaacatccgaccggttaagtttccggctacgttccgagctctcaccaaacaatcttctcccgcaccctttaaagtgagatgcgccgctgcttcccccgggaaaaagagatacaacatcactctccttcccggcgacggaatcggtccggaggtcatctccatcgctaaaaatgtgcttcagcaagctggttccttggaaggtctggagtttagcttccaggaaatgcctgtaggaggagctgctttggatttggtcggagtgcctttgcctgaggagaccgtctctgctgctaaagaatcagatgctgtgcttcttggagccattggagggtacaaatgggataagaatgaaaagcatctgaagcctgagactgggttgcttcaacttcgggctggtcttaaagtctttgctaatctgagacctgctactgttcttccacagttagtggatgcttcgaccttgaagagagaggttgcagaaggtgttgatctgatggttgttagggagcttacaggaggtatttactttggagtgccaaggggcattaagactaatgaaaatggtgaggaagttgggtataataccgaggtctatgctgctcacgagattgatagaattgctcgtgttgccttcgagactgctaggaaacggcgtggcaagctgtgttctgtcgacaaagccaatgtgttggacgcatcaatattatggaggagaagagtaacagcgttagcctctgagtatccagacgttgaactaacacatatgtatgtcgataatgctgcaatgcagcttattcgtgaccccaaacagtttgacacaattgtcaccaataacatttttggtgatatattatctgatgaagcttcaatgatcactggaagcattgggatgcttccatctgctagtctcggtgtatcgggacctggactgtttgagcctatacatggttcagcaccagatatagctggtcaggacaaggcaaacccattggccaccattctcagcgctgcaatgcttctgaaatatggacttggagaagaaaaggctgcaaagaggatcgaagacgcggtcttggatactttgaacaaagggtttagaaccggtgacatctactcccctggaaataaactggtgggatgcaaggagatgggtgaggaagtgctaaaatcagtggactccaacagttcaagctactgtttaagtcataaggataactga

SEQ ID NO: 37346 - protein, 412 aa, Brassica napus
MAAALQTNIRPVKFPATFRALTKQSSPAPFKVRCAAASPGKKRYNITLLPGDGIGPEVISIAKNVLQQAGSLEGLEFSFQEMPVGGAALDLVGVPLPEETVSAAKESDAVLLGAIGGYKWDKNEKHLKPETGLLQLRAGLKVFANLRPATVLPQLVDASTLKREVAEGVDLMVVRELTGGIYFGVPRGIKTNENGEEVGYNTEVYAAHEIDRIARVAFETARKRRGKLCSVDKANVLDASILWRRRVTALASEYPDVELTHMYVDNAAMQLIRDPKQFDTIVTNNIFGDILSDEASMITGSIGMLPSASLGVSGPGLFEPIHGSAPDIAGQDKANPLATILSAAMLLKYGLGEEKAAKRIEDAVLDTLNKGFRTGDIYSPGNKLVGCKEMGEEVLKSVDSNSSSYCLSHKDN

SEQ ID NO: 37347 - DNA, 1221 bp, Brassica napus
  CDS (1)..(1221)
atggcggcggctctgcagactaacatccgaccggttaagtttccggctacgttccgagctctcaccaaacaatcttctcccgcaccctttagagtgagatgcgccgctgcttcccccgggaaaaagagatacaacatcactctccttcccggcgacggaatcggtccggaggtcatctccatcgctaaaaatgtgcttcagcaagctggttccttggaaggtctggagtttagcttccaggaaatgcctgtaggaggagctgctttggatttggtcggagtgcctttgcctgaggagaccgtctctgctgctaaagaatcagatgctgtgcttcttggagccattggagggtacaaatgggataagaatgaaaagcatctgaagcctgagactgggttgcttcaacttcgggctggtcttaaagtctttgctaatctgagacctgctactgttcttccacagttagtggatgcttcgaccttgaagagagaggttgcagaaggtgttgatctgatggttgttagggagcttacaggaggtatttactttggagtgccaaggggcattaagactaatgaaaatggtgaggaagttgggtataataccgaggtctatgctgctcacgagattgatagaattgctcgtgttgccttcgagactgctcggaaacggcgtggcaagctgtgttctgttgacaaagccaatgtcctggaggcctcgattttatggagaagacgagtaacagcattagccgctgaatatccagatgttgaactgtcacatatgtatgtcgacaatgctgccatgcagcttgttcgtgaccctaaacagtttgacaccattgtcacaaacaacatttttggtgatatattatccgatgaagcttcaatgatcacaggaagcattggcatgcttccctctgctagtctcagtgaatcgggacctggactctttgaacctatacatggttctgcacctgatattgctggacaggataaagcaaacccgttggcaaccattctcagcgctgcaatgcttctgaaatacggacttggagaagaaaaggcagcaaagagaatcgaagacgcggtgttgggtgctctgaacaaaggattcagaacaggagacatctactccacaggaactaaacttgtgggctgcaaggagatgggagaggaagttctgaagtcagtggattcccacgttcaagcttctgtttaa

SEQ ID NO: 37348 - protein, 406 aa, Brassica napus
MAAALQTNIRPVKFPATFRALTKQSSPAPFRVRCAAASPGKKRYNITLLPGDGIGPEVISIAKNVLQQAGSLEGLEFSFQEMPVGGAALDLVGVPLPEETVSAAKESDAVLLGAIGGYKWDKNEKHLKPETGLLQLRAGLKVFANLRPATVLPQLVDASTLKREVAEGVDLMVVRELTGGIYFGVPRGIKTNENGEEVGYNTEVYAAHEIDRIARVAFETARKRRGKLCSVDKANVLEASILWRRRVTALAAEYPDVELSHMYVDNAAMQLVRDPKQFDTIVTNNIFGDILSDEASMITGSIGMLPSASLSESGPGLFEPIHGSAPDIAGQDKANPLATILSAAMLLKYGLGEEKAAKRIEDAVLGALNKGFRTGDIYSTGTKLVGCKEMGEEVLKSVDSHVQASV

SEQ ID NO: 37349 - DNA, 1101 bp, Brassica napus
  CDS (1)..(1101)
atgaccatggcggcagcaaccttcgcgaaacgcctgatcggaagccgatctacctcatgcgcagccacttccgtcgccagagctttctgctcgtccaccactccaatcaccgcaaccatgttccccggagacgggatcggtcccgagatcgccgaatccgtcaaacaggtgtttacgacggctggagtgccgattaactgggaagagcactacgtcagcacggagatagatccgagaacgcagagcttcttgacctgggagagtctcgaatccgtgcgtaggaacaaagtcggtttgaaaggtccgatggcgactccgatcgggaaaggccaccgctctttgaatctgactcttaggaaagagctgaatctatacgctaacgttaggccttgctatagtcttcctggttacaagactcgttacgatgatgtgaatctaattactattagggagaatactgagggagagtacagtgggcttgaacatcaggttgttagaggtgtggtggagagtcttaagatcatcacgcgtcaggcgagtttgagagttgcggagtatgcttttcactatgctaagactcatgggagagagagagtttctgctattcataaagctaacattatgcagaagactgatggtcttttcctcaagtgttgtcgtgaggttgctgagaagtatcctgagattacttacgaagaggttgttattgacaactgttgtatgatgcttgtgaaaaacccagcactgtttgatgtattggtgatgccaaacctgtacggtgacattatcagtgacctgtgtgccggattggtgggaggattaggattgactccaagttgtaatattggggaagatggtgtagcccttgctgaagcagttcacggctctgcacctgatatcgctggaaagaacttggcgaacccaacagcgttgctactgagtggagtgatgatgttgcgtcacctgaagctgaacgaacaagcagagcaaatccacagcgcaatcatcaacaccatagctgaggggaaatacagaacggcagatcttggaggtagttcgaccaccacggacttcacaaaagcaatctgtgatcatctctga

SEQ ID NO: 37350 - protein, 366 aa, Brassica napus
MTMAAATFAKRLIGSRSTSCAATSVARAFCSSTTPITATMFPGDGIGPEIAESVKQVFTTAGVPINWEEHYVSTEIDPRTQSFLTWESLESVRRNKVGLKGPMATPIGKGHRSLNLTLRKELNLYANVRPCYSLPGYKTRYDDVNLITIRENTEGEYSGLEHQVVRGVVESLKIITRQASLRVAEYAFHYAKTHGRERVSAIHKANIMQKTDGLFLKCCREVAEKYPEITYEEVVIDNCCMMLVKNPALFDVLVMPNLYGDIISDLCAGLVGGLGLTPSCNIGEDGVALAEAVHGSAPDIAGKNLANPTALLLSGVMMLRHLKLNEQAEQIHSAIINTIAEGKYRTADLGGSSTTTDFTKAICDHL

SEQ ID NO: 37351 - DNA, 1104 bp, Brassica napus
  CDS (1)..(1104)
atgtctcgtcgatcgctgactctcctcaagaacctcgccagaaactcaaacgcctcatgcatccaaacccgatccgtgacctacatgccccgacccggcgacggatccccgcgcgcagtgaccctaatccccggcgacgggatcggccccctggtgaccaacgccgtcgagcaggtgatggaggcgatgcacgcgccgatctacttcgagaagtacgacgtccacggggagatgagccgcgtgcccttggaggtgatggagtcgataaggaagaacaaggtgtgcttgaaaggagggctcaagactcctgtgggaggaggtgtgagctcgctgaacgtgcagctgaggaaggagcttgatctgttcgcgtcgctagttaactgctttaacttgcccgggttgccgacgaggcatgagaatgtggatattgttgtgattagggagaatactgagggggagtatgcggggcttgagcatgaggttgttcctggtgtcgttgagagtcttaaggtgatcacgaagttttgttcggagcgtatagcgaagtatgcgtttgagtatgcgtacctgaacaacaggaagaaagtgacggcagtgcacaaggctaacattatgaaacttgctgatggtttgttcttggagtcttgccgagaggtggctaaaaagtatccaggcataacttacaatgagattattgttgataactgctgtatgcaacttgtagccaaaccagagcaattcgatgtcatggtgacacccaatctctatggtaatttagttgcaaacactgctgctggtattgctggaggcactggagtcatgcctggaggaaacgttggggctgaccatgcggtatttgagcaaggtgcatcagcaggaaacgtggggaaagacaagatagtacgagaaaacaaagcgaacccagtggcgctgcttctctcatcagccatgatgctaagacaccttcagtttccttcatttgctgaccggcttgaaacagcagtgaaaagagtcatctctgaaggaaagtgccggactaaagatcttggtggacaaagcactactcagcaggtcgttgatgccgtcattgcaaatcttgagtga

SEQ ID NO: 37352 - protein, 367 aa, Brassica napus
MSRRSLTLLKNLARNSNASCIQTRSVTYMPRPGDGSPRAVTLIPGDGIGPLVTNAVEQVMEAMHAPIYFEKYDVHGEMSRVPLEVMESIRKNKVCLKGGLKTPVGGGVSSLNVQLRKELDLFASLVNCFNLPGLPTRHENVDIVVIRENTEGEYAGLEHEVVPGVVESLKVITKFCSERIAKYAFEYAYLNNRKKVTAVHKANIMKLADGLFLESCREVAKKYPGITYNEIIVDNCCMQLVAKPEQFDVMVTPNLYGNLVANTAAGIAGGTGVMPGGNVGADHAVFEQGASAGNVGKDKIVRENKANPVALLLSSAMMLRHLQFPSFADRLETAVKRVISEGKCRTKDLGGQSTTQQVVDAVIANLE

SEQ ID NO: 37353 - DNA, 1098 bp, Brassica napus
  CDS (1)..(1098)
atgaccatggcagcaaccttcgcgaaacggctgatcggaagccgatccacctcaaccgcaaccacttccgccgctagggctttctgctcctccaccactccaatcaccgcaaccttgttccccggcgatggaatcggccccgagatcgctgaatccgtcaaaaaggtgtttacaacggccggtgtgccgattgattgggaagaacacttcgttgggaccgagatagatccgagaacgcagagtttcttaacctgggagagtctcgaatccgtgcgtagaaacaaagtcggtttgaaagggccaatggcgactccgatcgggaaaggtcaccgttctttgaatttgactcttaggaaagagctgaatctatacgccaatgtaaggccttgctacagtcttcctggctacaagactcgttacgatgatgttaatctcatcaccattagggagaacactgagggagaatacagtgggcttgaacatcaggttgttagaggtgtggtggagagtcttaagatcattacacgtcaggcgagtttgagagttgcggagtatgcttttcactatgctaagactcatggaagagagagggtttccgctattcacaaagctaacattatgcagaaaactgatggtcttttcctcaagtgttgtcgtgaggttgcggagaagtatcctgagatcacttacgaggaagtagtcattgacaactgctgtatgatgcttgtgaaaaacccagcactgtttgatgtgttggtgatgccaaacctgtacggtgacattatcagcgacttgtgtgctggattggttggaggactaggattgactccaagttgtaatataggagaagatggagtggcccttgctgaagcagttcacggttctgcacctgatatcgctggaaagaacttggcgaacccaacagcattgctactgagtggagtgatgatgttgcgtcacctgaagctgaacgaacaagcagaacagatccacagagcaatcatcaacaccatagcggagggaaaatacagaaccgcggatcttggaggaagttcgaccaccacggatttcacaaaagcaatctgtgatcatctctga

SEQ ID NO: 37354 - protein, 365 aa, Brassica napus
MTMAATFAKRLIGSRSTSTATTSAARAFCSSTTPITATLFPGDGIGPEIAESVKKVFTTAGVPIDWEEHFVGTEIDPRTQSFLTWESLESVRRNKVGLKGPMATPIGKGHRSLNLTLRKELNLYANVRPCYSLPGYKTRYDDVNLITIRENTEGEYSGLEHQVVRGVVESLKIITRQASLRVAEYAFHYAKTHGRERVSAIHKANIMQKTDGLFLKCCREVAEKYPEITYEEVVIDNCCMMLVKNPALFDVLVMPNLYGDIISDLCAGLVGGLGLTPSCNIGEDGVALAEAVHGSAPDIAGKNLANPTALLLSGVMMLRHLKLNEQAEQIHRAIINTIAEGKYRTADLGGSSTTTDFTKAICDHL

SEQ ID NO: 37355 - DNA, 1104 bp, Brassica napus
  CDS (1)..(1104)
atgtctcgtcgatcgctgactctcctcaagaacctcgccagaaactcaaacgcctcatgcatccaaacccgatccgtgacctacatgccccgacccggcgacggatccccgcgcgcagtgaccctaatccccggcgacgggatcggccccctggtgaccaacgccgtcgagcaggtgatggaggcgatgcacgcgccgatctacttcgagaagtacgacgtccacggggagatgagccgcgtgcccttggaggtgatggagtcgataaggaagaacaaggtgtgcttgaaaggagggctcaagactcctgtgggaggaggtgtgagctcgctgaacgtgcagctgaggaaggagcttgatctgttcgcgtcgctagttaactgctttaacttgcccgggttgccgacgaggcatgagaatgtggatattgttgtgattagggagaatactgagggggagtatgcggggcttgagcatgaggttgttcctggtgttgttgagagtcttaaggtgatcacgaagttttgttcggagcgtatagcgaagtatgcgtttgagtatgcgtacctgaacaacaggaagaaagtgacggcagtgcacaaggctaacattatgaaacttgctgatggtttgttcttggagtcttgccgagaggtggctaaaaagtatccaggcatcacttacaatgagattattgttgataactgctgtatgcaacttgtagccaaaccagagcaattcgatgtcatggtgacacccaatctctatggtaatttagttgcaaacactgctgctggtattgctggaggcactggagtcatgcctggaggaaatgttggggctgatcatgcggtatttgagcaaggtgcatcagcaggaaacgtggggaaagacaagatagtacgagaaaacaaagcgaacccagtggcgttgcttctctcatcagccatgatgctaagacaccttcagtttccttcatttgctgaccggctcgaaacagcagtgaaaaaagtcatctccgaaggaaattgccggactaaagatcttggtggacaaagcactactcagcaggtggttgatgccgtcattgcaaatcttgagtga

SEQ ID NO: 37356 - protein, 367 aa, Brassica napus
MSRRSLTLLKNLARNSNASCIQTRSVTYMPRPGDGSPRAVTLIPGDGIGPLVTNAVEQVMEAMHAPIYFEKYDVHGEMSRVPLEVMESIRKNKVCLKGGLKTPVGGGVSSLNVQLRKELDLFASLVNCFNLPGLPTRHENVDIVVIRENTEGEYAGLEHEVVPGVVESLKVITKFCSERIAKYAFEYAYLNNRKKVTAVHKANIMKLADGLFLESCREVAKKYPGITYNEIIVDNCCMQLVAKPEQFDVMVTPNLYGNLVANTAAGIAGGTGVMPGGNVGADHAVFEQGASAGNVGKDKIVRENKANPVALLLSSAMMLRHLQFPSFADRLETAVKKVISEGNCRTKDLGGQSTTQQVVDAVIANLE

SEQ ID NO: 37357 - DNA, 1224 bp, Zea mays
  CDS (1)..(1224)
atggcggcggctctgcaagccacgccgctcaaaaccctatccatctcccgccggcgcgtcggcggcgcgggggcgcggccgcgtccgatggcggcgagcttccgatgctccgcggcggcgaggagctacaatatcacgctcctccccggagacggcatcggccctgaggtggtcgccgtcgccaaggacgtgctgtccctcgccggcgccctcgaaggcgtcgagctccggttccaggagaagcttgtgggtggctcggccctggacgccaccggcgtgccgctccccgacgagacactcgacgcggccaagggttccgacgccgtcctcctcggcgccattggaggctataagtgggataacaatgagaagcacctcaagcctgagaccgggctgctgcagctccgtgccggacttggggtctttgccaatctgcgaccagctgcagtattgccgcagttggtagatgcatccactctgaagaaagaggtagctgaaggtgttgacatcatggttgtcagagagcttactggaggcatctacttcggcaaacccaggggttttggaacaaatgacaatggagatgacattgggttcaacacagaagtttattcagcttctgagattgatcgtatcgcacgagtcgcatttgaggttgctcgcaagagaagagggagactatgctcggttgacaaagcaaatgtcttggaggcatctatgctttggaggaaaagggtgactgcactagcttcggaattccctgatattgagctctcacacatgtatgttgataatgctgcgatgcagcttgttaggaatcctaagcagtttgacacaattgtcacaaacaatatttttggtgacatattatctgatgaagcatcaatgattacgggaagtattggaatgctcccatctgccagtgttggtgaatcgggacctggtctttttgaacctattcatggctctgcccctgatattgctggacaggacaaggccaatccattggctacaattcttagtgcagcgatgctattgagatatggcctaggagaagaaaatgctgcgaacagaattgaagctgcagttactgaaacactgaaccatgggttccgaactggggacatatattctcctggaacaacattggttggatgcaagcggatgggggaagaagtcctgaagacagtgaactcactgaaggaagtggctgctgtaaactga

SEQ ID NO: 37358 - protein, 407 aa, Zea mays
MAAALQATPLKTLSISRRRVGGAGARPRPMAASFRCSAAARSYNITLLPGDGIGPEVVAVAKDVLSLAGALEGVELRFQEKLVGGSALDATGVPLPDETLDAAKGSDAVLLGAIGGYKWDNNEKHLKPETGLLQLRAGLGVFANLRPAAVLPQLVDASTLKKEVAEGVDIMVVRELTGGIYFGKPRGFGTNDNGDDIGFNTEVYSASEIDRIARVAFEVARKRRGRLCSVDKANVLEASMLWRKRVTALASEFPDIELSHMYVDNAAMQLVRNPKQFDTIVTNNIFGDILSDEASMITGSIGMLPSASVGESGPGLFEPIHGSAPDIAGQDKANPLATILSAAMLLRYGLGEENAANRIEAAVTETLNHGFRTGDIYSPGTTLVGCKRMGEEVLKTVNSLKEVAAVN

SEQ ID NO: 37359 - DNA, 1095 bp, Glycine max
  CDS (1)..(1095)
atggcgacgacacgatccgcgccgctcctcaagcacctcctcacccgtctcaacccttctcgctccgtcacgtacatgccccgtcccggcgacggcacccctcgcggcgtgacgctgatcccgggcgacggaatcgggcctctagtaaccggcgcggtggagcaggtgatggaggcgatgcacgcgccgctgtacttcgagaagtacgaggtgcacggcgacatgaaggcggtgccggcggaggtgctggaatcgatcaggaagaacaaggtatgtctgaagggaggactggccactcccatgggcggtggagtgaactcgctgaacgtgcagctgaggaaggagctcgatctctacgcctcgctcgtgaactgcttcaacctccctggcctccccacgcgccacgacaacgttgacatcgtcgtcatcagggagaacaccgagggcgagtactccggcctcgaacacgaggtcgtccccggcgtggtcgaaagcctcaaggtaataacaaagttctgctcagagcgcattgctaaatatgcttttgagtatgcttacctaaataacagaaagaaggtgactgctgtgcacaaagcaaacattatgaaacttgcagatggtttattcttggaatcttgtcgagaggttgccacaaggtatcctggaatcaagtacaatgaaattattgtagacaactgctgcatgcagcttgtttcaaaaccggagcagtttgatgtcatggtaacccccaatctttatggaaatcttgttgcaaatacagcggcaggtattgctggaggcactggagtcatgccgggaggtaatgttggggctgatcacgctgtgtttgaacaaggtgcttcagcaggaaatgttggcaatgataaagtagtagaacaacagaaagcgaacccagtggcactccttctctcgtcggccatgatgcttagacatctccagtttcctgcatttgctgaccgattggaaactgccgttaaaaaagtgattctggaaggcaaatatcggacaaaggaccttggagggacaagcaccacccaagaggttgttgatgcagtgatagatgctttagactga

SEQ ID NO: 37360 - protein, 364 aa, Glycine max
MATTRSAPLLKHLLTRLNPSRSVTYMPRPGDGTPRGVTLIPGDGIGPLVTGAVEQVMEAMHAPLYFEKYEVHGDMKAVPAEVLESIRKNKVCLKGGLATPMGGGVNSLNVQLRKELDLYASLVNCFNLPGLPTRHDNVDIVVIRENTEGEYSGLEHEVVPGVVESLKVITKFCSERIAKYAFEYAYLNNRKKVTAVHKANIMKLADGLFLESCREVATRYPGIKYNEIIVDNCCMQLVSKPEQFDVMVTPNLYGNLVANTAAGIAGGTGVMPGGNVGADHAVFEQGASAGNVGNDKVVEQQKANPVALLLSSAMMLRHLQFPAFADRLETAVKKVILEGKYRTKDLGGTSTTQEVVDAVIDALD

SEQ ID NO: 37361 - DNA, 1080 bp, Glycine max
  CDS (1)..(1080)
atggcttctcagctcctgagacgaaccttcggaagtcgtttccttgcaaaccctagggccttctcctccgctgcttccactccgatccgcgccactctcttccccggcgacggcatcggccccgagatcgccgattccgtcaaacagatattccaagcagctgatgtcccaatagaatgggaagagcactatgtaggaactgaaattgaccctagaacgcagagctttctgacatgggaaagtttagaatctgtaaggaaaaataaggttggcttgaaagggccaatggccacccctattggaaaagggcatcgttcgttaaatcttactctgagaaaagagctcaatttgtatgccaatgttcgaccttgctacagtcttccaggctacaaaactcgatatgataatgtcaatctaattacaattcgtgaaaatacggaaggcgagtacagtggacttgaacatcaggttgtgagaggtgttgtagaaagtctcaaaatcattacacgtcaagcaagtttaagggtagctgagtatgcttttcactatgccaaggctcatggaagagagagggtttctgccatacacaaagccaatattatgcaaaagactgatggccttttcctcaagtgttgccgtgaggttgcagagaaatatcctgagataacttatgaggaagttgtcattgacaattgctgcatgatgcttgtgaagaatcctgcacttttcgatgtactagtgatgcctaacctttatggtgatattatcagtgacctttgtgctggcttgattggaggattgggcttaacaccaagctgcaacattggtgagggcggtattgcacttgctgaggctgtacatggttcagcacctgatattgctggaaagaatttggctaatccaactgctttactgctgagtggtgttacaatgttgcgccatttggacctccacgacaaagcagaacagattcagaaagctatcctcaacacgattgcagaagggaagtaccgaacagctgatctcggtggcagttcaaagacaactgaattcacaaaagcaatcattgatcatctttaa

SEQ ID NO: 37362 - protein, 359 aa, Glycine max
MASQLLRRTFGSRFLANPRAFSSAASTPIRATLFPGDGIGPEIADSVKQIFQAADVPIEWEEHYVGTEIDPRTQSFLTWESLESVRKNKVGLKGPMATPIGKGHRSLNLTLRKELNLYANVRPCYSLPGYKTRYDNVNLITIRENTEGEYSGLEHQVVRGVVESLKIITRQASLRVAEYAFHYAKAHGRERVSAIHKANIMQKTDGLFLKCCREVAEKYPEITYEEVVIDNCCMMLVKNPALFDVLVMPNLYGDIISDLCAGLIGGLGLTPSCNIGEGGIALAEAVHGSAPDIAGKNLANPTALLLSGVTMLRHLDLHDKAEQIQKAILNTIAEGKYRTADLGGSSKTTEFTKAIIDHL

SEQ ID NO: 37363 - DNA, 1092 bp, Glycine max
  CDS (1)..(1092)
atggctcgaagatccctcccgctcctgaagcacctcctctcgcggcggatcccggcccgatccgtgacgtacatgcaccggccgggcgatgggtcgccgcggccggtgacactgatcccgggcgacgggatcgggccgatggtgactggcgcggtggagcaggtcatggaggccatgcacgcgcccgtctacttcgagaagttcgaggtccacggcaacatgaaggccgtgccgccggaggtcctagattcgattcggaagaacaaggtctgtctcaagggaggactcgttacccccatgagcggtggagtcagctccatcaatgttcagctccggaaagagctcgatctctatgcttctcttgttaattgtttcaatctccctggccttcccacgcgccatgataatgtggatatcgttgtcatcagggagaacaccgaaggcgaatactctggcctcgaacacgaggtcgttcccggcgttgttgaaagccttaaggtaataacgaagttctgttcagagcgaattgctaaatatgcattcgagtatgcttacctaaataacagaaagaaggtgactgccgtgcacaaagcaaatattatgaagcttgcagatggtttattcttggaatcttgtcgagaggttgctacaaggtaccctggaatcaagtataacgaaattattgtggataactgctgtatgcagcttgtttcaaagcctgaacagtttgatgtcatggttaccccaaatctttatggaaatctagttgcaaatactgcagcaggcattgctggaggcactggagtcatgccaggaggtaacgttggggctgagcacgctgtgtttgagcaaggtgcgtcagcaggaaatgttggtagtgataaaataagggaacaaaagaaagccaatccagtggcccttcttctctcgtcagctatgatgcttaggcatctccagtttcctgcatttgctgaccgtttggaaactgctgtggaaaaagtcattttggagggcaaatgccgaacaaaggatcttggagggacaagcaccacccaagaggttgtggatgcagtgatagatgctttagattga

SEQ ID NO: 37364 - protein, 363 aa, Glycine max
MARRSLPLLKHLLSRRIPARSVTYMHRPGDGSPRPVTLIPGDGIGPMVTGAVEQVMEAMHAPVYFEKFEVHGNMKAVPPEVLDSIRKNKVCLKGGLVTPMSGGVSSINVQLRKELDLYASLVNCFNLPGLPTRHDNVDIVVIRENTEGEYSGLEHEVVPGVVESLKVITKFCSERIAKYAFEYAYLNNRKKVTAVHKANIMKLADGLFLESCREVATRYPGIKYNEIIVDNCCMQLVSKPEQFDVMVTPNLYGNLVANTAAGIAGGTGVMPGGNVGAEHAVFEQGASAGNVGSDKIREQKKANPVALLLSSAMMLRHLQFPAFADRLETAVEKVILEGKCRTKDLGGTSTTQEVVDAVIDALD

SEQ ID NO: 37365 - DNA, 1086 bp, Glycine max
  CDS (1)..(1086)
atggcttctcagctcctgagacgaaccttcggaagtcgcatccttgcaaaccctagggccttctccttctcctccgctgcttccactccgatccgcgccactctcttccccggcgacggcatcggccccgagatcgccgaatccgtcaaacagatattccaagcagctgatgtcccaatagaatgggaagagcactatgtaggaactgaaattgaccctagaacccaaagttttctgacatgggaaagtttggaatctgtaaggcaaaatggggttggcttgaaaggaccaatggccacccctattggaaaagggcatcgttcattaaatcttactctgagaaaagagctcaatttgtatgccaatgttcgaccttgctacagtcttccaggctacaaaactcggtatgataatgtcaatctaatcacaattcgtgaaaatacggaaggcgagtacagtggacttgaacatcaggttgtgagaggtgtagtagaaagtctcaaaatcattacacgtcaagcaagtttaagggtagctgagtatgcttttcactatgccaaggctcatggaagagagagggtttctgccatacacaaagccaatattatgcaaaagactgatggccttttcctcaagtgttgccgtgaggttgcagagaaatatcctgagataacttatgaggaagttgtcattgacaattgctgcatgatgcttgtgaagaatcctgcacttttcgatgtactagtgatgcctaacctttatggtgatattattagtgacctttgtgctggcttggttgggggattgggtttaacaccaagctgcaacattggcgagggaggtattgcacttgctgaggctgtacatggttcggcacctgatattgctggaaagaatttggcaaatccaactgctttactgctaagtggtgttacaatgttgcgccatttgaacctccatgacaaagcagaacagattcaaaaagccatcctgaacacaattgcagaagggaagtaccgaacagctgacctcggtggcagttcaaagacaactgaattcacaaaggcaattattgatcatctttag

SEQ ID NO: 37366 - protein, 361 aa, Glycine max
MASQLLRRTFGSRILANPRAFSFSSAASTPIRATLFPGDGIGPEIAESVKQIFQAADVPIEWEEHYVGTEIDPRTQSFLTWESLESVRQNGVGLKGPMATPIGKGHRSLNLTLRKELNLYANVRPCYSLPGYKTRYDNVNLITIRENTEGEYSGLEHQVVRGVVESLKIITRQASLRVAEYAFHYAKAHGRERVSAIHKANIMQKTDGLFLKCCREVAEKYPEITYEEVVIDNCCMMLVKNPALFDVLVMPNLYGDIISDLCAGLVGGLGLTPSCNIGEGGIALAEAVHGSAPDIAGKNLANPTALLLSGVTMLRHLNLHDKAEQIQKAILNTIAEGKYRTADLGGSSKTTEFTKAIIDHL

SEQ ID NO: 37367 - DNA, 1134 bp, Zea mays
  CDS (1)..(1134)
atggcgcggcgatccgctcctctcctgcgccgcctcgtctccgcctcctcaccgcccgcgctgcagtccctcacggaccacgtcggcgtcctcgcgcggcgcacggtgacctacatgccccggcccggggacggcgcaccgcgcgccgtcacgctcatcccaggcgacggcatcggccccctagtcacgggcgccgtgcggcaggtcatggaggcgatgcacgcgcccgtctacttcgagacctacgacgtccacggagacatgcccacggtcccgccagccatcatcgaatccatccgccgcaacaaggtctgcatcaagggcgggctcgccacgcccgtcggcggcggggtctcctccctcaacatgcagctgcgcaaggagctcgatctctacgcctcactcgtccactgctccaacctccccggcctgcccaccaggcacgagggtgtcgacatcgtcgtaatcagggagaacaccgagggcgagtactcggggctcgagcacgaggtcgtacccggggtcgttgagagcctcaaggtgatcacaaagttttgctctgagaggattgccaaatatgcattcgagtatgcttaccttaacaaccgaaagaaagtcactgcagtgcataaagcaaacattatgaagcttgccgatggtttgttcttggagtcttgccgtgaagttgcttcaaaatatcctggtattcagtacaatgaaatgattgttgacaactgctctatgcaacttgtttcaaagcctgaacaatttgatgtcatggttacgcctaatctttatggcaatttggtggctaacacggctgcaggtattgttggagggacgggcatcatgcctggaggcaatgtgggtcaggactacgccatctttgagcaaggcgcttctgcaggaaatgttgggaatgagaaccttgtggagcagaagaaagcaaaccctgtcgcgctgcttctgtcatctgctatgatgttgaggcatttgcagttcccgtcatttgcggaccggctcgagacggcagtgaagcgtgtcgttgctgaaggcacgtacagaacaaaggatctgggcggtagcagcaccacccaggaagttaccgatgctgtggttgccaatctggattag

SEQ ID NO: 37368 - protein, 377 aa, Zea mays
MARRSAPLLRRLVSASSPPALQSLTDHVGVLARRTVTYMPRPGDGAPRAVTLIPGDGIGPLVTGAVRQVMEAMHAPVYFETYDVHGDMPTVPPAIIESIRRNKVCIKGGLATPVGGGVSSLNMQLRKELDLYASLVHCSNLPGLPTRHEGVDIVVIRENTEGEYSGLEHEVVPGVVESLKVITKFCSERIAKYAFEYAYLNNRKKVTAVHKANIMKLADGLFLESCREVASKYPGIQYNEMIVDNCSMQLVSKPEQFDVMVTPNLYGNLVANTAAGIVGGTGIMPGGNVGQDYAIFEQGASAGNVGNENLVEQKKANPVALLLSSAMMLRHLQFPSFADRLETAVKRVVAEGTYRTKDLGGSSTTQEVTDAVVANLD

SEQ ID NO: 37369 - DNA, 1086 bp, Glycine max
  CDS (1)..(1086)
atggcttctcagctcctgagacgaaccttcggaagtcgcatccttgcaaaccctagggccttctccttctcctccgctgcttccactccgatccgcgccactctcttccccggcgacggcatcggccccgagatcgccgaatccgtcaaacagatattccaagcagctgatgtcccaatagaatgggaagagcactatgtaggaactgaaattgaccctagaacgcaaagctttctgacatgggaaagtttggaatctgtaaggaaaaataaggttggcttgaaagggccaatggccacccctattggaaaagggcatcgttcgttaaatcttactctgagaaaagagctcaatttgtatgccaatgttcgaccttgctacagtcttccaggctacaaaactcgatatgataatgtcaatctaattacaattcgtgaaaatacggaaggcgagtacagtggacttgaacatcaggttgtgagaggtgttgtagaaagtctcaaaatcattacacgtcaagcaagtttaagggtagctgagtatgcttttcactatgccaaggctcatggaagagagagggtttctgccatacacaaagccaatattatgcaaaagactgatggccttttcctcaagtgttgccgtgaggttgcagagaaatatcctgagataacttatgaggaagttgtcattgacaattgctgcatgatgcttgtgaagaatcctgcacttttcgatgtactagtgatgcctaacctttatggtgatattatcagtgacctttgtgctggcttgattggaggattgggcttaacaccaagctgcaacattggtgagggcggtattgcacttgctgaggctgtacatggttcggcacctgatattgctggaaagaatttggcaaatccaactgctttactgctaagtggtgttacaatgttgcgccatttgaacctccatgacaaagcagaacagattcaaaaagccatcctgaacacaattgcagaagggaagtaccgaacagctgacctcggtggcagttcaaagacaactgaattcacaaaggcaattattgatcatctttag

SEQ ID NO: 37370 - protein, 361 aa, Glycine max
MASQLLRRTFGSRILANPRAFSFSSAASTPIRATLFPGDGIGPEIAESVKQIFQAADVPIEWEEHYVGTEIDPRTQSFLTWESLESVRKNKVGLKGPMATPIGKGHRSLNLTLRKELNLYANVRPCYSLPGYKTRYDNVNLITIRENTEGEYSGLEHQVVRGVVESLKIITRQASLRVAEYAFHYAKAHGRERVSAIHKANIMQKTDGLFLKCCREVAEKYPEITYEEVVIDNCCMMLVKNPALFDVLVMPNLYGDIISDLCAGLIGGLGLTPSCNIGEGGIALAEAVHGSAPDIAGKNLANPTALLLSGVTMLRHLNLHDKAEQIQKAILNTIAEGKYRTADLGGSSKTTEFTKAIIDHL

SEQ ID NO: 37371 - DNA, 1134 bp, Zea mays
  CDS (1)..(1134)
atgtcgcggcgatccgctcctctcctgcgccgcctcgtctccgcctcctccccgcccgcgcttcagtccctcacggaccacgtcggcgtcctcgcgcggcgcacggtgacctacatgccccggcccggggacggcgcaccacgcgccgtcacgctcatcccaggcgacggcatcggtcccctcgtcacgggcgccgtgcggcaggtcatggaggcgatgcacgcgcccgtctacttcgagacctacgacgtccacggagacatgcccacggtcccgccagccgtcatcgaatccatccgccgcaacaaggtctgcatcaagggcgggctcgccacgcccgtcggcggcggggtctcctccctcaacatgcagctgcgcaaggagctcgatctctacgcctcactcgtccactgctccaacctccccggcctgcccaccaggcacgagggtgtcgacatcgtcgtaatcagggagaacaccgagggcgagtactcggggctcgagcacgaggtcgtacccggggtcgttgagagcctcaaggtgatcacaaagttttgctctgagaggattgccaaatatgcattcgagtatgcttaccttaacaaccgaaagaaagtcactgcagtgcataaagcaaacattatgaagcttgccgatggtttgttcttggagtcttgccgtgaagttgcttcaaaatatcctggtattcagtacaatgaaatgattgttgacaactgctctatgcaacttgtttcaaagcctgaacaatttgatgtcatggttacgcctaatctttatggcaatttggtggctaacacggctgcaggtattgttggagggacgggcatcatgcctggaggcaatgtgggtcaggactacgccatctttgagcaaggcgcttctgcaggaaatgttgggaatgagaaccttgtggagcagaagaaagcaaaccctgtcgcgctgcttctgtcatctgctatgatgttgaggcatttgcagttcccgtcatttgcggaccggctcgagacggcagtgaagcgcgtcgttgctgaaggcacgtacagaacaaaggatctgggcggtagcagcaccacccaggaagttaccgatgctgtggttgccaatctggattag

SEQ ID NO: 37372 - protein, 377 aa, Zea mays
MSRRSAPLLRRLVSASSPPALQSLTDHVGVLARRTVTYMPRPGDGAPRAVTLIPGDGIGPLVTGAVRQVMEAMHAPVYFETYDVHGDMPTVPPAVIESIRRNKVCIKGGLATPVGGGVSSLNMQLRKELDLYASLVHCSNLPGLPTRHEGVDIVVIRENTEGEYSGLEHEVVPGVVESLKVITKFCSERIAKYAFEYAYLNNRKKVTAVHKANIMKLADGLFLESCREVASKYPGIQYNEMIVDNCSMQLVSKPEQFDVMVTPNLYGNLVANTAAGIVGGTGIMPGGNVGQDYAIFEQGASAGNVGNENLVEQKKANPVALLLSSAMMLRHLQFPSFADRLETAVKRVVAEGTYRTKDLGGSSTTQEVTDAVVANLD

SEQ ID NO: 37373 - DNA, 1098 bp, Zea mays
  CDS (1)..(1098)
atggcgctccggaggctgctgcaggggagcgtcctgccgcggataatcggcagggatttggcaccggccgtggcgccgttttcaacggagtccggggagaccattcgtgccacgctctttcccggcgatggcatcgggccagagatcgctgagtctgtcaagcaggtattcaatgttgcaggggtaccaattgaatgggaagaacactatgtcggtacagaagttgatcccagaacagagagttttttgacttgggaaagcctggagtcagtgcgtagaaacaaagttggcttgaaaggacctatggctacacctattggaaagggccatcgatctttgaatcttacattaaggaaagaacttgggctctatgccaatgtcagaccttgcaacagcctcccaggttacaagaccagatacgatgatgttaaccttgtaacaattcgtgaaaatactgaaggagaatatagtggtcttgagcatcaggttgtgagaggtgttgtggaaagtttgaaaattattacacgccaagcaagtttgagagtggcagagtatgctttccattatgccaaggccaatggccgggaaagagtctctgcgatccacaaagccaatattatgaggaagacagatggtcttttcctcaagtgttgccgtgaagtgtctgaaaagtaccctgaaattcaatacgaggaggtcatcattgacaattgctgtatgacgcttgtgaagaatcctggtctttttgacgtattagtgatgccaaatctctatggtgacattattagtgatctatgtgctggtttgatcgggggcttgggcctaacacccagttgcaatattggtgaaggtggcatttgtctggcagaagctgttcatggttctgctcctgatattgctggcaagaacctcgcgaacccgactgctcttatgctgagtgctgtcatgttgttgcgccacatgcaattcaacgacaaagcagaccggatccacaacgccatcctccagaccatcgccgaggggaagtacaggactgctgatcttggtggaaaggcatcgacatcagagtttacaaacgcagtctgtgatcacatctga

SEQ ID NO: 37374 - protein, 365 aa, Zea mays
MALRRLLQGSVLPRIIGRDLAPAVAPFSTESGETIRATLFPGDGIGPEIAESVKQVFNVAGVPIEWEEHYVGTEVDPRTESFLTWESLESVRRNKVGLKGPMATPIGKGHRSLNLTLRKELGLYANVRPCNSLPGYKTRYDDVNLVTIRENTEGEYSGLEHQVVRGVVESLKIITRQASLRVAEYAFHYAKANGRERVSAIHKANIMRKTDGLFLKCCREVSEKYPEIQYEEVIIDNCCMTLVKNPGLFDVLVMPNLYGDIISDLCAGLIGGLGLTPSCNIGEGGICLAEAVHGSAPDIAGKNLANPTALMLSAVMLLRHMQFNDKADRIHNAILQTIAEGKYRTADLGGKASTSEFTNAVCDHI

SEQ ID NO: 37375 - DNA, 1134 bp, Zea mays
  CDS (1)..(1134)
atggcgcggcggtcgacccctctaatacgccgcctcctcgccccatcgccttccccttccccctccgcctccactcccctcgccggcgccgtgtcccgccgcaccgtcacctacatgcctcgcccgggggacggcgccccgcgcggcgtcactctcatcccgggcgacggcatcgggcccctcgtcacgggcgccgtgcggcaggtgatggaggcgatgcacgcgccggtctacttcgagacatacgaggtccgcggcgacatgcccacggtccccgccgaggtcatcgagtccatccgccgcaacaaggtctgcctcaagggcggcctcgccacccccgtcggcggcggtgtctcctccctcaacatgcagctccggaaggagctcgacctctacgccgcgctcgtcaactgcttcaacctccctggtctgcctaccaggcacgacaacgtggacatcgtcgtcattcgggagaacactgagggcgagtactcagggctcgagcatgaggtagttcctggcgtagtcgagagtctcaaggtgataacaaagttctgctctgaaagaattgccaagtatgcttttgagtatgcattccttaacaatcgaaagaaagtgacagcagtgcataaagccaacatcatgaagcttgctgatggtttgttcttggagtcttgccgtgaggttgcaaagaagtaccctggaattcaatataatgaaatcattgtggacaactgttgcatgcagcttgttgcaaagcctgaacaatttgatgttatggtcaccccaaatctttatggcaatctggtggctaatgtagctgcaggtattgctggaggcactggtgtcatgcctggaggtaatgtggggcaggaccatgctatcttcgagcaaggtgcttctgcaggaaatgttggaaatgagaaaattgtggagaagaagagagctaaccctgttgcactgctgctatcttctgccatgatgttgaggcacttgcaattcccatcttttgctgaccggctggagacggcagttaagcgtgtcattgcagaaggcaagtacagaaccaaagatttgggcggcaccagcaccacccaggaagtcacagatgcggtcattgccaaattgggttag

SEQ ID NO: 37376 - protein, 377 aa, Zea mays
MARRSTPLIRRLLAPSPSPSPSASTPLAGAVSRRTVTYMPRPGDGAPRGVTLIPGDGIGPLVTGAVRQVMEAMHAPVYFETYEVRGDMPTVPAEVIESIRRNKVCLKGGLATPVGGGVSSLNMQLRKELDLYAALVNCFNLPGLPTRHDNVDIVVIRENTEGEYSGLEHEVVPGVVESLKVITKFCSERIAKYAFEYAFLNNRKKVTAVHKANIMKLADGLFLESCREVAKKYPGIQYNEIIVDNCCMQLVAKPEQFDVMVTPNLYGNLVANVAAGIAGGTGVMPGGNVGQDHAIFEQGASAGNVGNEKIVEKKRANPVALLLSSAMMLRHLQFPSFADRLETAVKRVIAEGKYRTKDLGGTSTTQEVTDAVIAKLG

SEQ ID NO: 37377 - DNA, 1098 bp, Zea mays
  CDS (1)..(1098)
atggcgctccggaggctgctgcaggggagtgtcctgccgcgggtaaccggcagggcttcggcaccggccgtggcgccgttttcaacggaatccggagagaccgtccgtgccacgctctttccgggcgacggcatcgggccagagatcgccgagtctgtcaagcaggtattcaatgttgcaggggtaccaattgaatgggaagaacactatgttggtacagaagttgatcccagaacagagagttttttgacttgggaaagcctggagtcagtgcgtagaaacaaagttggcttgaaaggtcctatggctacacctattggaaagggtcatcgatctttgaatcttacattaaggaaagaacttgggctctatgccaatgtcaggccttgcaacagcctcccaggctacaagaccagatacgatgatgttaaccttgtgacaattcgtgaaaatactgaaggagaatatagtggtcttgagcatcaggttgtgagaggtgttgtagaaagtttgaaaattattacccgccaagcaagtttgagagtggcagaatatgcttttcattatgccaaggccaatggccgggaaagggtctctgcgattcacaaggccaatattatgaggaagacagatggtcttttcctcaagtgttgccgtgaagtggctgagacgtaccctgaaattcaatacgaggaggtcattattgacaattgttgtatgacgcttgtgaagaatcctggtctttttgatgtattagtgatgccaaacctctatggtgacattattagcgatctatgtgctggtttgattgggggcttgggcctaacacccagttgcaatattggtgaaggtggcatttgtctagcagaagctgttcatggttctgctcctgatattgctggcaagaaccttgcgaacccgactgctcttatgctgagtgctgtcatgatgttgcgccacttgcaattcaacgacaaagcagaccggatccacaacgccatcctccagactattgctggggggaagtacaggactgctgatcttggtggaaaggcatcgacatccgagtttacaaatgcagtctgtgatcacatctga

SEQ ID NO: 37378 - protein, 365 aa, Zea mays
MALRRLLQGSVLPRVTGRASAPAVAPFSTESGETVRATLFPGDGIGPEIAESVKQVFNVAGVPIEWEEHYVGTEVDPRTESFLTWESLESVRRNKVGLKGPMATPIGKGHRSLNLTLRKELGLYANVRPCNSLPGYKTRYDDVNLVTIRENTEGEYSGLEHQVVRGVVESLKIITRQASLRVAEYAFHYAKANGRERVSAIHKANIMRKTDGLFLKCCREVAETYPEIQYEEVIIDNCCMTLVKNPGLFDVLVMPNLYGDIISDLCAGLIGGLGLTPSCNIGEGGICLAEAVHGSAPDIAGKNLANPTALMLSAVMMLRHLQFNDKADRIHNAILQTIAGGKYRTADLGGKASTSEFTNAVCDHI

SEQ ID NO: 37379 - DNA, 1110 bp, Zea mays
  CDS (1)..(1110)
atggcgcggcggtcgacccctctcctacgccgccttctcgccccgtcaccttccctccccactcccctagccgacgccgtatcccgccgcaccgtcacctacatgccccgcccgggggacggcgctccgcgcggcgtcaccctcatcccgggcgacggcatcgggcccctcgtcacgggcgccgtgcggcaggtgatggaggcgatgcacgcgccggtctatttcgagacgtacgaggtccacggcgacatgcccacggtccccgccgaggtcatcgagtccatccgccgcaacaaggtctgcctcaagggcggcctcgccacccccgtaggcggtggtgtgtcctccctcaacgtgcagctccggaaggagctcgacctctacgccgcgctcgtcaactgtttcaacctccctggcctgcctaccaggcacgacaacgtggacatcgtcgtcatcagggagaacaccgagggcgagtactcggggctcgagcacgaggtcgtacccggggtcgttgagagcctcaagttttgctctgagaggattgccaaatatgcattcgagtatgcttaccttaacaaccgaaagaaagtcactgcagtgcataaagcaaacattatgaagcttgccgatggtttgttcttggagtcttgccgtgaagttgcttcaaaatatcctggtattcagtacaatgaaatgattgttgacaactgctctatgcaacttgtttcaaagcctgaacaatttgatgtcatggttacgcctaatctttatggcaatttggtggctaacacggctgcaggtattgttggagggacgggcatcatgcctggaggcaatgtgggtcaggactacgccatctttgagcaaggcgcttctgcaggaaatgttgggaatgagaaccttgtggagcagaagaaagcaaaccctgtcgcgctgcttctgtcatctgctatgatgttgaggcatttgcagttcccgtcatttgcggaccggctcgagacggcagtgaagcgcgtcgttgctgaaggcacgtacagaacaaaggatctgggcggtagcagcaccacccaggaagttaccgatgctgtggttgccaatctggattag

SEQ ID NO: 37380 - protein, 369 aa, Zea mays
MARRSTPLLRRLLAPSPSLPTPLADAVSRRTVTYMPRPGDGAPRGVTLIPGDGIGPLVTGAVRQVMEAMHAPVYFETYEVHGDMPTVPAEVIESIRRNKVCLKGGLATPVGGGVSSLNVQLRKELDLYAALVNCFNLPGLPTRHDNVDIVVIRENTEGEYSGLEHEVVPGVVESLKFCSERIAKYAFEYAYLNNRKKVTAVHKANIMKLADGLFLESCREVASKYPGIQYNEMIVDNCSMQLVSKPEQFDVMVTPNLYGNLVANTAAGIVGGTGIMPGGNVGQDYAIFEQGASAGNVGNENLVEQKKANPVALLLSSAMMLRHLQFPSFADRLETAVKRVVAEGTYRTKDLGGSSTTQEVTDAVVANLD

SEQ ID NO: 37381 - DNA, 25 bp, Artificial sequence
  primer
atggaaagtaaagtagttgttccgg

SEQ ID NO: 37382 - DNA, 24 bp, Artificial sequence
  primer
ttacatgttttcgatgatcgcgtc

SEQ ID NO: 37383 - protein, 467 aa, Artificial sequence
  consensus sequence
  Variant (2)..(2): Xaa in position 2 is any amino acid
  Variant (6)..(6): Xaa in position 6 is any amino acid
  Variant (8)..(39): Xaa in position 8 to 39 is any amino acid
  Variant (40)..(60): Xaa in position 40 to 60 is any or no amino acid
  Variant (62)..(75): Xaa in position 62 to 75 is any amino acid
  Variant (76)..(76): Xaa in position 76 is any or no amino acid
  Variant (79)..(80): Xaa in position 79 to 80 is any amino acid
  Variant (81)..(81): Xaa in position 81 is any or no amino acid
  Variant (83)..(83): Xaa in position 83 is any amino acid
  Variant (84)..(86): Xaa in position 84 to 86 is any or no amino acid
  Variant (88)..(88): Xaa in position 88 is any amino acid
  Variant (90)..(90): Xaa in position 90 is any amino acid
  Variant (91)..(91): Xaa in position 91 is any or no amino acid
  Variant (93)..(94): Xaa in position 93 to 94 is any amino acid
  Variant (96)..(96): Xaa in position 96 is any amino acid
  Variant (98)..(99): Xaa in position 98 to 99 is any amino acid
  Variant (102)..(104): Xaa in position 102 to 104 is any amino acid
  Variant (105)..(105): Xaa in position 105 is any or no amino acid
  Variant (107)..(110): Xaa in position 107 to 110 is any amino acid
  Variant (113)..(116): Xaa in position 113 to 116 is any amino acid
  Variant (117)..(117): Xaa in position 117 is any or no amino acid
  Variant (119)..(128): Xaa in position 119 to 128 is any amino acid
  Variant (129)..(138): Xaa in position 129 to 138 is any or no amino acid
  Variant (142)..(142): Xaa in position 142 is any amino acid
  Variant (144)..(145): Xaa in position 144 to 145 is any amino acid
  Variant (147)..(147): Xaa in position 147 is any amino acid
  Variant (149)..(149): Xaa in position 149 is any amino acid
  Variant (151)..(161): Xaa in position 151 to 161 is any amino acid
  Variant (162)..(189): Xaa in position 162 to 189 is any or no amino acid
  Variant (191)..(195): Xaa in position 191 to 195 is any amino acid
  Variant (196)..(198): Xaa in position 196 to 198 is any or no amino acid
  Variant (200)..(203): Xaa in position 200 to 203 is any amino acid
  Variant (205)..(207): Xaa in position 205 to 207 is any amino acid
  Variant (209)..(214): Xaa in position 209 to 214 is any amino acid
  Variant (215)..(232): Xaa in position 215 to 232 is any or no amino acid
  Variant (235)..(236): Xaa in position 235 to 236 is any amino acid
  Variant (239)..(239): Xaa in position 239 is any amino acid
  Variant (244)..(246): Xaa in position 244 to 246 is any amino acid
  Variant (248)..(248): Xaa in position 248 is any amino acid
  Variant (250)..(267): Xaa in position 250 to 267 is any amino acid
  Variant (268)..(336): Xaa in position 268 to 336 is any or no amino acid
  Variant (338)..(338): Xaa in position 338 is any amino acid
  Variant (340)..(348): Xaa in position 340 to 348 is any amino acid
  Variant (350)..(353): Xaa in position 350 to 353 is any amino acid
  Variant (354)..(355): Xaa in position 354 to 355 is any or no amino acid
  Variant (357)..(360): Xaa in position 357 to 360 is any amino acid
  Variant (363)..(363): Xaa in position 363 is any amino acid
  Variant (366)..(367): Xaa in position 366 to 367 is any amino acid
  Variant (370)..(371): Xaa in position 370 to 371 is any amino acid
  Variant (373)..(375): Xaa in position 373 to 375 is any amino acid
  Variant (378)..(378): Xaa in position 378 is any amino acid
  Variant (379)..(379): Xaa in position 379 is any or no amino acid
  Variant (381)..(382): Xaa in position 381 to 382 is any amino acid
  Variant (384)..(385): Xaa in position 384 to 385 is any amino acid
  Variant (387)..(393): Xaa in position 387 to 393 is any amino acid
  Variant (394)..(396): Xaa in position 394 to 396 is any or no amino acid
  Variant (399)..(400): Xaa in position 399 to 400 is any amino acid
  Variant (403)..(403): Xaa in position 403 is any amino acid
  Variant (404)..(407): Xaa in position 404 to 407 is any or no amino acid
  Variant (409)..(411): Xaa in position 409 to 411 is any amino acid
  Variant (412)..(412): Xaa in position 412 is any or no amino acid
  Variant (414)..(417): Xaa in position 414 to 417 is any amino acid
  Variant (420)..(423): Xaa in position 420 to 423 is any amino acid
  Variant (426)..(428): Xaa in position 426 to 428 is any amino acid
  Variant (431)..(438): Xaa in position 431 to 438 is any amino acid
  Variant (439)..(439): Xaa in position 439 is any or no amino acid
  Variant (441)..(456): Xaa in position 441 to 456 is any amino acid
  Variant (457)..(464): Xaa in position 457 to 464 is any or no amino acid
  Variant (466)..(466): Xaa in position 466 is any amino acid
IXGDGXGXXXXXXXXXXXXXXXXXXXXXXXXXXXXXXXXXXXXXXXXXXXXXXXXXXXXXPXXXXXXXXXXXXXXXKGXXXTXXXXPXGXXGXXSXNXXLRXXXXLXXXXRPXXXXXGXXXXXXXXXXXXXXXXXXXXRENXEXXYXGXEXXXXXXXXXXXXXXXXXXXXXXXXXXXXXXXXXXXXXXXKXXXXXXXXRXXXXAXXXAXXXXXXXXXXXXXXXXXXXXXXXXVTXXHKXNIMKXXXGXFXXXXXXXXXXXXXXXXXXXXXXXXXXXXXXXXXXXXXXXXXXXXXXXXXXXXXXXXXXXXXXXXXXXXXXXXXXXXXXXXXXXXXXXIXDXXXXXXXXXPXXXXXXVXXXXNLXGDXXSDXXAXXXGGXXGXXPXXNXXXXXXXXXXFEXXHGXXXXXAXXXXGXXXXNPXXXXLSXXXMLXXXXXXXXXAXXXXXXXXXXXXXXXXXXXXXXXXTXD

SEQ ID NO: 37384 - protein, 19 aa, Artificial sequence
  protein pattern
  Variant (2)..(6): Xaa in position 2 to 6 is any or no amino acid
  Variant (9)..(9): Xaa in position 9 is any amino acid
  Variant (10)..(10): Xaa in position 10 is Ala or Ser
  Variant (11)..(11): Xaa in position 11 is any amino acid
  Variant (12)..(12): Xaa in position 12 is Ile, Leu or Met
  Variant (15)..(15): Xaa in position 15 is Ala, Gly or Ser
  Variant (16)..(17): Xaa in position 16 to 17 is any amino acid
  Variant (18)..(18): Xaa in position 18 is Leu or Met
AXXXXXNPXXXXLSXXXXL

SEQ ID NO: 37385 - protein, 13 aa, Artificial sequence
  protein pattern
  Variant (4)..(4): Xaa in position 4 is Ser or Thr
  Variant (6)..(6): Xaa in position 6 is Asp or Gly
  Variant (7)..(7): Xaa in position 7 is any amino acid
  Variant (9)..(9): Xaa in position 9 is any amino acid
  Variant (11)..(11): Xaa in position 11 is Ile, Leu or Val
  Variant (13)..(13): Xaa in position 13 is Phe, His, Trp or Tyr
RENXEXXYXGXEX

SEQ ID NO: 37386 - protein, 13 aa, Artificial sequence
  protein pattern
  Variant (3)..(3): Xaa in position 3 is Ala or Gly
  Variant (4)..(4): Xaa in position 4 is Asn or Thr
  Variant (7)..(8): Xaa in position 7 to 8 is any amino acid
  Variant (9)..(9): Xaa in position 9 is Ala, Gly, Ser or Thr
  Variant (10)..(10): Xaa in position 10 is Asp, Glu or Ser
  Variant (12)..(12): Xaa in position 12 is any amino acid
HKXXIMXXXXGXF

SEQ ID NO: 37387 - protein, 14 aa, Artificial sequence
  protein pattern
  Variant (2)..(2): Xaa in position 2 is Ile, Leu, Met or Val
  Variant (3)..(3): Xaa in position 3 is Ala or Val
  Variant (4)..(5): Xaa in position 4 to 5 is any amino acid
  Variant (8)..(8): Xaa in position 8 is any amino acid
  Variant (10)..(10): Xaa in position 10 is Asp, Gly or Asn
  Variant (11)..(11): Xaa in position 11 is any amino acid
  Variant (12)..(12): Xaa in position 12 is Ile, Leu, Met or Val
  Variant (13)..(13): Xaa in position 13 is Ala, Gly, Ser or Val
  Variant (14)..(14): Xaa in position 14 is Asp or Asn
VXXXXNLXGXXXXX

SEQ ID NO: 37388 - protein, 11 aa, Artificial sequence
  protein pattern
  Variant (3)..(3): Xaa in position 3 is Gly or Pro
  Variant (4)..(4): Xaa in position 4 is Leu or Met
  Variant (5)..(5): Xaa in position 5 is any amino acid
  Variant (8)..(8): Xaa in position 8 is Ile, Leu, Met or Val
  Variant (10)..(10): Xaa in position 10 is any amino acid
KGXXXTPXGXG

SEQ ID NO: 37389 - protein, 14 aa, Artificial sequence
  protein pattern
  Variant (2)..(3): Xaa in position 2 to 3 is any amino acid
  Variant (4)..(4): Xaa in position 4 is any or no amino acid
  Variant (7)..(7): Xaa in position 7 is any amino acid
  Variant (9)..(9): Xaa in position 9 is Ile, Leu, Met or Val
  Variant (10)..(10): Xaa in position 10 is any amino acid
  Variant (12)..(12): Xaa in position 12 is Gly or Ser
  Variant (13)..(13): Xaa in position 13 is Ala, Cys, Gly or Ser
AXXXGGXGXXPXXN

SEQ ID NO: 37390 - DNA, 666 bp, Escherichia coli
  CDS (1)..(666): transl_table=11
atggtacttgctttgaactataatatgcacggagttaatattcgctcagagaatgcagcaaaacctcatacgatgccctctagatatctttgcgagtatattagaagcattgagaaaaatggccacgcccttgattttggctgcggaaaacttagatattctgatgaattaatcagtaaatttgatgaagttacttttctagactcgaaaaggcaacttgaaagagagcaaattattagaggaattaaaactaaaattattgactatgtcccacgatattataaaaatgcaaatacagttgctttcgaggatgtcgacaaaataattgggggttacgatttcatcctttgctctaatgttctctctgccgttccttgtcgggatacaatcgacaaaatagttcttagcatcaagagattactaaaatcaggaggtgagactcttattgtaaatcaatataaaagctcatacttcaaaaaatacgaaacaggaagaaaacatctttacggatacatttacaaaaattcaaaaagtgtttcttactatggattactcgatgaactcgcagtgcaagaaatatgttcttcacatggccttgaaatattaaagtcgtggagtaaagcaggaagttcatatgtcactgttgggagttgtaatgcaatataa

SEQ ID NO: 37391 - protein, 221 aa, Escherichia coli
MVLALNYNMHGVNIRSENAAKPHTMPSRYLCEYIRSIEKNGHALDFGCGKLRYSDELISKFDEVTFLDSKRQLEREQIIRGIKTKIIDYVPRYYKNANTVAFEDVDKIIGGYDFILCSNVLSAVPCRDTIDKIVLSIKRLLKSGGETLIVNQYKSSYFKKYETGRKHLYGYIYKNSKSVSYYGLLDELAVQEICSSHGLEILKSWSKAGSSYVTVGSCNAI

SEQ ID NO: 37392 - DNA, 27 bp, Artificial sequence
  primer
atggtacttgctttgaactataatatg

SEQ ID NO: 37393 - DNA, 26 bp, Artificial sequence
  primer
ttatattgcattacaactcccaacag

SEQ ID NO: 37394 - DNA, 1212 bp, Escherichia coli
  CDS (1)..(1212): transl_table=11
atgcttaccacccttatttatcgtagccatatacgtgacgacgaacctgtcaaaaaaatcgaagaaatggtttcgatagcaaatcgcaggaacatgcagtctgacgtaacagggatcttactgtttaatggttctcattttttccagcttctggaaggtccggaagaacaggttaaaatgatatatcgggctatatgccaggatccacggcactataatattgttgagctgctgtgcgattacgcgcctgctcgccgttttggcaaagcgggaatggaattatttgatttgcgcctgcacgagcgagatgacgttttacaggccgtattcgacaaaggcacatcaaaatttcagctaacttatgatgacagagcgctacaattttttcgtacttttgtccttgcaaccgaacaatcaacctatttcgagatccctgccgaagactcctggctttttatcgctgacggatctgataaagaacttgattcctgtgccctttcaccaactataaacgaccactttgcctttcatcctattgtcgatcccttatcgcggcggataatcgcttttgaagccattgtgcaaaaaaatgaagatagcccatcagccatagcggttgggcagcgtaaagacggggaaatctacacagcggatctcaaaagtaaggcgcttgcattcacgatggcacacgcacttgagctcggtgataaaatgatttcaatcaatctattacctatgaccctggttaacgaacctgacgcagtctcttttttacttaatgaaataaaggccaatgctctggtgcctgaacaaatcatcgttgaatttactgaaagtgaagtcatatctcggtttgatgagtttgccgaagcgattaaatcgctaaaggctgctggtatcagtgtagcaattgatcattttggcgcaggttttgctggtttgttactcctgtcacgcttccagcctgacagaattaaaatcagtcaggaattgattaccaatgttcataaaagtgggccacggcaggcaattattcaggcgatcataaaatgctgtacatcacttgaaattcaagtcagtgctatgggcgtggcaacaccagaagagtggatgtggcttgaatccgcaggaattgagatgtttcagggagatctgtttgctaaagctaaattgaatggtatcccttccatagcgtggccagagaaaaaataa

SEQ ID NO: 37395 - protein, 403 aa, Escherichia coli
MLTTLIYRSHIRDDEPVKKIEEMVSIANRRNMQSDVTGILLFNGSHFFQLLEGPEEQVKMIYRAICQDPRHYNIVELLCDYAPARRFGKAGMELFDLRLHERDDVLQAVFDKGTSKFQLTYDDRALQFFRTFVLATEQSTYFEIPAEDSWLFIADGSDKELDSCALSPTINDHFAFHPIVDPLSRRIIAFEAIVQKNEDSPSAIAVGQRKDGEIYTADLKSKALAFTMAHALELGDKMISINLLPMTLVNEPDAVSFLLNEIKANALVPEQIIVEFTESEVISRFDEFAEAIKSLKAAGISVAIDHFGAGFAGLLLLSRFQPDRIKISQELITNVHKSGPRQAIIQAIIKCCTSLEIQVSAMGVATPEEWMWLESAGIEMFQGDLFAKAKLNGIPSIAWPEKK

SEQ ID NO: 37396 - DNA, 1290 bp, Escherichia coli CFT073
  CDS (1)..(1290): transl_table=11
ttggtattaaaagaaagacacaagaagatatgtctgttaccgtcttactctcgcctcgcccattaccctggattgttaatgcttaccacccttatttatcgtagccatatacgtggcgacgaacctgtcaaaaaaattgaagaaatggtttcgatagcaaatcgcaggaacatgcggtctgacgtaacagggatcttactgtttaatggttctcattttttccagcttctggaaggtccggaagaacaggttcaaatgatatatcgggccatatgccaggatccacggcactataatattgttgaactgttgtgcgattacgcgcctgctcgccgttttggcaaagcaggaatggaattatttgatttacgcctgcacgagcgagatgacgttttacaggccgtattcgacaaaggcacatcaaaatttcagctaacttatgatgacagagcgctacaattttttcgtacttttgtccttgcaactgaacaatcaacctatttcgagattcctgctgaagactcctggctttttatcgctgacggatctgataaagaacttgattcttgtaccctttcatcaaatataaacgaccactttgcctttcatcctattgtcgaccctttatcgcggcggataatcgcttttgaagccattgtgcaaaaaaatgaagacagcccgtcagctatagcggttgggcagcgtaaagacgaggaaatctacacagcggatctcaaaagtaaggcgcttgcatttgcgatggcacacgcacttaagctcggtgataaaatgatttcaatcaatctattacctatgaccctggttaacaaacctgacgcagtctcttttttacttgatgaaataaaggccaatgctctggtacctgaacaaatcatcgttgaatttactgaaagtgaagtcatatctcggtttgatgagtttgccgaagcggttaaatcgctaaaggcggccggtatcagtgtagcaattgatcattttggcgcaggttttgctggtttgttactcctgtcacgcttccagcctgacagaattaaaatcagtcaggaattgattaccaatgttcataaaagcggaccacggcaggcaattattcaggcgatcatgaaatgctgtacatcacttgaaattcaagtctctgctatgggcgtggcaacaccagaagagtggatgtggcttgaatctgcaggaattgagatgtttcagggagatctgttttccaaagctaaattgaatggtatcccttcagttgcgtggccggagaaaaaataa

SEQ ID NO: 37397 - protein, 429 aa, Escherichia coli CFT073
MVLKERHKKICLLPSYSRLAHYPGLLMLTTLIYRSHIRGDEPVKKIEEMVSIANRRNMRSDVTGILLFNGSHFFQLLEGPEEQVQMIYRAICQDPRHYNIVELLCDYAPARRFGKAGMELFDLRLHERDDVLQAVFDKGTSKFQLTYDDRALQFFRTFVLATEQSTYFEIPAEDSWLFIADGSDKELDSCTLSSNINDHFAFHPIVDPLSRRIIAFEAIVQKNEDSPSAIAVGQRKDEEIYTADLKSKALAFAMAHALKLGDKMISINLLPMTLVNKPDAVSFLLDEIKANALVPEQIIVEFTESEVISRFDEFAEAVKSLKAAGISVAIDHFGAGFAGLLLLSRFQPDRIKISQELITNVHKSGPRQAIIQAIMKCCTSLEIQVSAMGVATPEEWMWLESAGIEMFQGDLFSKAKLNGIPSVAWPEKK

SEQ ID NO: 37398 - DNA, 25 bp, Artificial sequence
  primer
atgcttaccacccttatttatcgta

SEQ ID NO: 37399 - DNA, 25 bp, Artificial sequence
  primer
ttattttttctctggccacgctatg

SEQ ID NO: 37400 - DNA, 1542 bp, Escherichia coli K12
  CDS (1)..(1542): transl_table=11
atggagatctcctggggccgcgcgctatggcgcaattttttgggccagtcccccgactggtacaaactcgccctcatcattttcttaatcgtaaacccgttaattttcctcatcagccctttcgtcgcgggctggttgctggtagcggaatttattttcactctggcgatggccctgaaatgctacccgctgctccccggtggtctgttggctatcgaagcggtattcatcggcatgaccagcgcggaacacgtccgtgaagaggtggcggcaaatcttgaagtcttgctgttactgatgtttatggtggcgggtatctattttatgaaacagctgttgctgttcatatttacccgtttgctgttaagcattcgctccaaaatgctgctgtcgctctctttttgcgtggcggctgcgttcctctccgcgttcctcgatgccttaaccgtcgtggcggtggtgatcagcgttgcagtcggtttttatggtatttatcaccgcgtagcctcttcccgtaccgaagacaccgacctgcaagacgatagtcatatcgacaagcattacaaagtggttctggaacagttccgtggctttctgcgtagcctgatgatgcatgccggtgtcggcaccgcattaggcggcgtaatgaccatggtgggcgaaccacagaacctgatcatcgctaaagcggctggctggcattttggcgatttcttcctgcgcatgtcgccggtgaccgttccggttctgatttgtggcctgttaacctgcctgctggtagagaagctgcgttggtttggctacggtgaaacgctgccggagaaagtccgcgaagtgttgcaacagtttgacgatcaaagccgccaccagcgtacccgtcaggataaaatccgtctgattgtccaggcgattattggcgtctggctggtgactgcgctggcgttgcatctggcggaagttggcttgattggtttgtcagtcattattctggcaacatcattgaccggtgtcaccgatgagcatgctatcggtaaagccttcaccgaatctctgccattcaccgcactgttgacggtgtttttctcggtagtcgcggtgattatcgaccaacaactgttttcgccaattattcagtttgtgttgcaggcatcggaacatgctcagctgtcgctgttctatattttcaacggtctgctgtcatccatttcggataacgtcttcgtggggacgatttatatcaacgaagcgaaagcggcaatggaaagtggcgctatcacgttgaagcaatacgagctgctggcggtcgccattaataccggtaccaatctgccctccgtcgctacgccgaacggtcaggctgcgttcctgttcctgctgacctctgcactcgcgccattgattcgcctctcttatggccgcatggtgtggatggccctgccttacaccctcgtcctgacactcgtcggcttgctctgcgtcgagtttacgcttgcccctgtaaccgaatggtttatgcaaatgggctggatagcaacgctttaa

SEQ ID NO: 37401 - protein, 513 aa, Escherichia coli K12
MEISWGRALWRNFLGQSPDWYKLALIIFLIVNPLIFLISPFVAGWLLVAEFIFTLAMALKCYPLLPGGLLAIEAVFIGMTSAEHVREEVAANLEVLLLLMFMVAGIYFMKQLLLFIFTRLLLSIRSKMLLSLSFCVAAAFLSAFLDALTVVAVVISVAVGFYGIYHRVASSRTEDTDLQDDSHIDKHYKVVLEQFRGFLRSLMMHAGVGTALGGVMTMVGEPQNLIIAKAAGWHFGDFFLRMSPVTVPVLICGLLTCLLVEKLRWFGYGETLPEKVREVLQQFDDQSRHQRTRQDKIRLIVQAIIGVWLVTALALHLAEVGLIGLSVIILATSLTGVTDEHAIGKAFTESLPFTALLTVFFSVVAVIIDQQLFSPIIQFVLQASEHAQLSLFYIFNGLLSSISDNVFVGTIYINEAKAAMESGAITLKQYELLAVAINTGTNLPSVATPNGQAAFLFLLTSALAPLIRLSYGRMVWMALPYTLVLTLVGLLCVEFTLAPVTEWFMQMGWIATL

SEQ ID NO: 37402 - DNA, 1542 bp, Pasteurella multocida subsp. multocida str. Pm70
  CDS (1)..(1542): transl_table=11
atgagttatactcaagcattcctaagaaatttcttaggaacaagtcctaattggtacaaaatcacaattgtccttttccttatcataaaccctataatcttcttctttatcagtccctttattgccggttggctcttagttgctgaattcattctgactctcgccatggcactgaaatgttaccctcttcaacccggtggtttactggcattagaagccgtggcgattggtatgacccatccagaacacgtgaaagccgaaatcatagcaaacttcgaagtcatcctactattgatctttatggttgcagggatttattttatgaagcggttattgctgtttgtttttacaaaattacttttaagtattcgttcaaaaatggtgttatcccttgctttctgtttaagtgcggcctttttatcggcttttctcgatgctttaactgtggtagccgtgatcatcagtgtaggtatggggttctatggggtatatcataaagttgcttcaggcaataatttcaacgactccactgatattaccaaagacgataaaattggtgaaaataaagacacgttagaacaattccgtgctttcttacgcagcttaatgatgcattcttgtgtaggaaccgcattaggtggtgtcatgactatggtcggtgaaccccaaaacttaatcattgcagaacaagccaaatgggcatttggggaattcttcttacgtatgctcccagtcacgttgccagttctcatttgtggtttagtgacctgcttcttagtggaaaaatttggtgtatttggctatggcgccaaattgccacgtaaagtatggggcatcttggcaaagtttgatcgcaataatcaacaaaaaatgtcgcaacaagatcgtttgaaactttttgtgcaagctttaattggtatttggttggttgttggactcgcattccatctcgccgccgtcggtatcattggtttaacggtgattattttggctacttcattttgtggtgtcaccagcgagcatgctattggtaaagcctttcaggaatccttacccttcacagcattgttagtggtgttcttctcggttgttgccgtcatcattgaccaacatctgtttgcgccaattattcagtttgtgctggcggccagtgaacatactcagcttgccctgttctatatttttaacggtttgttatccgccatttcagataatgtgtttgtggccacagtttatatcaatgaaaccaaagcggcattagaggctggcttaattgctcaaccacaatatgaattactggcagtagcaattaataccggtaccaatcttccttctgttgcaaccccaaatggtcaagccgcattcttatttttattgacctcatcactggcaccattgattcgtctttcttatggtagaatggtttatatggcattgccttataccatcgtattatcctgtattggtttattggctgtggaatatattttgcctggcgcaaccaatgtgctcattcaaattggtttattaaaaccaatgtaa

SEQ ID NO: 37403 - protein, 513 aa, Pasteurella multocida subsp. multocida str. Pm70
MSYTQAFLRNFLGTSPNWYKITIVLFLIINPIIFFFISPFIAGWLLVAEFILTLAMALKCYPLQPGGLLALEAVAIGMTHPEHVKAEIIANFEVILLLIFMVAGIYFMKRLLLFVFTKLLLSIRSKMVLSLAFCLSAAFLSAFLDALTVVAVIISVGMGFYGVYHKVASGNNFNDSTDITKDDKIGENKDTLEQFRAFLRSLMMHSCVGTALGGVMTMVGEPQNLIIAEQAKWAFGEFFLRMLPVTLPVLICGLVTCFLVEKFGVFGYGAKLPRKVWGILAKFDRNNQQKMSQQDRLKLFVQALIGIWLVVGLAFHLAAVGIIGLTVIILATSFCGVTSEHAIGKAFQESLPFTALLVVFFSVVAVIIDQHLFAPIIQFVLAASEHTQLALFYIFNGLLSAISDNVFVATVYINETKAALEAGLIAQPQYELLAVAINTGTNLPSVATPNGQAAFLFLLTSSLAPLIRLSYGRMVYMALPYTIVLSCIGLLAVEYILPGATNVLIQIGLLKPM

SEQ ID NO: 37404 - DNA, 1503 bp, Pseudomonas aeruginosa PAO1
  CDS (1)..(1503): transl_table=11
gtgagcagtcccctgagccaggctttcgcacagaacttcctcgggcattcgccgcgctggtacaagctgacggtgctcgccttcctcttgctcaaccccctgctgctatggctggccgggccggtgacaagcgcctgggtgctggtcggcgagttcatcttcaccctggccatggcgctgaaatgctatccgctacagccgggtggcctgttggtgctggaggcgctgctgcttggcctggctacccccgaggcgctctatgcggaattgcagcacaacttcccggtgctcctgctgctgatgttcatggtcgccggcatctacttcatgaaggacctgctgctcctgctgttttcccgcctgctgctcggcgtgcgctcgaagaccctgctatcgctcctgttctgcctgctggccgccctcctctcggccttcctcgacgccctcaccgtgaccgccgtggtgatcagcgtggcggtggcattcttcgccgtgtatcaccgggtcgcttcggggcagcgcgccagcgaggactacgatcccgccaccgaccgccaggtccccgagctgcaccgggcccatctcgaggaattccgcgccttcctccgcagcctgctcatgcacgcggcggtcggcaccgcgctgggcggcgtctgcaccctggtgggagagccgcagaacctgctgatcggccacgaggccggctggcatttcgtcgagttcttccgccaggtcgcgccggtatccatgccggtactggcggccggcctgctgacctgcgtgctgctggagaagagccgccgcttcggctatggcgcccagttgccggcggcggtgcgccaggtgctcgccgagtacgccgccagcgaaagccgcaaacgcggagcgcagcagaaggccgcgctgctggtgcaggccctggcggcgctggtactgatcgtcgggctggccctgcatgtcgccgaggtcggcctgatcggcctgttggtgatcgtgctgatcactgccttcaccggcgtcaccgacgaacaccagatcggccgcgccttccaggaggccctgccgttcactgcgctgctggtggtgttcttcgcggtggtcgcggtgatccaccagcagcacctgttcaccccgatcatccaggcggtgctggcgctgccggcggaacgccagccgggcatgctgttcatcgccaacggcctgctctcggcgatcagcgacaacgtattcgtcgccaccatctacatcaccgaggtgaaacaggcgctggatgccggccacatgagccgcgagcatttcgataccctggcggtggcgatcaataccggcaccaacctgcccagcgtagcgacgcccaacggccaggcggcgttcctcttcctgctgacctcctccatcgccccgctggtgcgcctgtcgtacggccgcatggtctggatggcgctaccctacaccctggtgatgggcggcctgggctggtgggcggtcagtcattggctttga

SEQ ID NO: 37405 - protein, 500 aa, Pseudomonas aeruginosa PAO1
MSSPLSQAFAQNFLGHSPRWYKLTVLAFLLLNPLLLWLAGPVTSAWVLVGEFIFTLAMALKCYPLQPGGLLVLEALLLGLATPEALYAELQHNFPVLLLLMFMVAGIYFMKDLLLLLFSRLLLGVRSKTLLSLLFCLLAALLSAFLDALTVTAVVISVAVAFFAVYHRVASGQRASEDYDPATDRQVPELHRAHLEEFRAFLRSLLMHAAVGTALGGVCTLVGEPQNLLIGHEAGWHFVEFFRQVAPVSMPVLAAGLLTCVLLEKSRRFGYGAQLPAAVRQVLAEYAASESRKRGAQQKAALLVQALAALVLIVGLALHVAEVGLIGLLVIVLITAFTGVTDEHQIGRAFQEALPFTALLVVFFAVVAVIHQQHLFTPIIQAVLALPAERQPGMLFIANGLLSAISDNVFVATIYITEVKQALDAGHMSREHFDTLAVAINTGTNLPSVATPNGQAAFLFLLTSSIAPLVRLSYGRMVWMALPYTLVMGGLGWWAVSHWL

SEQ ID NO: 37406 - DNA, 1542 bp, Escherichia coli O157:H7 EDL933
  CDS (1)..(1542): transl_table=11
  misc_feature (725)..(725): y is t or c
  misc_feature (1049)..(1049): y is t or c
atggagatctcctggggccgcgcgctatggcgcaattttttgggccagtcccccgactggtacaaactcgccctcatcattttcttaatcgtaaatccgttaattttcctcatcagccctttcgtcgctggctggttgctggtagcggaatttattttcactctggcgatggccctgaaatgctacccgctgctccccggtggcctgttggctatcgaagcggtattcatcggcatgaccagcgcggaacacgtccgtgaagaggtggcggcaaatcttgaagtcttgctgttactgatgtttatggtggcgggtatctattttatgaaacagctattgctgttcatatttacccgtttgctgttaagcattcgctccaaaatgctgctgtcgctctctttttgcgtagcggcagcgttcctctccgcgttcctcgatgccttaaccgtcgtggcggtggtgatcagcgttgccgtcggtttttatggtatttatcatcgcgtagcctcttcccgtaccgaagacaccgacctgcaagacgatagtcatatcgacaagcattacaaagtggttctggaacagttccgtggctttctgcgtagcctgatgatgcatgccggtgtcggcaccgcattaggcggcgtaatgaccatggtgggcgaaccacagaacctgatcatcgctaaagcggctggctggcattttggcgatttcttcctgcgcaygtcgccggtgaccgttccggttctgatttgtggcctgttaacctgcctgctggtagagaagctgcgttggtttggctacggtgaaacgctgccggagaaagtccgcgaagtgttgcaacagtttgacgatcaaagccgccaccagcgtacccgtcaggataaaatccgtctgattgtccaggcgattattggcgtctggctggtgactgcgctggcgttgcatctggcggaagttggcttgattggtttgtcagtcattattctggcaacatcattgaccggtgtcaccgatgaacatgctatcggtaaagccttcaccgaatytctgccattcaccgcactgttgacggtgtttttctcggtagtcgcggtgattatcgaccaacaactgttttcgccgattattcagtttgtgttgcaggcatcggaacatgctcagctgtcgctgttctatattttcaacggtctgctgtcatccatttcggataacgtcttcgtggggacgatttatatcaacgaagcgaaagcggcaatggaaagtggcgctatcacgttgaagcaatacgagctgctggcggtcgccattaataccggtaccaatctgccctctgtcgctacgccgaacggtcaggctgcgttcctgttcctgctgacctctgcactcgcgccattgattcgcctctcttatggccgcatggtgtggatggccctgccttacaccctcgtcctgacactcgtcggactgctctgcgtcgagtttacgcttgcccctgtaaccgaatggtttatgcaaatgggctggatagcaacgctttga

SEQ ID NO: 37407 - protein, 513 aa, Escherichia coli O157:H7 EDL933
  misc_feature (242)..(242): The Xaa at location 242 stands for Met, or Thr.
  misc_feature (350)..(350): The Xaa at location 350 stands for Phe, or Ser.
MEISWGRALWRNFLGQSPDWYKLALIIFLIVNPLIFLISPFVAGWLLVAEFIFTLAMALKCYPLLPGGLLAIEAVFIGMTSAEHVREEVAANLEVLLLLMFMVAGIYFMKQLLLFIFTRLLLSIRSKMLLSLSFCVAAAFLSAFLDALTVVAVVISVAVGFYGIYHRVASSRTEDTDLQDDSHIDKHYKVVLEQFRGFLRSLMMHAGVGTALGGVMTMVGEPQNLIIAKAAGWHFGDFFLRXSPVTVPVLICGLLTCLLVEKLRWFGYGETLPEKVREVLQQFDDQSRHQRTRQDKIRLIVQAIIGVWLVTALALHLAEVGLIGLSVIILATSLTGVTDEHAIGKAFTEXLPFTALLTVFFSVVAVIIDQQLFSPIIQFVLQASEHAQLSLFYIFNGLLSSISDNVFVGTIYINEAKAAMESGAITLKQYELLAVAINTGTNLPSVATPNGQAAFLFLLTSALAPLIRLSYGRMVWMALPYTLVLTLVGLLCVEFTLAPVTEWFMQMGWIATL

SEQ ID NO: 37408 - DNA, 1575 bp, Yersinia pestis CO92
  CDS (1)..(1575): transl_table=11
atggacattaccaacagacaagctgtactcaagaattttcttggtaactctccggattggtacaaactagcaattatggggttcttgatcattaaccctctagtcttcttctttgtcagcccctttgtcgcgggctggatgctggttatcgagtttatctttaccttagccatggcgctgaaatgttacccgctgcaaccggggggtttgctcgctattcaagccgttgccatcggcatgaccagcccgcatcaagttgcagaagagatcgccaataacctggaagtcctcttgcttttagtatttatggtggccggcatctactttatgaaacagctgctgctgtttgtatttacgaaattgctgttgaatattcggtcaaaaactatcctttccctggccttttgtctggcgtcagccttcctatcagcatttttggatgccttaaccgtaatcgcggtagttatcagcgtatccgttggtttttatactatttatcataacgttacttcaaatcacagtgacaaagatattactgatgacagcggaatcgataatcaggacagccatgaaacattagagcaattccgggcatttttacgcagtctgatgatgcatgctggcgtgggtaccgctctggggggcgtcatgacaatggttggtgagcctcagaatttgattattgccaaaagcgcgggttggaattttgctgacttctttattcgcatgttacccgtcaccttacccgtctttattttcgggttattggtctgcttgctggtcgaaaaatttaaactgtttggttatggtgcccagttgccagaacgtgtgcgtcaggttctgaccgaatacgatcagcaagccaatgcgaaacggaccaagcaagagaagatgaagttaatagtacaagccattattggtgtctggttggtattggcactggcactccatttagctgaagtcggtttggtcgggctatccgttattattctcgccacctcattttgtggtatcacaaatgagcattcattgggcaaagcctttcaggaagccttgccgtttaccgcgctgctaaccgtattttttgccgtggtcgcggttattattgaacaaagcctctttacccccattattcagtttgttttacaagcctcgccttccgctcagctatcgctgttttatctgtttaatggcttgctctcatcggtgtcagacaatgtttttgtcggtaccgtgtatatcaatgaggcccgttctgcgtttgagcatggtattgtctcgttacaacaatttgaattgttggcggtcgccatcaatacagggaccaacctcccctccgtggcgacaccaaacggccaggccgctttcttgttcctgctgacttcggcattggcaccactaattcgcctttcctatgggcgaatggtatatatggctttgccttatactctagtgatgacgattgttggcctgctgggtgtcgagtttttattggtaccgatgacagagtggctgactcaggctggatggatcagtttgccacacatcacaaacggggttgccatcccacactga

SEQ ID NO: 37409 - protein, 524 aa, Yersinia pestis CO92
MDITNRQAVLKNFLGNSPDWYKLAIMGFLIINPLVFFFVSPFVAGWMLVIEFIFTLAMALKCYPLQPGGLLAIQAVAIGMTSPHQVAEEIANNLEVLLLLVFMVAGIYFMKQLLLFVFTKLLLNIRSKTILSLAFCLASAFLSAFLDALTVIAVVISVSVGFYTIYHNVTSNHSDKDITDDSGIDNQDSHETLEQFRAFLRSLMMHAGVGTALGGVMTMVGEPQNLIIAKSAGWNFADFFIRMLPVTLPVFIFGLLVCLLVEKFKLFGYGAQLPERVRQVLTEYDQQANAKRTKQEKMKLIVQAIIGVWLVLALALHLAEVGLVGLSVIILATSFCGITNEHSLGKAFQEALPFTALLTVFFAVVAVIIEQSLFTPIIQFVLQASPSAQLSLFYLFNGLLSSVSDNVFVGTVYINEARSAFEHGIVSLQQFELLAVAINTGTNLPSVATPNGQAAFLFLLTSALAPLIRLSYGRMVYMALPYTLVMTIVGLLGVEFLLVPMTEWLTQAGWISLPHITNGVAIPH

SEQ ID NO: 37410 - DNA, 1545 bp, Haemophilus influenzae Rd KW20
  CDS (1)..(1545): transl_table=11
atgacaaacattcaggcttttatgaaaaactttcttggggcaagtccagaatggtacaaacttgccattgtggtttttcttattataaatccaattgttttcttttttattagtccttttattgcgggttggttactggttgcagaatttattttcacattggcaatggcattaaaatgctaccctcttcaaccaggtggtctattagcaattgaagctattattattggaatgacaaatgccaaacacgtcaaagcagaaattatggcaaactttgaagtgatcttgctactgatatttatggtggcaggtattttctttatgaaacaattactgctttatgtatttactaaattacttgtcaaaattcgttctaaaattgcactttctattgccttttgttttagtgctgcttttttatcggcttttctcgatgctttaacggttgttgctgttatcattagtgtcgcaatgggattttatggtgtgtatcacaaagttgcatcaggcaataatttaattgatgcggttgatatttcagacgatagaaaaattattgaacaacagcacgaaatcttagaaaaattccgtgcattcttacgtagtttaatgatgcatgcgggtgtaggaactgcactcggtggtgtaatgaccgttgttggagaaccacaaaacttaattattgcagaacaagcaaaatggaactttatggaatttttcctccgtatggcacccgtgactattcctgtgtttatctgcggattactcacttgtttcttggtcgaaaaattcaaattatttggttatggcgagaaattaccagacgaagtgtggaaaatcttatcagatttagatcgcactaattcagaaaaaatgtctaaacaagataaaattaaattaggtatgcaagcgttaatcgcaatttggttaattgttggattagcattccatcttgccgcagtcggtttaattggtttaagtatcatcatttttgctacgtctttcactggtgtgacggatgaacatactatcggtaaagcctttcaggaatctttaccctttactgcattgctcgttgtattcttttctgttgttgcagtaattattgatcaaaaacttttttcaccaattattcacttcgttctttctgcggaagaaaatacacaacttgctttattctatttgtttaatggcttgctttcttctatttctgataatgtatttgttgcaacggtttatattaatgaagctaaagctgcactgactaatggagtaattgcaccgcatcaatttgaattgctttctgttgccattaatacaggtacaaacttaccatcagttgcaacaccaaatggacaagctgctttcttattcttattgacttcatcaatttcgccattaattcgcctttcttatggcagaatggtttatatggctttaccttacacgattgtactttcaatcattggtttactggctattgaatttattttaccagctgccacaatttggttagcaagtttaggtttaattttgccaatttaa

SEQ ID NO: 37411 - protein, 514 aa, Haemophilus influenzae Rd KW20
MTNIQAFMKNFLGASPEWYKLAIVVFLIINPIVFFFISPFIAGWLLVAEFIFTLAMALKCYPLQPGGLLAIEAIIIGMTNAKHVKAEIMANFEVILLLIFMVAGIFFMKQLLLYVFTKLLVKIRSKIALSIAFCFSAAFLSAFLDALTVVAVIISVAMGFYGVYHKVASGNNLIDAVDISDDRKIIEQQHEILEKFRAFLRSLMMHAGVGTALGGVMTVVGEPQNLIIAEQAKWNFMEFFLRMAPVTIPVFICGLLTCFLVEKFKLFGYGEKLPDEVWKILSDLDRTNSEKMSKQDKIKLGMQALIAIWLIVGLAFHLAAVGLIGLSIIIFATSFTGVTDEHTIGKAFQESLPFTALLVVFFSVVAVIIDQKLFSPIIHFVLSAEENTQLALFYLFNGLLSSISDNVFVATVYINEAKAALTNGVIAPHQFELLSVAINTGTNLPSVATPNGQAAFLFLLTSSISPLIRLSYGRMVYMALPYTIVLSIIGLLAIEFILPAATIWLASLGLILPI

SEQ ID NO: 37412 - DNA, 1545 bp, Salmonella typhimurium LT2
  CDS (1)..(1545): transl_table=11
atggagatctcatggggtcgcgccatgtggcgcaactttttaggccagtcgcccgactggtacaaactggcactacttgtctttttaattgttaacccattcattttcttagctaatccctttattgccggttggctgctggtggcagagtttatcttcactctggcgatggcgttaaagtgttaccccctgctgcccggcgggttactggccattgaagccgttatcatcggtatgaccagcgccgcccatgtacgtgaagaggttgccgccaacctggaagtcttgctgctgctgatgtttatggtggcaggcatctactttatgaagcagttattgctgtttatttttacccgtctgttactcagtatccgctcgaagatggttctgtcgctggccttttgcgtcgccgccgcattcttgtcggctttccttgacgcgcttaccgtcgttgcggtggtgatcagcgtcgccgtcggtttttacgggatttaccatcgtgtggcctcatcgcgcggcgaagagaacgatatgctggacgacagccatatcgatccgcattacaaaacggtgctggagcaattccgcggattcttgcgtagcctgatgatgcatgcaggcgtggggacggcgctgggcggcgtcatgaccatggtcggggagccgcaaaacctgatcatcgctaaagcggctggctggcatttcggcgacttctttttgcggatgtcgcctgtcaccgtcccggtactggtatgtggactgttaacctgtatgctggtcgagaaaatgcgctggtttggctatggcgaaacgttgcccgaaaaagtccgcgacgttttacagcaattcgacgatcaaagccgtaagaagcgcacccgccaggataaaattaaactcatagtccaggcgattattggcgtctggctggttaccgccctcgccctccatctcgcggaggtgggactgattggtctgtcggtcattattctggccaccgcgttaacgggtgtaaccgatgaacacgccatcggcaaagcgtttaccgagtcgctgccgtttactgcgctgttaaccgttttcttctccattgtggcggttattatcgatcaacatcttttcgcgccgattattcagttcgtcttgcaagcctctgaacacgcgcagctaacgctgttctatctctttaacggcctgttgtcttccatctcagataacgtctttgtcggcaccatttatatcaacgaagcgaaggcggcaatggaaaacggcgctatcagcttaaaacagtttgagcttttagccgtggccatcaataccggtactaacctgccatcggtagcgacgccaaatggtcaggcggcattcttattcctgctgacctccgcgctggcgccgttaatccgtctctcctatggccgtatggtctggatggcgttaccgtacactatcgtactgaccctgatagggctactgtgcgtcgaattcactcttgcgccggccaccgaatggatgactcaggcaggatggttagcaacgctttcgtaa

SEQ ID NO: 37413 - protein, 514 aa, Salmonella typhimurium LT2
MEISWGRAMWRNFLGQSPDWYKLALLVFLIVNPFIFLANPFIAGWLLVAEFIFTLAMALKCYPLLPGGLLAIEAVIIGMTSAAHVREEVAANLEVLLLLMFMVAGIYFMKQLLLFIFTRLLLSIRSKMVLSLAFCVAAAFLSAFLDALTVVAVVISVAVGFYGIYHRVASSRGEENDMLDDSHIDPHYKTVLEQFRGFLRSLMMHAGVGTALGGVMTMVGEPQNLIIAKAAGWHFGDFFLRMSPVTVPVLVCGLLTCMLVEKMRWFGYGETLPEKVRDVLQQFDDQSRKKRTRQDKIKLIVQAIIGVWLVTALALHLAEVGLIGLSVIILATALTGVTDEHAIGKAFTESLPFTALLTVFFSIVAVIIDQHLFAPIIQFVLQASEHAQLTLFYLFNGLLSSISDNVFVGTIYINEAKAAMENGAISLKQFELLAVAINTGTNLPSVATPNGQAAFLFLLTSALAPLIRLSYGRMVWMALPYTIVLTLIGLLCVEFTLAPATEWMTQAGWLATLS

SEQ ID NO: 37414 - DNA, 1542 bp, Shigella flexneri 2a str. 301
  CDS (1)..(1542): transl_table=11
atggagatctcctggggccgcgcgctatggcgcaattttttgggccagtcccccgactggtacaaactcgccctcatcattttcttaatcgtaaacccgttaattttcctcatcagccctttcgtcgcgggctggttgctggtagcggaatttattttcactctggcgatggccctgaaatgctacccgctactccccggtggtctgttggctatcgaagcggtattcatcggcatgaccagcgcggaacacgtccgtgaagaggtggcggcaaatcttgaagtcttgctgttattgatgtttatggtggcgggtatctattttatgaaacagctgttgctgttcatatttacccgtttgctgttaagcattcgctccaaaatgctgctgtcgctctctttttgcgtggcggcagcgttcctctccgcgttcctcgatgccttaaccgtcgtggcggtggtgatcagcgttgcagtcggtttttatggtatttatcatcgcgtagcctcttcccgtaccgaagacaccgacctgcaagacgatagtcatatcgacaagcattacaacgtggttctggaacagttccgtggctttctgcgtagcctgatgatgcatgccggtgtcggcaccgcattaggcggcgtaatgaccatggtgggcgaaccacagaacctgatcatcgctaaagcggctggctggcattttggcgatttcttcctgcgcatgtcgccggtgaccgttccggttctgatttgtggcctgttaacctgcctgctggtagagaagctgcgttggtttggctacggtgaaacgctgccggagaaagtccgcgaagtgttgcaacagtttgacgatcaaagccgccaccagcgtacccgtcaggataaaatccgtctgattgtccaggcgattattggcgtctggctggtgactgcgctggcgttgcatctggcggaagttggcttgattggtttgtcagtcattattctggcaacatcattgaccggtgtcaccgatgaacatgctatcggtaaagccttcaccgaatctctgccattcaccgcactgttgacggtgtttttctcggtagtcgcggtgattatcgaccaacaactgttttcgccgattattcagtttgtgttgcaggcatctgaacatgctcagctgtcgctgttctatattttcaacggtctgctgtcatccatttcggataacgtcttcgtggggacgatttatatcaacgaagcgaaagcggcaatggaaagtggcgctatcacgttgaagcaatacgagctgctggcggtcgccattaataccggtaccaatctgccctctgtcgctacgccgaacggtcaggctgcgttcctgttcctgctgacctctgcactcgcgccattgattcgcctctcttatggccgcatggtgtggatggccctgccttacaccctcgtactgacactcgtcggcttgctctgcgtcgagtttacgcttgcccctgtaaccgaatggtttatgcaaatgggctggatagcaacgctttga

SEQ ID NO: 37415 - protein, 513 aa, Shigella flexneri 2a str. 301
MEISWGRALWRNFLGQSPDWYKLALIIFLIVNPLIFLISPFVAGWLLVAEFIFTLAMALKCYPLLPGGLLAIEAVFIGMTSAEHVREEVAANLEVLLLLMFMVAGIYFMKQLLLFIFTRLLLSIRSKMLLSLSFCVAAAFLSAFLDALTVVAVVISVAVGFYGIYHRVASSRTEDTDLQDDSHIDKHYNVVLEQFRGFLRSLMMHAGVGTALGGVMTMVGEPQNLIIAKAAGWHFGDFFLRMSPVTVPVLICGLLTCLLVEKLRWFGYGETLPEKVREVLQQFDDQSRHQRTRQDKIRLIVQAIIGVWLVTALALHLAEVGLIGLSVIILATSLTGVTDEHAIGKAFTESLPFTALLTVFFSVVAVIIDQQLFSPIIQFVLQASEHAQLSLFYIFNGLLSSISDNVFVGTIYINEAKAAMESGAITLKQYELLAVAINTGTNLPSVATPNGQAAFLFLLTSALAPLIRLSYGRMVWMALPYTLVLTLVGLLCVEFTLAPVTEWFMQMGWIATL

SEQ ID NO: 37416 - DNA, 1602 bp, Shewanella oneidensis MR-1
  CDS (1)..(1602): transl_table=11
atgccgatgacaatgagtcaggcgtttattggaaacttcttagggaactctcctaagtggtacaaaatcgcaatactgtcgtttttaataatcaatccaatactctttttctatgtcagcccctttgtggctggttgggtattagtgcttgagtttatttttactttggcaatggcattaaaatgttatccattgcaacccggcggattgttagccattgaagcggttgcgattggtatgacttcagccagtcaggtgctacatgaaattgaagccaaccttgaagtgttattattgttagtatttatggttgctggcatttacttcatgaagcaactgctgctattcgcgttcactaagatgatcaccaaagtccgttcaaaaatcttagtgtcattgttattttgcttagcttctgcattcttatccgcttttttagatgccctaactgttatcgcagtgattattactgtagccgttggtttttactctatttatcacaaagtggcatcgggtaaagatttctctgcggatcatgaccatacctcagagaataaaaacgaggaaggtgaagaccaactcaatgaagcagaacttgaatccttccgtggcttcttacgtaacttattaatgcacgccggtgttggtactgctttaggtggcgtgtgtacaatggtgggtgaaccacaaaacttaattattgcggcacaagctaactggcagtttggtgagtttgcgattcgtatgtcaccagtcacggtaccagtctttattgcgggcatcttaacctgctacatagtggagaaattccgtatctttggatatggtgctcaacttcctgatgctgttcataaaattctgtgcgattacgatgcgcatgaagatgctcgtcgaaccaataaagataaaatgaagcttattgttcaagccttcattggagtttggttaattgctggtcttgctctgcacttggcttctgttggcttgattggtctgtcagtcatcattttagccactgcatttaacggcataaccgatgaacatgcgctgggtaaagccttcgaagaagccctgccctttaccgcactgttagccgttttcttttccgttgttgctgtgattatcgaccaacaattgtttgctccggtgatccaatgggcactaaaccatgaaggtaatacccaattagtgattttctatattgctaacggtttactctccatggtcagtgataacgtgtttgtagggactgtctacattaacgaagtgaaagcggccttgctcaatggtcaaatcactcgcgatcaattcgacctactggccgtggcaattaacacaggtactaatttaccttctgttgcaacccccaatggtcaagccgccttcctattcttattgacatcagcacttgcaccactgatccgtttgtcctatggcagaatggtatggatggcattgccctacactatcgtcctgtcgattgtgggtgtcatggcgattcaaatcggattcttagaacaaatgacccagtatttctatgactcccacgcaattttacaccacagtgttaaagaagccttagcgccagcgacaggccactaa

SEQ ID NO: 37417 - protein, 533 aa, Shewanella oneidensis MR-1
MPMTMSQAFIGNFLGNSPKWYKIAILSFLIINPILFFYVSPFVAGWVLVLEFIFTLAMALKCYPLQPGGLLAIEAVAIGMTSASQVLHEIEANLEVLLLLVFMVAGIYFMKQLLLFAFTKMITKVRSKILVSLLFCLASAFLSAFLDALTVIAVIITVAVGFYSIYHKVASGKDFSADHDHTSENKNEEGEDQLNEAELESFRGFLRNLLMHAGVGTALGGVCTMVGEPQNLIIAAQANWQFGEFAIRMSPVTVPVFIAGILTCYIVEKFRIFGYGAQLPDAVHKILCDYDAHEDARRTNKDKMKLIVQAFIGVWLIAGLALHLASVGLIGLSVIILATAFNGITDEHALGKAFEEALPFTALLAVFFSVVAVIIDQQLFAPVIQWALNHEGNTQLVIFYIANGLLSMVSDNVFVGTVYINEVKAALLNGQITRDQFDLLAVAINTGTNLPSVATPNGQAAFLFLLTSALAPLIRLSYGRMVWMALPYTIVLSIVGVMAIQIGFLEQMTQYFYDSHAILHHSVKEALAPATGH

SEQ ID NO: 37418 - DNA, 1503 bp, Pseudomonas putida KT2440
  CDS (1)..(1503): transl_table=11
atgtcacgccccctgaccggcgccctcgcccacggttttctgggcaagtcgccgatttggtacaaggtggtcatctgcctgtttttggtgctcaacccgctgttgttggtaaccattggcccggttgcgaccggctgggcactggtgctcgaattcatcttcaccctggccatggccctgaaatgctacccgttgatgcccggtggcttgttgctgatcgaagccctgctgttgcagatgaccacgccacaggcgctgtacgaggaactgcagcacaacttcccggtaatcctgctactgatgttcatggtcgccggcatccacttcatgaaggaactgttgctgttcctgttctcacgcattttgctcggggtgcgttccaaggccattctggcgctgctgttttgcgtactgtcggcgtttctatccgcgtttctcgatgccctgaccgtcacggcggtgatcatcagcgctgcggtcggcttctacgcggtgtaccaccgcgtcgcgtccggggccaatccgcgcgaggacagcgcactggagagcgaccagcaagtcgctcacctgcaccgggaagacctcgaccagttccgcgccttcctgcgtagcctgctgatgcatggcgctgtgggtaccgccctgggcggcgtttgcacgttggtgggcgagccgcagaacctgctgatcggccacgagatggggtggcacttcgtcgacttcttcttgaaggtggcgcccgtatcgctgccagtgctgggtgctggcctggtgacctgcgtgctgctggaaaaagtgcgcctgttcggctacggcacgctgatgcccgaacctgtgcgcagggtgctgaccgcctatgcggccgaagacgatgcggcgcgcacccaggcccagcgcatcgcgctgtgggtacaagggctcgctgcgctgatcctgatcatctgcctggggctgcatgtggccgaggtcggcctgatcggcctgatggtgatcgtactgatcacggccttcaccggcatcaccgacgagcaccgcctcggccgtgccttccaggacgccatgccgttcacttcgctgttggtggtgttcttcgccgtggtcgcggtgattcatcagcagcagctgttcagcccattgatcaactgggtgctggcgctgccggccgaacagcaaccgggcatgctgtacctggccaacggcttgctgtcggcgatcagcgacaatgtgttcgttgccaccatctacatcactgaagtgaagcaggcatttctcgatggcagcatgagccgcgagcatttcgaaaccctggcggtggcgatcaacaccggcaccaacctgccaagcgtggcgacgccgaacgggcaggcggcgttcctgttcctgctgacctcggccattgcgccgctgatccggctgtcgtatgggcggatggtgtggatggcgctgccctataccgtggtgatgggcgggttggggtggtgggcggtgacgtactggctgtga

SEQ ID NO: 37419 - protein, 500 aa, Pseudomonas putida KT2440
MSRPLTGALAHGFLGKSPIWYKVVICLFLVLNPLLLVTIGPVATGWALVLEFIFTLAMALKCYPLMPGGLLLIEALLLQMTTPQALYEELQHNFPVILLLMFMVAGIHFMKELLLFLFSRILLGVRSKAILALLFCVLSAFLSAFLDALTVTAVIISAAVGFYAVYHRVASGANPREDSALESDQQVAHLHREDLDQFRAFLRSLLMHGAVGTALGGVCTLVGEPQNLLIGHEMGWHFVDFFLKVAPVSLPVLGAGLVTCVLLEKVRLFGYGTLMPEPVRRVLTAYAAEDDAARTQAQRIALWVQGLAALILIICLGLHVAEVGLIGLMVIVLITAFTGITDEHRLGRAFQDAMPFTSLLVVFFAVVAVIHQQQLFSPLINWVLALPAEQQPGMLYLANGLLSAISDNVFVATIYITEVKQAFLDGSMSREHFETLAVAINTGTNLPSVATPNGQAAFLFLLTSAIAPLIRLSYGRMVWMALPYTVVMGGLGWWAVTYWL

SEQ ID NO: 37420 - DNA, 1596 bp, Escherichia coli CFT073
  CDS (1)..(1596): transl_table=11
ttgcgtttaaacataaaaacatcattgattatttctaaggtaagggaaaccatcatggagatctcctggggccgcgcactatggcgcaattttttgggccagtcccccgactggtacaaactcgccctcatcattttcttaatcgtaaatccgttaattttcctcatcagccctttcgtcgctggctggttgctggtagcggaatttattttcactctggctatggccctgaaatgctacccgctgctccccggtggtttgttggctatcgaagcagtattcatcggcatgaccagcgcggaacacgtccgtgaagaggtggcggcaaatcttgaagtcttgctgttactgatgtttatggtggcgggtatctattttatgaaacagctgttgctgttcatatttacccgtttgctgttaagcattcgctccaaaatgctgctgtcgctctctttttgcgtggcggcggcgttcctctccgcgttcctcgatgccttaaccgtcgtggcggtggtgatcagcgttgcagtcggtttttatggtatttatcaccgcgtagcctcttcccgtactgaagataccgacctgcaagacgatagtcatatcgacaagcattacaaagtggttctggaacagttccgtggctttctgcgtagtctgatgatgcatgccggtgtcggcaccgcattaggcggcgtgatgaccatggtgggcgaaccacaaaacctgatcatcgctaaagcggctggctggcattttggcgatttcttcctgcgcatgtcgccggtgaccgtcccggttctgatttgtggcctgttaacctgcctgctggtagagaagctgcgttggtttggctacggtgaaacgctgccggagaaagtccgcgaagtgctgcaacagtttgacgatcaaagccgcaaccagcgtacccgtcaggataaaatccgtctgattgtccaggcgattatcggcgtctggctggtgactgcgctggcactgcatctggcagaagtcggtttgattggtttgtcggtcattattctggcgacatcattgaccggtgttaccgatgaacatgctatcggtaaagccttcaccgaatctctgccattcaccgcactgttgacggtgtttttctcagtagtcgcggtgattatcgaccaacaactgttttcgccgattattcagtttgtgttgcaggcatctgaacatgctcagctgtcgttgttctatattttcaacggtctgctgtcatccatttcggataacgtcttcgtggggacgatttatatcaacgaagcgaaagcggcaatggaaagtggcgctatcacgttgaagcaatatgagctgctggcggtcgccattaataccggtaccaatctgccctccgtcgctacgccgaacggtcaggctgcgttcctgttcctgctgacctctgcactcgcgccattgattcgtctctcttatggccgcatggtgtggatggccctgccttacaccctcgtcctgacactcgtcgggctgctctgcgtcgagtttacgcttgctcctgtaaccgaatggtttatgcaaatgggctggatagcaacgctttga

SEQ ID NO: 37421 - protein, 531 aa, Escherichia coli CFT073
MRLNIKTSLIISKVRETIMEISWGRALWRNFLGQSPDWYKLALIIFLIVNPLIFLISPFVAGWLLVAEFIFTLAMALKCYPLLPGGLLAIEAVFIGMTSAEHVREEVAANLEVLLLLMFMVAGIYFMKQLLLFIFTRLLLSIRSKMLLSLSFCVAAAFLSAFLDALTVVAVVISVAVGFYGIYHRVASSRTEDTDLQDDSHIDKHYKVVLEQFRGFLRSLMMHAGVGTALGGVMTMVGEPQNLIIAKAAGWHFGDFFLRMSPVTVPVLICGLLTCLLVEKLRWFGYGETLPEKVREVLQQFDDQSRNQRTRQDKIRLIVQAIIGVWLVTALALHLAEVGLIGLSVIILATSLTGVTDEHAIGKAFTESLPFTALLTVFFSVVAVIIDQQLFSPIIQFVLQASEHAQLSLFYIFNGLLSSISDNVFVGTIYINEAKAAMESGAITLKQYELLAVAINTGTNLPSVATPNGQAAFLFLLTSALAPLIRLSYGRMVWMALPYTLVLTLVGLLCVEFTLAPVTEWFMQMGWIATL

SEQ ID NO: 37422 - DNA, 1587 bp, Vibrio parahaemolyticus RIMD 2210633
  CDS (1)..(1587): transl_table=11
atgccgatatcgctcggaaacgcttttatcaagaatttccttggtaaagcgcctgattggtacaaagttgccattatagccttccttattattaacccgattgttttcttcctaataaatccatttgttgctgggtggttgcttgtcgcggaatttattttcacgcttgcaatggctttaaaatgctacccattacaacctggtggtttacttgcaattgaagctattgctattggcatgaccagcccagcgcaagtaaaacatgagttggttgcgaatatagaagtattactacttttagtattcatggttgcgggtatctacttcatgaaacagcttctgctgttcatcttcaccaaaatcctgcttggtattcgttcaaaaactctgctttcgcttgcattctgtttcgcagccgcgtttttgtcagcattcctagatgcgttgacagtaatcgctgttgtcatcagcgtagcagttggtttctactcgatttaccacaaagttgcttcaggtaacccaattggcgatcacgaccatactcaagacgacaccatcacagaactgactcgtgatgaccttgaaaactatcgtgcattcctacgttcgctgcttatgcacgctggtgtgggtaccgcgctgggcggcgtaacaacgatggttggtgaacctcaaaaccttatcattgcagaccaagcgggttggttatttggtgaattcctaatccgtatgtctcctgtgacgttaccagtatttatctgtggtcttattacttgtgcattggttgagaagctaaaagtatttggttacggcgcaaaactgcctgataacgtacgtcaaatccttgtagactttgaccgcgaagaacgtaagacacgtacaaaccaagacgtcgcaaaactgtgggtacaaggtattatcgccgtttggctgattgtcgcgttagcgcttcacttagcagccgttggcctgattggtctgtctgtcattatcctagcaacgtcatttactggcgtcattgaagagcactcaatgggcaaagcatttgaagaggctctgcctttcacagccctactcgcggttttcttctcgatcgttgcagtaatcattgaccaagagctatttaaacctgttattgacgccgtgttagccgttgaagacaaaggcacacagcttgccctcttctacgttgcgaacggtttgttatcgatggtttcggacaacgtattcgtaggtacggtatacatcaacgaagtgaaatcagcccttatggaaggcttgatcacgcgtgaacagttcgacctgttagcagttgcaatcaacaccggtacaaacttaccttctgttgcaacgccaaacggtcaagccgctttcctattcctactaacgtctgcactagcaccgctaattcgtctgtcttacggtcgaatggtagtgatggcattgccatacactgtcgttttggcaattgtaggtctgatgggcatcatgttcttcctagagccagcaacagcgtctttctacgatgcgggctggattgcacctcataccggtgatctgactccagttgtgtctggcggacactaa

SEQ ID NO: 37423 - protein, 528 aa, Vibrio parahaemolyticus RIMD 2210633
MPISLGNAFIKNFLGKAPDWYKVAIIAFLIINPIVFFLINPFVAGWLLVAEFIFTLAMALKCYPLQPGGLLAIEAIAIGMTSPAQVKHELVANIEVLLLLVFMVAGIYFMKQLLLFIFTKILLGIRSKTLLSLAFCFAAAFLSAFLDALTVIAVVISVAVGFYSIYHKVASGNPIGDHDHTQDDTITELTRDDLENYRAFLRSLLMHAGVGTALGGVTTMVGEPQNLIIADQAGWLFGEFLIRMSPVTLPVFICGLITCALVEKLKVFGYGAKLPDNVRQILVDFDREERKTRTNQDVAKLWVQGIIAVWLIVALALHLAAVGLIGLSVIILATSFTGVIEEHSMGKAFEEALPFTALLAVFFSIVAVIIDQELFKPVIDAVLAVEDKGTQLALFYVANGLLSMVSDNVFVGTVYINEVKSALMEGLITREQFDLLAVAINTGTNLPSVATPNGQAAFLFLLTSALAPLIRLSYGRMVVMALPYTVVLAIVGLMGIMFFLEPATASFYDAGWIAPHTGDLTPVVSGGH

SEQ ID NO: 37424 - DNA, 1545 bp, Salmonella enterica subsp. enterica serovar Typhi Ty2
  CDS (1)..(1545): transl_table=11
atggagatctcatggggtcgcgccatgtggcgcaactttttaggccagtcgcccgactggtacaaactggcactacttgtctttttaattgttaacccattcattttcttagctaatccctttgttgctggttggctgctggtggcagagtttatcttcaccctggcgatggcgttaaagtgttaccccctgctgcccggcgggttactggccattgaagccgttatcatcggcatgaccagcgccgcccatgtacgtgaagaggttgccgccaacctggaagtcttgctgctgctgatgtttatggtggcaggcatctactttatgaagcagttattgctgtttatttttacccgtctgttactcagtatccgctcgaagatggttctgtcgctggccttttgcgtcgccgccgcattcttgtcggctttccttgacgcgcttaccgtcgttgcggtggtgatcagcgtcgccgtcggtttttacgggatttaccatcgtgtggcctcatcgcgcggcgaagagaacgatatgctggacgacagccatatcgatccgcattacaaaacggtgctggagcaattccgcggattcttgcgtagtctgatgatgcatgcaggcgtggggacggcgctgggcggcgtcatgaccatggtcggggagccgcaaaacctgatcatcgctaaagctgctggctggcatttcggcgacttctttttgcggatgtcgcctgtcaccgtcccggtactggtatgtggactgttaacctgtatgctggtcgagaaaatgcgctggtttggctatggcgaaacgttgcccgaaaaagtccgcgacgtcttgcagcaattcgacgatcaaagccgtaagaagcgcacccgccaggataaaattaaactaatagtccaggcggttattggcgtctggctggttaccgccctcgccctccatctcgcggaggtgggactgattggtctgtcggtcattattctggccaccgcgttaacgggtgtcaccgatgaacacgccatcggcaaagcgtttaccgagtcgctgccgtttactgcgctgttaaccgttttcttctctattgtggcggttattatcgatcaacatcttttcgcgccgattattcagttcgtcttgcaagcctctgaacacgcacagctaacgctgttctatctctttaacggcctgttgtcttccatctcagataacgtctttgtcggcaccatttatatcaacgaagcgaaggcggcaatggaaaacggcgcaatcagcttaaaacagtttgagctgctagctgtggccatcaataccggtactaacctgccatcggtagcgacgccaaatggtcaggcggcattcttattcctgctgacctccgcgctggcgccgttaatccgtctctcctatggccgtatggtctggatggcgttaccgtacactatcgtactgaccctgatagggctactgtgcgtcgaattcactcttgcgccggccaccgaatggatgactcaggcaggatggttagcaacgctttcgtaa

SEQ ID NO: 37425 - protein, 514 aa, Salmonella enterica subsp. enterica serovar Typhi Ty2
MEISWGRAMWRNFLGQSPDWYKLALLVFLIVNPFIFLANPFVAGWLLVAEFIFTLAMALKCYPLLPGGLLAIEAVIIGMTSAAHVREEVAANLEVLLLLMFMVAGIYFMKQLLLFIFTRLLLSIRSKMVLSLAFCVAAAFLSAFLDALTVVAVVISVAVGFYGIYHRVASSRGEENDMLDDSHIDPHYKTVLEQFRGFLRSLMMHAGVGTALGGVMTMVGEPQNLIIAKAAGWHFGDFFLRMSPVTVPVLVCGLLTCMLVEKMRWFGYGETLPEKVRDVLQQFDDQSRKKRTRQDKIKLIVQAVIGVWLVTALALHLAEVGLIGLSVIILATALTGVTDEHAIGKAFTESLPFTALLTVFFSIVAVIIDQHLFAPIIQFVLQASEHAQLTLFYLFNGLLSSISDNVFVGTIYINEAKAAMENGAISLKQFELLAVAINTGTNLPSVATPNGQAAFLFLLTSALAPLIRLSYGRMVWMALPYTIVLTLIGLLCVEFTLAPATEWMTQAGWLATLS

SEQ ID NO: 37426 - DNA, 1542 bp, Haemophilus ducreyi 35000HP
  CDS (1)..(1542): transl_table=11
atgaatagctctaatgctatctttaaaacgtttttaggcagcgcgcctgaatggtataagttatgtattattacctttctggtgataaatccattaatttacttctttgtcagtccatttattgctggttggacactagtcgctgaatttatctttacactttcaatggcattaaaatgttatccattacaacctggtggtttacttgcaattgaagccgttgcaatcggtatgacttcacctcaccacgtgaaacatgagattatagcgaactttgaagttattttattattaatgtttatggttgccggtatttactttatgaagcaactgcttttatatgtatttactaaattgctaattgtaattcgttctaaaaaagtactttcgctttcattttgtttaagcgctgcatttttgtccgctttcttggatgccttaacggttattgccgtaattatcagcgtaggaaccggtttttatggtgtttaccataaagtcgcttctggcagtacctttgaagattctactgatattagtaacgacgataagattattaccaataaaaagattcttgaacaattccgtgcttttttgcggagtttattgatgcacgcagccgtaggcagtgcattaggtggtgtaatgacaatggttggcgaaccacaaaatttaattattgcaagccaagcagaatggggattcattgagtttttaatccgtgtagcaccggtcagtttacccgtattaatttgtggtattgcaacgtgtttattactcgaacattttaaagtctttgggtatggtgaacgtttaccacgtcgtgtttggggcgtgcttgcacgttataatgtattgcaagaacaacatatgactaaacaagatcgggtaaaaatggctatccaagcgcttgcaggtatttggttaattgttggtttagcattacatcttgctgatgttgggattatcgggctgacgattattattatctgtacagctttttgtggcattactgatgaacacgcaatcggccgttctttccaagaaccaatgccttttactgccctaattgtagtattctttactattgttgccgttattgtggatcttaaattatttgaacccattattaattttgtcttatcggcagatccgcattctcaattggcattattctatgttttcaatggcttattatcgatgatctcagataatgttttcgttggcactgtctatatgaatgagactaaagcggcattaacgtctggctttatcagccgtgaacagtttgatttaatcgcagtcgccatcaataccggtactaatctaccgtctgttgccacaccaaatggacaagctgcattcttattcttacttacttcaccattcgcaccattaattcgtctttcatatagtagaatgatatatatggcattaccttatacgatagtattgtctatcgttggtttctttgccttagaatatttacttccaccgcttaccgagttaatgactaattggggctggttaattgcacgctaa

SEQ ID NO: 37427 - protein, 513 aa, Haemophilus ducreyi 35000HP
MNSSNAIFKTFLGSAPEWYKLCIITFLVINPLIYFFVSPFIAGWTLVAEFIFTLSMALKCYPLQPGGLLAIEAVAIGMTSPHHVKHEIIANFEVILLLMFMVAGIYFMKQLLLYVFTKLLIVIRSKKVLSLSFCLSAAFLSAFLDALTVIAVIISVGTGFYGVYHKVASGSTFEDSTDISNDDKIITNKKILEQFRAFLRSLLMHAAVGSALGGVMTMVGEPQNLIIASQAEWGFIEFLIRVAPVSLPVLICGIATCLLLEHFKVFGYGERLPRRVWGVLARYNVLQEQHMTKQDRVKMAIQALAGIWLIVGLALHLADVGIIGLTIIIICTAFCGITDEHAIGRSFQEPMPFTALIVVFFTIVAVIVDLKLFEPIINFVLSADPHSQLALFYVFNGLLSMISDNVFVGTVYMNETKAALTSGFISREQFDLIAVAINTGTNLPSVATPNGQAAFLFLLTSPFAPLIRLSYSRMIYMALPYTIVLSIVGFFALEYLLPPLTELMTNWGWLIAR

SEQ ID NO: 37428 - DNA, 1548 bp, Photorhabdus luminescens subsp. laumondii TTO1
  CDS (1)..(1548): transl_table=11
atggaaaccagtatcctaaaaacagcggtaaaaaactttctcggcaactcgccagattggtataagctcgctatcatcatctttctcatcatcaacccattgatattcttttttattaatccatttgtcacaggctggctgcttgttatcgaatttatctttacgttagcaatggcacttaaatgttacccgttacaaccgggtggcctgttggcaattgaagcggtcatcatcggcatgacctccccgcaacaagtcggtcatgaaattgctaataacttggaagttgtactgttactgatatttatggtcgcaggaatttactttatgaagcaattactattatttgctttcactaaactcctgctctccataaaatctaaacgtatgcttgccttagcattctgcctagccagcgcattcctgtcagcatttcttgatgctctgacagttatcgcggtagttattagtgtttcccttggcttctattctatctacaacaacttcattactgatcagaatgatgtcattaacgctaaacatgacaatcacattgatacagcaaaaaagaaacaaactcttgaacagtttcgcgcttttttgcgcagtctaatgatgcatgcaggggtaggcactgcacttggtggtgtgatgacgatggtaggagaaccccaaaatctgattatcgccaaaaacgttaattgggattttgtcaccttctttattcgcatggctccaattaccctacctgtctttatctgcgggctactagtctgttttctggtcgaacactttaaactgttcggttatggtacagaattgccagaacgcgtccgacaggtattggaagattacgataaaaaaaccagcgcaaaacgaacacataaagaaaaagcacagcttattgctcaagcgctaatcggtatatggctcattgtcgcgctggcgtttcatctggcagaagttggtctgattggcctttccgtcattattctaaccacgtcgttctgtggtattaccgaagaacatgcactgggtaaggcatttgaagaggcactaccgttcacggcattactgactgtattcttttctatcgttgccgtcattgttgaccagcaactgtttacgccatttattcagttcgtattacaggtttctgaaacttctcaactttccctgttctatctgttcaatggcttactctcatcagtatcagataacgtatttgtcggtacggtttatatcaatgaagcaagaactgcgatgcaagagggcctgatttcacataaacaatttgaatatctggctgttgcgattaataccggcacaaacctgccttccgttgccacacctaacggacaagctgcatttctattcctgttgacgtcgacattatcgccattgattcgtttatcttatggccgcatggtgataatggcactaccttataccattgtcatgacgctggtcggtttgctgtgtgtagaatttctgctaattccagtcactgacatgatggttcattggggcctaattgctttgccataa

SEQ ID NO: 37429 - protein, 515 aa, Photorhabdus luminescens subsp. laumondii TTO1
METSILKTAVKNFLGNSPDWYKLAIIIFLIINPLIFFFINPFVTGWLLVIEFIFTLAMALKCYPLQPGGLLAIEAVIIGMTSPQQVGHEIANNLEVVLLLIFMVAGIYFMKQLLLFAFTKLLLSIKSKRMLALAFCLASAFLSAFLDALTVIAVVISVSLGFYSIYNNFITDQNDVINAKHDNHIDTAKKKQTLEQFRAFLRSLMMHAGVGTALGGVMTMVGEPQNLIIAKNVNWDFVTFFIRMAPITLPVFICGLLVCFLVEHFKLFGYGTELPERVRQVLEDYDKKTSAKRTHKEKAQLIAQALIGIWLIVALAFHLAEVGLIGLSVIILTTSFCGITEEHALGKAFEEALPFTALLTVFFSIVAVIVDQQLFTPFIQFVLQVSETSQLSLFYLFNGLLSSVSDNVFVGTVYINEARTAMQEGLISHKQFEYLAVAINTGTNLPSVATPNGQAAFLFLLTSTLSPLIRLSYGRMVIMALPYTIVMTLVGLLCVEFLLIPVTDMMVHWGLIALP

SEQ ID NO: 37430 - DNA, 1590 bp, Vibrio vulnificus YJ016
  CDS (1)..(1590): transl_table=11
atgccgatgtcgctcggaaacgcttttattaagaattttcttggtaaagcgcctgattggtataaagttgccatcatttcttttttaatcattaacccgattgttttcttcttcgttgacccatttgtagcaggctggctactcgtcgtggaatttattttcaccttggcaatggcgctcaaatgttatcctcttcaacctggtggtttattagccattgaagccatcgcgattggcatgactagccctgaacaggttaagcatgagctcgtcgccaatatcgaagtgttgttgttactggtcttcatggtcgctggcatctacttcatgaagcagttgctactcttcattttcaccaagatattgcttggcattcgctctaaagcgattttgtctttagcgttttgttttgccgcggcctttctttccgctttcttagacgcactgaccgttatcgcggttgttatcagcgttgccgtgggtttttattcgatctaccacaaagtggcatcgggtaagggcgtcagttccgatcatgaccatacacaagacgatcatcttgccgagctgactcgtgacgacttagaaaactaccgcgcatttttacgctcactgctcatgcatgcgggtgttggtactgcgctcggtggcgtgacgaccatggtaggtgaacctcaaaacttgatcattgcagaccaagcaagttggttgtttggtgagttcttgattcgcatggctccagttacgcttcctgttttcgtctgtggtttgctcacctgttttgcggtcgaaaaacttaaggtgtttggctacggcgctgaactacctgataacgttcgtcatatccttgtcgaattcgacaaagaagaacgcaaggctcgtaccaaccaagatgtggccaaactttggattcaaggtcttatcgccgtatggctgattgtcggcctcgcactgcacttggccgcggtaggtttgatcggtttgtccgtcatcatcctagccacagccttcactggtgtgattgaagaacactcactcggtaaagcgtttgaagaagcactgccatttacggcacttcttgcggttttcttctctatcgtggcggtaatcatcgaccaagagttgtttaagcctgttatcgatgcagttctcgcggtggaagacaaaggcacgcagttggcgatgttctacgtggcaaacggtttgctttcgatggtgtctgacaacgtgttcgtcggtacggtttacatcaacgaagtcaaaactgcgctagtagaaggcattattacacgtgaccagtttgatttgctggccgtggcgatcaacacaggaactaacttgccatcagtggcaacaccaaacggccaagcggcgttcctatttttgttgacttcagcactagcaccattgattcgtctgtcttacggcaagatggtgatcatggctctgccatacacgattgtactggctctggttggcttgtttggcatcgtcttcttacttgagcctatgacaacttggttttacgacgcaggttggattgctcaccatgtgggtgaggcaactcacgcagtttccggcggacattaa

SEQ ID NO: 37431 - protein, 529 aa, Vibrio vulnificus YJ016
MPMSLGNAFIKNFLGKAPDWYKVAIISFLIINPIVFFFVDPFVAGWLLVVEFIFTLAMALKCYPLQPGGLLAIEAIAIGMTSPEQVKHELVANIEVLLLLVFMVAGIYFMKQLLLFIFTKILLGIRSKAILSLAFCFAAAFLSAFLDALTVIAVVISVAVGFYSIYHKVASGKGVSSDHDHTQDDHLAELTRDDLENYRAFLRSLLMHAGVGTALGGVTTMVGEPQNLIIADQASWLFGEFLIRMAPVTLPVFVCGLLTCFAVEKLKVFGYGAELPDNVRHILVEFDKEERKARTNQDVAKLWIQGLIAVWLIVGLALHLAAVGLIGLSVIILATAFTGVIEEHSLGKAFEEALPFTALLAVFFSIVAVIIDQELFKPVIDAVLAVEDKGTQLAMFYVANGLLSMVSDNVFVGTVYINEVKTALVEGIITRDQFDLLAVAINTGTNLPSVATPNGQAAFLFLLTSALAPLIRLSYGKMVIMALPYTIVLALVGLFGIVFLLEPMTTWFYDAGWIAHHVGEATHAVSGGH

SEQ ID NO: 37432 - DNA, 1581 bp, Erwinia carotovora subsp. atroseptica SCRI1043
  CDS (1)..(1581): transl_table=11
atgatcgccatgcccctccaccgtgcgctgttaaaaaatttcctaggatacgcgccagactggtacaaactgactatttttggtttcctgctgattaatccactgctgttctattttgtcagcccgttttgggccggttggttattggtcgtggagtttatttttacgctcggcatggcgctgaaatgttatccgctacagcctggtggtctgctggcactacaggcgatactcatcggcatgaccagcccacagcaggtgtggcatgaagtcacagggaatattgaagttctcatgctgttggtgtttatggtggcaggcatctacttcatgaagcaactgctgctttttgtgtttaccaaactgctgctgcgcatccattctaaacccctgctctcactcgccttttgcatggcggctgcgtttctctccgcctttttagacgcattgactgtgattgccgtcatcatcagcgtcgctatcgggttttatggtatttatcaccgtttcgcctctcagcaaggtgaagacgaggccgatatcagcgatgatagcgcgttaaacggcgaggaacatcatcgtacgctggaccaattccgtgcatttctacgtagcctgatgatgcatgcaggcgtcggtacagcactgggcggggtgatgacgatggtcggcgaacctcagaatctgattattgcgaaaagcgcaggctgggatttcgtcgactttttcctgcgcatgtcaccggtaaccgtacctgtctttatttgcggtatcctgacctgcgtgctggtcgaacgcttcaagctattcggttatggggtaaacctgccggacaacgtgcgccgcgtacttgaggattacgatcgggacatgacagaaaagcgcacgcagcaggataaagtgcgtttactcgtgcaggcagtgattggcgtctggctcattatcgcgctggcgtttcatttggctgaggtcggattgattggcctctccgtgattattatggccacaacgttctgtggcgtgaccgaagaacacgctatcggtaaagcatttcaagatgctatgccgtttaccgcactgctgacggtcttttttgccatcgtcgccgtcattatcgatcagcaactgttctcaccgattatccattacgtcctgcaatcttctgatagtgcccaactgacacaattttatctgttcaatggcctgctatcgtcgatatcggataacgtatttgttggatcggtttatatcaacgaagcgcgtaatgcgtttgagagcggcaaaatatccttaccccaatttgaactactcgccgtggcgattaataccggcactaatctgccttccgtcgccacaccaaatgggcaagccgcgtttctattcctgctgacatcctcgctagctccgcttatccgcctgtcttatgggcgcatggtaatcatggcactgccttacaccattgtgatgacgctggtcgggttgctttgcgttgagttcacgctggtgccgttcaccgattttttgatgaataatcactggatttctttgccaaatttgaccatatcgggcagtcacgcataa

SEQ ID NO: 37433 - protein, 526 aa, Erwinia carotovora subsp. atroseptica SCRI1043
MIAMPLHRALLKNFLGYAPDWYKLTIFGFLLINPLLFYFVSPFWAGWLLVVEFIFTLGMALKCYPLQPGGLLALQAILIGMTSPQQVWHEVTGNIEVLMLLVFMVAGIYFMKQLLLFVFTKLLLRIHSKPLLSLAFCMAAAFLSAFLDALTVIAVIISVAIGFYGIYHRFASQQGEDEADISDDSALNGEEHHRTLDQFRAFLRSLMMHAGVGTALGGVMTMVGEPQNLIIAKSAGWDFVDFFLRMSPVTVPVFICGILTCVLVERFKLFGYGVNLPDNVRRVLEDYDRDMTEKRTQQDKVRLLVQAVIGVWLIIALAFHLAEVGLIGLSVIIMATTFCGVTEEHAIGKAFQDAMPFTALLTVFFAIVAVIIDQQLFSPIIHYVLQSSDSAQLTQFYLFNGLLSSISDNVFVGSVYINEARNAFESGKISLPQFELLAVAINTGTNLPSVATPNGQAAFLFLLTSSLAPLIRLSYGRMVIMALPYTIVMTLVGLLCVEFTLVPFTDFLMNNHWISLPNLTISGSHA

SEQ ID NO: 37434 - DNA, 1575 bp, Yersinia pseudotuberculosis IP 32953
  CDS (1)..(1575): transl_table=11
atggacattaccaacagacaagctgtactcaagaattttcttggtaactctccggattggtacaaactagcaattatggggttcttgatcattaaccctctagtcttcttctttgtcagcccctttgtcgcgggctggatgctggttatcgagtttatctttaccttagccatggcgctgaaatgttacccgctgcaaccggggggtttgctcgctattcaagccgttgccatcggcatgaccagcccgcatcaagttgcagaagagatcgccaataacctggaagtcctcttgcttttagtatttatggtggccggcatctactttatgaaacagctgctgctgtttgtatttacgaaattgctgttgaatattcggtcaaaaactatcctttccctggccttttgtctggcgtcagccttcctatcagcatttttggatgccttaaccgtaatcgcggtagttatcagcgtatccgttggtttttatactatttatcataacgttacttcaaatcacagtgacaaagatattactgatgacagcggaatcgataatcaggacagccatgaaacattagagcaattccgggcatttttacgcagtctgatgatgcatgctggcgtgggtaccgctctggggggcgtcatgacaatggttggtgagcctcagaatttgattattgccaaaagcgcgggttggaattttgctgacttctttattcgcatgttacccgtcaccttacccgtctttattttcgggttattggtctgcttgctggtcgaaaaatttaaactgtttggttatggtgcccagttgccagaacgtgtgcgtcaggttctgaccgaatacgatcagcaagccagtgcgaaacggaccaagcaagagaagatgaagttaatagtacaagccattattggtgtctggttggtattggcactggcactccatttagctgaagtcggtttggtcgggctatccgttattattctcgccacctcattttgtggtatcacaaatgagcattcattgggcaaagcctttcaggaagccttgccgtttaccgcgctgctaaccgtattttttgccgtggtcgcggttattattgaacaaagcctctttacccccattattcagtttgttttacaagcctcgccttccgctcagctatcgctgttttatctgtttaatggcttgctctcatcggtgtcagacaatgtttttgtcggtaccgtgtatatcaatgaggcccgttctgcgtttgagcatggtattgtctcgttacaacaatttgaattgttggcggtcgccatcaatacagggaccaacctcccctccgtggcgacaccaaacggccaggccgctttcttgttcctgctgacttcggcattggcaccactaattcgcctttcctatgggcgaatggtatatatggctttgccttatactctagtgatgacgattgttggcctgctgggtgtcgagtttttattggtaccgatgacagagtggctgactcaggctggatggatcagtttgccacacatcacaaacggggttgccatcccacactga

SEQ ID NO: 37435 - protein, 524 aa, Yersinia pseudotuberculosis IP 32953
MDITNRQAVLKNFLGNSPDWYKLAIMGFLIINPLVFFFVSPFVAGWMLVIEFIFTLAMALKCYPLQPGGLLAIQAVAIGMTSPHQVAEEIANNLEVLLLLVFMVAGIYFMKQLLLFVFTKLLLNIRSKTILSLAFCLASAFLSAFLDALTVIAVVISVSVGFYTIYHNVTSNHSDKDITDDSGIDNQDSHETLEQFRAFLRSLMMHAGVGTALGGVMTMVGEPQNLIIAKSAGWNFADFFIRMLPVTLPVFIFGLLVCLLVEKFKLFGYGAQLPERVRQVLTEYDQQASAKRTKQEKMKLIVQAIIGVWLVLALALHLAEVGLVGLSVIILATSFCGITNEHSLGKAFQEALPFTALLTVFFAVVAVIIEQSLFTPIIQFVLQASPSAQLSLFYLFNGLLSSVSDNVFVGTVYINEARSAFEHGIVSLQQFELLAVAINTGTNLPSVATPNGQAAFLFLLTSALAPLIRLSYGRMVYMALPYTLVMTIVGLLGVEFLLVPMTEWLTQAGWISLPHITNGVAIPH

SEQ ID NO: 37436 - DNA, 1548 bp, Mannheimia succiniciproducens MBEL55E
  CDS (1)..(1548): transl_table=11
atgagtggctacacagcattttttaacaattttctaggaaaaagtccaaattggtataaattatctattatcgttttccttattttaaaccctattttatattttttgatcagtccctttatcgcaggttggtgtttagtcattgagtttatcttcactttagccatggcgttgaaatgttatccgttgcaaccgggcggtttattggcttttgaagctatcgccattggtatgacaagtccggctcatgtaaaagcggaaatcatggcaagttttgaagtaatcctattattaatgttcatggttgccggcatttacttcatgaaacaactactgctgtttgcattcaccagattattaattaccgttcgttcaaaaatagttttatctctttctttctgtttaagtgcggcatttttatcggcatttttagacgcattaactgttgtcgctgtaatcatcagcgtagtaatgggattttacggtgtttatcacaaagttgcctcaggtaataattttgatgattcaacggatatcactaacgatgaaaaaatcaaaaaagatcagcaggtgctggaacaattccgtagttttttacgcagcctaatgatgcatgctggcgtgggtacggctctcggtggcgtaatgaccttagtgggtgaaccgcaaaacttaattattgccgagcaagcaagctggggcttcggtgagttctttattcgcatggcaccggttactgttcccgtattaatctgcggtttgatcacttgtgtgatgatagaaaaaatgaacattttcggttatggagataaacttcctcgtaaagtttgggggatccttgccaaatttaatcgtgcccaacaacaaaaaatgaatcgacaagaaagacaaaaattgattattcaaggtattatcggtatctggctggtatgcggtttagcctttcacttagcggctgtcggcttaatcggtttgagcgttatcgtattaaccactgcattttgcggtattacctcggaaagtaccattggtaaatcatttcaagaatctcttccattctgtgcattattggtcgtattcttttccgtcgtcgccgtcattatagaccaacatctttttggtccgatcatcaattacgtgttatccgcaagcgaaagcacccaattactgctcttctatgggtttaacggattactttccgccatctccgataacgttttcgtagcaaccgtttacattaatgaagcgaaaaatgcgttacatgccggtattatttcattagaacaattcgaactgcttgcggtagccattaacacaggtacgaacttaccttccgttgcaacgccaaacggacaagcggcgtttttgtttctgttaacatcttctttagcaccgttaatccgcttatcttatggtaaaatggtttatatggcactcccttatacaattgtgcttacagttgtaggtttattggcagtggaatatattcttcccggcgcaacaaaatactttagcagcttaggctggattactgcgttaccggtataa

SEQ ID NO: 37437 - protein, 515 aa, Mannheimia succiniciproducens MBEL55E
MSGYTAFFNNFLGKSPNWYKLSIIVFLILNPILYFLISPFIAGWCLVIEFIFTLAMALKCYPLQPGGLLAFEAIAIGMTSPAHVKAEIMASFEVILLLMFMVAGIYFMKQLLLFAFTRLLITVRSKIVLSLSFCLSAAFLSAFLDALTVVAVIISVVMGFYGVYHKVASGNNFDDSTDITNDEKIKKDQQVLEQFRSFLRSLMMHAGVGTALGGVMTLVGEPQNLIIAEQASWGFGEFFIRMAPVTVPVLICGLITCVMIEKMNIFGYGDKLPRKVWGILAKFNRAQQQKMNRQERQKLIIQGIIGIWLVCGLAFHLAAVGLIGLSVIVLTTAFCGITSESTIGKSFQESLPFCALLVVFFSVVAVIIDQHLFGPIINYVLSASESTQLLLFYGFNGLLSAISDNVFVATVYINEAKNALHAGIISLEQFELLAVAINTGTNLPSVATPNGQAAFLFLLTSSLAPLIRLSYGKMVYMALPYTIVLTVVGLLAVEYILPGATKYFSSLGWITALPV

SEQ ID NO: 37438 - DNA, 1569 bp, Haemophilus influenzae 86-028NP
  CDS (1)..(1569): transl_table=11
gtgataaaaataatggagttcactatgacaaacattcaggcttttatgaaaaactttcttggggcaagtccagaatggtacaaacttgccattgtggtttttcttattataaatccaattgttttcttttttattagtccttttattgcgggttggttactggttgcagaatttattttcacattggcaatggcattaaaatgctaccctcttcaaccaggtggtctattagcaattgaagctattattattggaatgacaaatgccaaacacgtcaaagcagaaattatggcaaactttgaagtgatcttgctactgatatttatggtggcaggtattttctttatgaaacaattactgctttatgtatttactaaattacttgtcaaaattcgttctaaaattgcactttctattgccttttgttttagtgctgcttttttatcggcttttctcgatgctttaacggttgttgctgttatcattagtgtcgcaatgggattttatggtgtgtatcacaaagttgcatcaggcaataatttaattgatgcggttgatatttcagacgatagaaaaattattgaacaacagcacgaaatcttagaaaaattccgtgcattcttacgtagtttaatgatgcatgcgggtgtaggaactgcactcggtggtgtaatgaccgttgttggagaaccacaaaacttaattattgcagaacaagcaaaatggaactttatggaatttttcctccgtatggcacccgtgactattcctgtgtttatctgcggattactcacttgtttcttggtcgaaaaattcaaattatttggttatggcgagaaattaccagacgaagtgtggaaagtcttatcagacttagatcgcactaattcagaaaaaatgtctaaacaagataaaattaaattaggtatgcaagcgttaatcgcaatttggttaattcttggattagcattccatcttgccgcagtcggtttaattggtttaagtatcatcatttttgctacgtctttcactggtgtgacggatgaacatactatcggtaaagcctttcaggaatctttaccctttactgcattgctcgttgtattcttttctgttgttgcagtaattattgatcaaaaacttttttcaccaattattcacttcgttctttctgcggaagaaaatacacaacttgctttattctatttgtttaatggcttgctttcttctatttctgataatgtatttgttgcaacggtttatattaatgaagctaaagctgcactgacaaatggagtaattgcaccgcatcaatttgaattgctttctgttgccattaatacaggtacaaacttaccatcagttgcaacaccaaatgggcaagctgctttcttattcttattgacttcatcaatttcgccattaattcgcctttcttatggcagaatggtttatatggctttaccttacacgattgtactttcaatcattggtttactggctattgaatttattttaccagctgccacaatttggttagcaagtttaggtttaattttgccaatttaa

SEQ ID NO: 37439 - protein, 522 aa, Haemophilus influenzae 86-028NP
MIKIMEFTMTNIQAFMKNFLGASPEWYKLAIVVFLIINPIVFFFISPFIAGWLLVAEFIFTLAMALKCYPLQPGGLLAIEAIIIGMTNAKHVKAEIMANFEVILLLIFMVAGIFFMKQLLLYVFTKLLVKIRSKIALSIAFCFSAAFLSAFLDALTVVAVIISVAMGFYGVYHKVASGNNLIDAVDISDDRKIIEQQHEILEKFRAFLRSLMMHAGVGTALGGVMTVVGEPQNLIIAEQAKWNFMEFFLRMAPVTIPVFICGLLTCFLVEKFKLFGYGEKLPDEVWKVLSDLDRTNSEKMSKQDKIKLGMQALIAIWLILGLAFHLAAVGLIGLSIIIFATSFTGVTDEHTIGKAFQESLPFTALLVVFFSVVAVIIDQKLFSPIIHFVLSAEENTQLALFYLFNGLLSSISDNVFVATVYINEAKAALTNGVIAPHQFELLSVAINTGTNLPSVATPNGQAAFLFLLTSSISPLIRLSYGRMVYMALPYTIVLSIIGLLAIEFILPAATIWLASLGLILPI

SEQ ID NO: 37440 - DNA, 1503 bp, Pseudomonas fluorescens Pf-5
  CDS (1)..(1503): transl_table=11
atgtccggttcaatggcccaggcgttcgcccacaattttctcggccaatcaccccgctggtacaaggcaagcattgtcgcgttcctgttgctcaaccctccgctgttcttcgctgtcagcccggccgccgccggctggtgcctggtgatcgaattcatcttcaccctggccatggccctcaagtgctaccccttgatgcccggcggcctgctgctggtgcaggcactggtgctgggcatgaccacgccccaggcgctgtatgacgagctggtgcacaacttcccggtgatcctgctgctgatgttcatggtggccggcatctacttcatgaaggagttgctgctctacctgttctcccggctgctgctgggggtgcgctccaaggcgctgctgggcctgctgttctgctttctctcggccttcctctcggcctttctcgacgccctgaccgtcaccgcggtgatcatcagcgccgcggtaggcttctattcggtgtatcaccgggtggcgtccggcaatgacccgcgccaggacagcgccttcgccgacgaccaacagttgcctgccctgcatcatgacgacctggagcagttccgcgccttcctgcgcagcctgctgatgcatggcgccgtgggcaccgccctgggcggtgtgtgcaccctggtgggggaaccgcagaacctgctgatcggccatgaaatgggctggcacttcgccgatttcttcagcaaggtggcaccggtttcgatgccggtcctggcggctggcctggtgacctgcgtactgctggagaagctgcgctggttcggctacggcaccctgctgccggacaacgtgcgccaggtgctggccaactacgccgccgaggacgatgcccagcgcacctcgcgccagcgcgcggccctgctggtgcaggggctggcggcactgatcctgatcgtcgccctggccctgcatgtggccgaggtcgggctgatcggcctgctggtgatcgtactgatcaccgcctttaccgggatcaccgacgagcaccgcctgggcaacgcgttcaaggacgccatgcccttcaccgccctgctggtggtgttctttgcggtggtggcggtgattcaccagcagcagctgttcaccccgttgatccagtgggtgctggcgctgccggcggaccagcagccgggcatgctgttcattgccaatggcctgctctcggccatcagcgacaatgtgttcgtggccaccatctacatcaccgaagtgaaacaggccttcatctccgggcagatgagccgcgagcacttcgaaaccctggcgatcgccatcaataccggtaccaacctgccgagcgtggccacgcccaacggccaggcggccttcctgttcctgctgacctcggcgattgcgccgctggtacgcctgtcctacggacggatggtgtggatggccctgccctacaccgtggtgatggggctgctgggctggtacgcggtgagctactggttgtaa

SEQ ID NO: 37441 - protein, 500 aa, Pseudomonas fluorescens Pf-5
MSGSMAQAFAHNFLGQSPRWYKASIVAFLLLNPPLFFAVSPAAAGWCLVIEFIFTLAMALKCYPLMPGGLLLVQALVLGMTTPQALYDELVHNFPVILLLMFMVAGIYFMKELLLYLFSRLLLGVRSKALLGLLFCFLSAFLSAFLDALTVTAVIISAAVGFYSVYHRVASGNDPRQDSAFADDQQLPALHHDDLEQFRAFLRSLLMHGAVGTALGGVCTLVGEPQNLLIGHEMGWHFADFFSKVAPVSMPVLAAGLVTCVLLEKLRWFGYGTLLPDNVRQVLANYAAEDDAQRTSRQRAALLVQGLAALILIVALALHVAEVGLIGLLVIVLITAFTGITDEHRLGNAFKDAMPFTALLVVFFAVVAVIHQQQLFTPLIQWVLALPADQQPGMLFIANGLLSAISDNVFVATIYITEVKQAFISGQMSREHFETLAIAINTGTNLPSVATPNGQAAFLFLLTSAIAPLVRLSYGRMVWMALPYTVVMGLLGWYAVSYWL

SEQ ID NO: 37442 - DNA, 1500 bp, Saccharophagus degradans 2-40
  CDS (1)..(1500): transl_table=11
atgccgcagtccatgactaacgcgttttggcacaattttctgggccacaccccaaattggtataagaaaacaattttaggtttcttggttatcaatattgttctctcccaagttagtccttttttggctggttgggcgctaattattgagttcatttttactcttgctatggctctcaagtgctaccctttgcagccgggcggcttattggccattcaagctgtgctacttgggctaaccagcgcagactcggtataccatgaagtactcgccaactttaaagtaattctgctacttatgtttatggtggcaggcatctactttatgaaggacatgcttcttttcgtgtttaccaagatcttgcttggtattcgctcgaaactgcttctctctttattgttctcatttgttgcagcagtgctttctgcctttttagatgcgctaacagtaactgccgtactcatcgctgtggctgtaggtttttacgcggtttaccatcgctttgcctcaggtagtgggcacggtaacgaccacgaccactccgcagatgataatgtgcacgatttgcaccgcgaagatttagatactttccgcagctttttgcgcagccttattatgcacggtgcagtaggtaccgccctaggtggcgttgctaccttagttggcgagcctcaaaacttgcttattgcagaaattgctggctggaacttcattgagttctacttggttatggcacctatttctgtgcctgctttaattggtggtttgctcacctgcgcaatactagaaaagacaggtatctgcggctacggagccaaattacccgatagcgtgcgccaaatattggtcgattttgataaaaaggaaacggcaaagcgcgggtttggcgataaggcgcaattacttgtacaagcggttgtcgcagtagtgcttgtatttgcattagccttgcacctagcggaagttggccttattggtttgcttattattgttctgctaaccgcctttaacggcattaccgatgaacaccgcattggtcacgcttttgaagaagcgctgccctttaccgcgctgctagtggtgtttttcgcagttgtggctgttatccacgaccagcatttgtttacaccggttattgattacgttttagccatggaacaaggtgcccaggctcctatgttctttgtggctaacggcgtgttatctatgattagtgataatgtgtttgttgctaccgtgtacattaacgaagtaaaagcggcattcgatgcgggtactatttctcgtgagcattttgatgtacttgctgtagcaattaatgccggcaccaacctacctagcgtggcgacaccaaacggccaagcagcatttttattcctgctcacttctgctcttgccccgcttattcgcctttcgtacggcaaaatggtaataatggcgctgccctacacaatcgttcttggtgcggttggccttgggtctgtaatactcttctactaa

SEQ ID NO: 37443 - protein, 499 aa, Saccharophagus degradans 2-40
MPQSMTNAFWHNFLGHTPNWYKKTILGFLVINIVLSQVSPFLAGWALIIEFIFTLAMALKCYPLQPGGLLAIQAVLLGLTSADSVYHEVLANFKVILLLMFMVAGIYFMKDMLLFVFTKILLGIRSKLLLSLLFSFVAAVLSAFLDALTVTAVLIAVAVGFYAVYHRFASGSGHGNDHDHSADDNVHDLHREDLDTFRSFLRSLIMHGAVGTALGGVATLVGEPQNLLIAEIAGWNFIEFYLVMAPISVPALIGGLLTCAILEKTGICGYGAKLPDSVRQILVDFDKKETAKRGFGDKAQLLVQAVVAVVLVFALALHLAEVGLIGLLIIVLLTAFNGITDEHRIGHAFEEALPFTALLVVFFAVVAVIHDQHLFTPVIDYVLAMEQGAQAPMFFVANGVLSMISDNVFVATVYINEVKAAFDAGTISREHFDVLAVAINAGTNLPSVATPNGQAAFLFLLTSALAPLIRLSYGKMVIMALPYTIVLGAVGLGSVILFY

SEQ ID NO: 37444 - DNA, 1602 bp, Shewanella sp. MR-4
  CDS (1)..(1602): transl_table=11
atgccgatgacaatgagtcaggcgtttattgggaacttcttagggaattctcctaagtggtacaagatcgcaatactgtcgtttttaataatcaatccaatactctttttctatgtcagcccctttgtggctggttgggtattagtgcttgaatttatttttaccttggcaatggcacttaaatgctatccattacaacccggtggtttattagcgattcaagcggtcgccatcggtatgacctctgcgagccaagtgctgcacgaaattgaagccaaccttgaagtattattactgctggtgtttatggtggctggcatttacttcatgaagcagctactgctattcgcgtttactaagatgatcactaaagtacgctcgaaaatcttagtgtctttgatgttctgtctggcttcagccttcttatccgccttcctagatgcattaaccgttatcgccgtgattattactgtggcggtcggattttactctatttatcacaaagtggcttcgggtaaagatttctctgcagatcatgaccatacctctgaaggcaaaaatgaagatggtgaaaaccagctcaacgaagaagaattagagtccttccgtggtttcctacgtaacctattgatgcacgccggtgtcggtaccgcattaggtggtgtatgtactatggtgggagaaccacaaaacttaattatcgctgcgcaggctaattggcaatttggtgagttcgcgatccgtatgtctcccgtaaccgtgccagtgttgtttgctggtatcctaacttgctttttagtcgaaaaattacgttggttcggttatggtgcccagctaccggaagccgtgcataaaatcctttgtgattacgccgcctatgaagacgcgcgtcgtaccaataaagataagatgaagctggttatccaagcctttgttggcgtttggttaattgcaggtcttgcgctgcacttagcgtcagtgggcttgattggtctgtctgtgatcattttaaccacagcctttaacggtattaccgatgagcatgcactgggtaaagcgtttgaagaagccctgccctttacggcgttgttagcggtgttctttgcggttgtggccgtgattatcgaccaacaactgtttggcccagtgatccaatgggcactaaaccatgaaggtaatacccaattagtgatcttctatatcgctaacgggttactctctatggtcagtgataacgtgtttgtcggcactgtctatattaacgaagtcaaagccgccctgattaacggtcaaattacccgcgatcaattcgaccttttagcggttgcgattaacactggtactaacttgccttcggtggcgacaccaaacggtcaagcagcattcctgttcttactgacctccgcccttgcaccgcttatccgtttatcctacggcagaatggtgtggatggcactaccctacactatcgtgttatcgattgtcggtgtaatggctatcgaatcaggcttcttagagcagatgacgcaatacttctatgattcccatgcaatcattcaccacagtgttaaagaagcgttagcacctgcggcagctcactaa

SEQ ID NO: 37445 - protein, 533 aa, Shewanella sp. MR-4
MPMTMSQAFIGNFLGNSPKWYKIAILSFLIINPILFFYVSPFVAGWVLVLEFIFTLAMALKCYPLQPGGLLAIQAVAIGMTSASQVLHEIEANLEVLLLLVFMVAGIYFMKQLLLFAFTKMITKVRSKILVSLMFCLASAFLSAFLDALTVIAVIITVAVGFYSIYHKVASGKDFSADHDHTSEGKNEDGENQLNEEELESFRGFLRNLLMHAGVGTALGGVCTMVGEPQNLIIAAQANWQFGEFAIRMSPVTVPVLFAGILTCFLVEKLRWFGYGAQLPEAVHKILCDYAAYEDARRTNKDKMKLVIQAFVGVWLIAGLALHLASVGLIGLSVIILTTAFNGITDEHALGKAFEEALPFTALLAVFFAVVAVIIDQQLFGPVIQWALNHEGNTQLVIFYIANGLLSMVSDNVFVGTVYINEVKAALINGQITRDQFDLLAVAINTGTNLPSVATPNGQAAFLFLLTSALAPLIRLSYGRMVWMALPYTIVLSIVGVMAIESGFLEQMTQYFYDSHAIIHHSVKEALAPAAAH

SEQ ID NO: 37446 - DNA, 1602 bp, Shewanella sp. ANA-3
  CDS (1)..(1602): transl_table=11
atgccgatgacaatgagtcaggcgtttattgggaacttcttagggaattctcctaagtggtacaagatcgcaatactgtcgtttttaataatcaatccaatactctttttctatgtcagcccctttgtggctggttgggtattagtacttgagtttatttttaccttggcaatggcgctaaaatgctacccattacaacccggtggtctattagcgattgaagctgtcgccatcggcatgacctcagcaagccaagtgctgcacgaaattgaagcgaaccttgaagtgctattactgctggtatttatggtggccggcatttacttcatgaagcagctactgctgtttgtgttcactaagatgatcactaaagtacgttcgaaaatcttagtgtctttgttgttctgtctagcttccgccttcttatccgccttcttagatgcgttaactgttatcgccgtgattatcaccgtggcggttggtttttactccatctatcacaaagtcgcctcaggtaaagatttctcggccgatcatgaccatacctccgaaggcaaaaatgacgatggtgaaaatcagctcaacgaagacgagctggaatccttccgtggtttcctacgtaacctgttaatgcacgccggtgtcggtactgcattgggtggcgtgtgtactatggtgggtgaaccgcaaaacttaattattgcagctcaagcaaactggcaatttggcgaatttgcgatccgtatgtcacctgtgacagtgcctgtattgttcgcaggtatcctcacctgctttatcgtcgagaaattccgttggtttggttatggtgcccagcttccggatgcggtgcataaaatcctatgtgattacgccgcctatgaagacgcacgtcgtaccaacaaagacaagatgaagctggttatccaagcctttgtgggtgtgtggttgattgcgggtctcgcgctgcacttagcgtctgtgggcttgattggtctgtctgtgatcatcttaaccacggcctttaacggtattaccgatgagcatgcgctaggtaaagccttcgaagaagccctgccctttacggccttgttagcggtgttctttgcggttgttgccgtaatcatcgaccaacaactgtttggccctgtcatccaatgggcactaaaccatgaaggtaatacccaattagtgatcttctatatcgctaacggtttactctctatggtcagtgataacgtgtttgtgggcacggtttacattaacgaggtcaaagccgccctgattaacggtcaaatcacccgggatcaattcgacctgttagcagttgcgattaacactggtactaacttgccttcggtggcaacaccaaacggtcaagccgcattcctgttcttattgacctcggctcttgcaccgctgatccgtttatcctacggcagaatggtttggatggcattgccctacactatcgtgctatcgattgtgggcgtgatggctattcaatcgggcttcttagagcagatgacccagtacttctatgactcccatgcaatattgcaccacagtgttaaagaagcgttagcgcctgctgcagctcactaa

SEQ ID NO: 37447 - protein, 533 aa, Shewanella sp. ANA-3
MPMTMSQAFIGNFLGNSPKWYKIAILSFLIINPILFFYVSPFVAGWVLVLEFIFTLAMALKCYPLQPGGLLAIEAVAIGMTSASQVLHEIEANLEVLLLLVFMVAGIYFMKQLLLFVFTKMITKVRSKILVSLLFCLASAFLSAFLDALTVIAVIITVAVGFYSIYHKVASGKDFSADHDHTSEGKNDDGENQLNEDELESFRGFLRNLLMHAGVGTALGGVCTMVGEPQNLIIAAQANWQFGEFAIRMSPVTVPVLFAGILTCFIVEKFRWFGYGAQLPDAVHKILCDYAAYEDARRTNKDKMKLVIQAFVGVWLIAGLALHLASVGLIGLSVIILTTAFNGITDEHALGKAFEEALPFTALLAVFFAVVAVIIDQQLFGPVIQWALNHEGNTQLVIFYIANGLLSMVSDNVFVGTVYINEVKAALINGQITRDQFDLLAVAINTGTNLPSVATPNGQAAFLFLLTSALAPLIRLSYGRMVWMALPYTIVLSIVGVMAIQSGFLEQMTQYFYDSHAILHHSVKEALAPAAAH

SEQ ID NO: 37448 - DNA, 1557 bp, Haemophilus influenzae R2846
  CDS (1)..(1557): transl_table=11
atggagttcactatgacaaacattcaggcttttatgaaaaactttcttggggcaagtccagaatggtacaaacttgccattgtggtttttcttattataaatccaattgttttcttttttattagtccttttattgcgggttggttactcgttgcagaatttattttcacattggcaatggcattaaaatgctaccctcttcaaccgggtggtctattagcaattgaagctattattattggaatgacaaatgccaaacacgtcaaagcagaaattatggcaaactttgaagtgatcttgctactgatatttatggtggcaggtattttctttatgaaacaattactgctttatgtatttactaaattacttgtcaaaattcgttctaaaattgcactttctattgccttttgttttagtgctgcttttttatcggcttttctcgatgctttaacggttgttgctgttatcattagtgtcgcaatgggattttatggtgtgtatcacaaagttgcatcaggcaataatttaattgatgtggttgatatttcagacgatagaaaaattattgaacaacagcacgaaatcttagaaaaattccgtgcattcttacgtagtttaatgatgcatgcgggtgtaggaactgcactcggtggtgtaatgaccgttgttggagaaccacaaaacttaattattgcagaacaagcaaaatggaactttatggaatttttcctccgtatggcacccgtgactattcctgtgtttatctgcggattactcacttgtttcttggtcgaaaaattcaaattatttggttatggcgagaaattaccagacgaagtgtggaaaatcttatcagatttagatcgtactaattcagaaaaaatgtctaaacaagataaaattaaattaggtatgcaagcgttaatcgcaatttggttaattgttggattagcattccatcttgccgcagtcggtttaattggtttaagtatcatcatttttgctacatctttcactggtgtgacggatgaacatactatcggtaaagcctttcaggaatctttaccctttactgcattgctcgttgtattcttttctgttgttgcagtaattattgatcaaaaacttttttcaccaattattcacttcgttctttctgcggaagaaaatacacaacttgctttattctatgtgtttaatggcttgctttcttctatttctgataatgtatttgttgcaacggtttatattaatgaagctaaagctgcactgactaatggagtaattgcaccgcatcaatttgaattgctttctgttgccattaatacaggtacaaacttaccatcagttgcaacaccaaatggacaagctgctttcttattcttattgacttcatcaatttcgccattaattcgcctttcttatggcagaatggtttatatggctttaccttacacgattgtactttcaatcattggtttactggctattgaatttattttaccagctgccacaatttggttagcaagtttaggtttaattttgccaatttaa

SEQ ID NO: 37449 - protein, 518 aa, Haemophilus influenzae R2846
MEFTMTNIQAFMKNFLGASPEWYKLAIVVFLIINPIVFFFISPFIAGWLLVAEFIFTLAMALKCYPLQPGGLLAIEAIIIGMTNAKHVKAEIMANFEVILLLIFMVAGIFFMKQLLLYVFTKLLVKIRSKIALSIAFCFSAAFLSAFLDALTVVAVIISVAMGFYGVYHKVASGNNLIDVVDISDDRKIIEQQHEILEKFRAFLRSLMMHAGVGTALGGVMTVVGEPQNLIIAEQAKWNFMEFFLRMAPVTIPVFICGLLTCFLVEKFKLFGYGEKLPDEVWKILSDLDRTNSEKMSKQDKIKLGMQALIAIWLIVGLAFHLAAVGLIGLSIIIFATSFTGVTDEHTIGKAFQESLPFTALLVVFFSVVAVIIDQKLFSPIIHFVLSAEENTQLALFYVFNGLLSSISDNVFVATVYINEAKAALTNGVIAPHQFELLSVAINTGTNLPSVATPNGQAAFLFLLTSSISPLIRLSYGRMVYMALPYTIVLSIIGLLAIEFILPAATIWLASLGLILPI

SEQ ID NO: 37450 - DNA, 1557 bp, Haemophilus influenzae R2866
  CDS (1)..(1557): transl_table=11
atggagttcactatgacaaacattcaggcttttatgaaaaactttcttggggcaagtccagaatggtacaaacttgccattgtggtttttcttattataaatccaattgttttcttttttattagtccttttattgcgggttggttactcgttgcagaatttattttcacattggcaatggcattaaaatgctaccctcttcaaccgggtggtctattagcaattgaagctattattattggaatgacaaatgccaaacacgtcaaagcagaaattatggcaaactttgaagtgatcttgctactgatatttatggtggcaggtattttctttatgaaacaattactgctttatgtatttactaaattacttgtcaaaattcgttctaaaattgcactttctattgccttttgttttagtgctgcttttttatcggcttttctcgatgctttaacggttgttgctgttatcattagtgtcgcaatgggattttatggtgtgtatcacaaagttgcatcaggcaataatttaattgatgcggttgatatttcagacgatggaaaaattattgaacaacagcacgaaatcttagaaaaattccgtgcattcttacgtagtttaatgatgcatgcgggtgtaggaactgcactcggtggtgtaatgaccgttgttggagaaccgcaaaacttaattattgcagaacaagcaaaatggaactttatggaatttttcctccgtatggcacccgtgactattcctgtgtttatctgcggattactcacttgtttcttggtcgaaaaattcaaattatttggttatggcgagaaattaccagacgaagtgtggaaaatcttatcagatttagatcgcactaattcagaaaaaatgtctaaacaagataaaattaaattaggtatgcaagcgttaatcgcaatttggttaattcttggattagcattccatcttgccgcagtcggtttaattggtttaagtatcatcatttttgctacgtctttcactggtgtgacggatgaacatactatcggtaaagcctttcaggaatctttaccctttactgcattgctcgttgtattcttttctattgttgcagtaattattgatcaaaaacttttttcaccaattattcacttcgttctttctgcggaagaaaatacacaacttgctttattctatttgtttaatggcttgctttcttctatttctgataatgtatttgttgcaacggtttatattaatgaagctaaagctgcactgactaatggagtaattgcaccgcatcaatttgaattgctttctgttgccattaatacaggtacaaacttaccatcagttgcaaccccaaatggacaagctgctttcttattcttattgacttcatcaatttcgccattaattcgcctttcttatggcagaatggtttatatggctttaccttacacgattgtactttcaatcattggtttactggctattgaatttattttaccagctgccacaatttggttagcaagtttaggtttaattttgccaatttaa

SEQ ID NO: 37451 - protein, 518 aa, Haemophilus influenzae R2866
MEFTMTNIQAFMKNFLGASPEWYKLAIVVFLIINPIVFFFISPFIAGWLLVAEFIFTLAMALKCYPLQPGGLLAIEAIIIGMTNAKHVKAEIMANFEVILLLIFMVAGIFFMKQLLLYVFTKLLVKIRSKIALSIAFCFSAAFLSAFLDALTVVAVIISVAMGFYGVYHKVASGNNLIDAVDISDDGKIIEQQHEILEKFRAFLRSLMMHAGVGTALGGVMTVVGEPQNLIIAEQAKWNFMEFFLRMAPVTIPVFICGLLTCFLVEKFKLFGYGEKLPDEVWKILSDLDRTNSEKMSKQDKIKLGMQALIAIWLILGLAFHLAAVGLIGLSIIIFATSFTGVTDEHTIGKAFQESLPFTALLVVFFSIVAVIIDQKLFSPIIHFVLSAEENTQLALFYLFNGLLSSISDNVFVATVYINEAKAALTNGVIAPHQFELLSVAINTGTNLPSVATPNGQAAFLFLLTSSISPLIRLSYGRMVYMALPYTIVLSIIGLLAIEFILPAATIWLASLGLILPI

SEQ ID NO: 37452 - DNA, 1584 bp, Pseudoalteromonas tunicata D2
  CDS (1)..(1584): transl_table=11
atgcagcaaacagtttttacagctctggccaaaaactttctcggtaatgcgccaaattggtacaaactaactattattgcatttcttgctatcaatcctgttatttactctttcagcccttatctagctgggtgggctcttgttttagagtttatttttacgcttgctatggcattaaaatgttatccattgcaacctggtggtttgctggctattgaagctgtgatgatgggtatgacaagtgctggtcaagtggaacatgagatagctcaaaatcttgatgttattttactgcttattttcatgattgctggtatttatttcatgaaagatttgctgctatttatctttactaagttagttattcggctaaagagtaaaacgtacttatctctcgcttttgctttagcggccgcttttttatctgcatttttagatgcgctaaccgttatggccgttataatttctgtcgctatgggtttttacagcatttatcataaagtggcatcaggtaaagattatgcttcaaatcacgatgtaaatgatgatgaacaagtcgcgattttaaaacgtgaagaacttgaagagtttcgagctttcttgagaaacttgctaatgcatgcatcaatcggtactgcactaggtggagtatgtactatggtaggtgagccacaaaacctcattatcgcagaacgtgcaggttgggactttggcgaattcttacttcgaatggcaccgattactgttcctgttgttttatcaggcttactcactacgttttttttggagaaaaccaaaacttttggttatggagcaaagcttcctcaaacggttcgtcaaatccttgttgattttgatacccaccaagacagtaaacgctcaaaaagagaaagcgttaacttaattgttcaaggctttattgctgtttggcttgtaatcgctttagctggacattttgcagctgtggggctgattggtcttaccattatcatctttactaccgcttcagcaggtatcattgaagagcatcgcatcggtaaagcatttgaagaagccttaccatttacagcattactttgtgtcttcttttcaatagttgcggtaattattgatcaacatttatttactccggtgatcacttgggtactgacttttgaaggaaatatgcagctagtcatgttctttatggcaaacgggatattgtctatggtcagcgataatgtatttgttggtacggtgtatatcaatgaagttgcagcagcgtggcaatcgggtcaaattactcgtgatcaatttgatttactcgctgtagcaattaatacaggaacaaacttaccaagtatcgcaacgcctaatgggcaagcggcattcttatttttattaacttcaacattagcaccagtacttcgcctatcctatgggcgcatggtttatatggccctaccttatacaattgtacttacgcttgttggtttatttttcacctatcaaagcttggctgattggaccaacattttatatcactggcatctgattgagcatcatgtagtgaccacagtatcgggtgttactacaggacattaa

SEQ ID NO: 37453 - protein, 527 aa, Pseudoalteromonas tunicata D2
MQQTVFTALAKNFLGNAPNWYKLTIIAFLAINPVIYSFSPYLAGWALVLEFIFTLAMALKCYPLQPGGLLAIEAVMMGMTSAGQVEHEIAQNLDVILLLIFMIAGIYFMKDLLLFIFTKLVIRLKSKTYLSLAFALAAAFLSAFLDALTVMAVIISVAMGFYSIYHKVASGKDYASNHDVNDDEQVAILKREELEEFRAFLRNLLMHASIGTALGGVCTMVGEPQNLIIAERAGWDFGEFLLRMAPITVPVVLSGLLTTFFLEKTKTFGYGAKLPQTVRQILVDFDTHQDSKRSKRESVNLIVQGFIAVWLVIALAGHFAAVGLIGLTIIIFTTASAGIIEEHRIGKAFEEALPFTALLCVFFSIVAVIIDQHLFTPVITWVLTFEGNMQLVMFFMANGILSMVSDNVFVGTVYINEVAAAWQSGQITRDQFDLLAVAINTGTNLPSIATPNGQAAFLFLLTSTLAPVLRLSYGRMVYMALPYTIVLTLVGLFFTYQSLADWTNILYHWHLIEHHVVTTVSGVTTGH

SEQ ID NO: 37454 - DNA, 1587 bp, Photobacterium sp. SKA34
  CDS (1)..(1587): transl_table=11
atggctatatcgctagggaatgcctttatcaaaaattttttgggtaaggcacctgactggtacaaaattgcaatcattacttttttgatcattaaccctattgtattttttcttattgatccgtttgttgctggctggttgttagtaatcgaattcatctttacgctagcaatggcattaaaatgttatccattacagcctggtggtttattggcaatagaagctgttgctattgggatgacaagtccagatcaagtgaaacatgaacttgttgcaaatattgaagttctactcttactggtctttatggtcgcgggtatctacttcatgaaacagctattgttgttcatgtttactaaaatattaatcggcatccgctctaaaattttactttctctcgcatttagtgtgatggccgcttttctttccgctttccttgatgcactaaccgttattgcggttgttatcagtgtaacggtaggcttctatagtatttatcataaggttgcttcagggcaagatcctcactctaatcatgatcataccaatgataatcacgttccagagctaagccgtgatgatttagaaaactaccgtgcattcctccgtagcttgctaatgcatgccggtgtgggtacagcattaggtggcgtaatgacaatggtaggtgaacctcaaaatttaatcattgccgatcaagcaggttgggattttggtgaatttattattcgtatggcgcccgttactgtccctgtttttttctgtggcttgttaacctgtgcactggttgagaaatttaaaatctgtggctatggtgcagaattacctgaaaatgttcgccaaattttagtcgactttgataatgaagaacgtaaatcacgtactaaccttgactacgctaaattaattattcaagcagcaattgcagtatggctaattatcggccttgctatgcacttagctgcggttggtttaatcggtttaacagtgattattttggctacatcgtttactggtatcaccgaagagcacgctctgggtaaagcatttgaagaagcgctaccctttacagcactacttgcggtattcttctctatcgttgcggtaatcattgaccaacaactattcgcacctattattaattgggtattaagccttgaaggtagttcacagcttactatgttctacattgctaatggcttgctatctatggtgtcagacaacgtattcgttggaacggtatatattaacgaagtaaaaactgcgctaacaaacggtgttattaaccgaagtcagtttgatatgttagccgttgctatcaatacaggtactaacctaccatcagtagcaacaccaaatggtcaagcagcgttcttgtttgctttaacctcggcaattgcaccacttatccgtctttcttacggtcgtatggtatacatggcgttgccttacaccattgtacttgcatccgtgggtttggccggcattgagctgatgctagtcccaatgacagaatggttttataccatgggctggatcactgatgcatcatcagcggccgcaacaataccggcacttgctcactaa

SEQ ID NO: 37455 - protein, 528 aa, Photobacterium sp. SKA34
MAISLGNAFIKNFLGKAPDWYKIAIITFLIINPIVFFLIDPFVAGWLLVIEFIFTLAMALKCYPLQPGGLLAIEAVAIGMTSPDQVKHELVANIEVLLLLVFMVAGIYFMKQLLLFMFTKILIGIRSKILLSLAFSVMAAFLSAFLDALTVIAVVISVTVGFYSIYHKVASGQDPHSNHDHTNDNHVPELSRDDLENYRAFLRSLLMHAGVGTALGGVMTMVGEPQNLIIADQAGWDFGEFIIRMAPVTVPVFFCGLLTCALVEKFKICGYGAELPENVRQILVDFDNEERKSRTNLDYAKLIIQAAIAVWLIIGLAMHLAAVGLIGLTVIILATSFTGITEEHALGKAFEEALPFTALLAVFFSIVAVIIDQQLFAPIINWVLSLEGSSQLTMFYIANGLLSMVSDNVFVGTVYINEVKTALTNGVINRSQFDMLAVAINTGTNLPSVATPNGQAAFLFALTSAIAPLIRLSYGRMVYMALPYTIVLASVGLAGIELMLVPMTEWFYTMGWITDASSAAATIPALAH

SEQ ID NO: 37456 - DNA, 1551 bp, Flavobacteria bacterium BBFL7
  CDS (1)..(1551): transl_table=11
atgttcaagtcttttttaggtaatagccctacatggtttaagtcaaccatattagcatttttagtttttaatactgccgcatattttgttcttgatggaacggtaatgggttggatttttatagcagagtttatattctgtcttgcgatggctttaaaatgttatcctttacagtccggtggtttactagctattcaagttattgcattaggattaacacatcctatgtataaagtcgatcatgaaacacataaggtcgtattagatgatttaggtaataaagtattaggtggtgtttatgcagaagtagcacaaaacctagaggtgattttgctgttagtgtttatggtagcgggaatttattttatgaaacctctacttatgtatatttttgtaaaactgtttacaaaggtaaaatctaaaatagctctttctctattttttgtactaatcagtgctgtgttatctgcctttttagatgctcttacagttacagcagttctaattagtgtcggtctaggtttttataatgtttatcataaaatacattctagtgatctagatttagatcatgataatacattggataggaaacagctgagcggtgaaacgttagaggattttcgttcattcttgcgtagtttagtgatgcatggtgtggtagggacagcgttaggtggtgtttgtaccattgtaggtgaacctcaaaatttacttatcggtactaaaatgaatacagccttgccatatgaatatggatttattgaatttttcttacatatggcacctattactattccagtattaattgcaggtttgatcacaaccgtgctactagaagtaacaaaaacatttggatttggtcagaaaatgccgcctgttgttaggcaaattattgaaggctggatggagaaacgagaccaagagcgtacaagtaaggaaaagtatgggttagttgttcaaggagtttcagctattctattaatcattggtctagcattgcatattgcaccagttggatttataggtcttgcattaatagtgattcaaactgcgtttatggggattactgatgagcacagcttaggaaaagcctttgaagaagcacttccatttacaggattattagttgtgttttttgtgattgttgcgatgattcatgatcagcatttatttgcacctattatagaatgggcattaagtcaggaccctagtagtcaaccagctatattttacttggcaaatggtgttttgagtatgatatcagataatgtttttgtagcaactgtttatataaatgaagtaggaaatgcttatgacgcaggaaaaataacattggagcaatacgagcatttggccgttgcgatcaacacgggaacaaatattcctagtgtagcaacacctaatggtcaggcagctttcttatttttattaacatctgcattagcacctgttatcaatctttcatatggaaaaatggttaaaatggctttcccatataccatagtgttaaccattgttggactggcatgtgttatcatgtttttataa

SEQ ID NO: 37457 - protein, 516 aa, Flavobacteria bacterium BBFL7
MFKSFLGNSPTWFKSTILAFLVFNTAAYFVLDGTVMGWIFIAEFIFCLAMALKCYPLQSGGLLAIQVIALGLTHPMYKVDHETHKVVLDDLGNKVLGGVYAEVAQNLEVILLLVFMVAGIYFMKPLLMYIFVKLFTKVKSKIALSLFFVLISAVLSAFLDALTVTAVLISVGLGFYNVYHKIHSSDLDLDHDNTLDRKQLSGETLEDFRSFLRSLVMHGVVGTALGGVCTIVGEPQNLLIGTKMNTALPYEYGFIEFFLHMAPITIPVLIAGLITTVLLEVTKTFGFGQKMPPVVRQIIEGWMEKRDQERTSKEKYGLVVQGVSAILLIIGLALHIAPVGFIGLALIVIQTAFMGITDEHSLGKAFEEALPFTGLLVVFFVIVAMIHDQHLFAPIIEWALSQDPSSQPAIFYLANGVLSMISDNVFVATVYINEVGNAYDAGKITLEQYEHLAVAINTGTNIPSVATPNGQAAFLFLLTSALAPVINLSYGKMVKMAFPYTIVLTIVGLACVIMFL

SEQ ID NO: 37458 - DNA, 1506 bp, marine gamma proteobacterium HTCC2207
  CDS (1)..(1506): transl_table=11
atgcagccaacgatgtatcaggcgtttcaaaaaaactttctgggcaattccccaggttggtatgaaaaggcgattattgccttcctaataatcaaccccatcgcactctgggcttttggtcccttcgtgaccggatggatgctgattgctgaatttattctaacccttgctatggcgcttaaatgctacccattgcagcccggcggcctgctcgccatcgaggcaatcttactcggcatggcctcgcctgaggcggtctatcaagagacagtgtcaaactttcaagtgattctgctgctgatgtttatggtcgccggcatctactttatgcgcgacatgttgttatttgttttcaccaatatactgctcaaggtgaaatcaaaaaccaccctgtcatttctattctgttttgccggtgcatttctctctgcgtttctcgatgcactgacggttacagcagtactgattacgatttcggtcggcttctactcggtgttccacaaagtggcatcgggtaagaaaattgtcgatgacggacatgaccatagcactgacgaaaacctcgcaggcaatcaacgtgcaaacttagatcaattccgcgccttcttgcgcagtttgattatgcacggagctgtgggtaccgcactcggtggagtgaccacggttgtgggcgagccgcaaaacctattgatcgctgagaaagccggctgggaatttattgagttcttcctcaccatggcgccagtgaccatgcctgttttggtctgtggtttagccacttgcattatcttggagaaaaccaaaattcttggttacggtgcagagatgccagaagaagtccgcgtcattctgcaagcctccagtgaccacgacaactcacgtcgcactcagtacgacaaggccgctttgattattcaggttattgtctctctgattctggttttaggactggcgtttcactgggctccagtgggcttgattggcttgatggtgattgtacttctgactgcctttaacggtgtcaccgaagagcatcgcattggccacgcctttgaagaggccctgccctttaccgctcttttagtggtgttctttgccattgttgcagtgatccacgaacagcacctattctctccagttatcggctgggtgctggcaatggatgaatctgtgcagccaggcatgttcttcctcgccaacggtgtgctgtcgatgatcagtgacaacgtttttgtggcaacggtttacatcaacgaagtcagagcagtgttagacgccggtagtattagccgtgagcacttcgataagctggttattgcgattaacaccggtaccaacttgccgagtgttgcaacccctaacggacaggctgcattcctcttcctgctgacctcagcgatcgcaccacttatccgcctctcctatatgcgcatggtgcttatggcgctgccatatacattggtactgaccgcagttggtttgtggggcgttgtgtatatgatctag

SEQ ID NO: 37459 - protein, 501 aa, marine gamma proteobacterium HTCC2207
MQPTMYQAFQKNFLGNSPGWYEKAIIAFLIINPIALWAFGPFVTGWMLIAEFILTLAMALKCYPLQPGGLLAIEAILLGMASPEAVYQETVSNFQVILLLMFMVAGIYFMRDMLLFVFTNILLKVKSKTTLSFLFCFAGAFLSAFLDALTVTAVLITISVGFYSVFHKVASGKKIVDDGHDHSTDENLAGNQRANLDQFRAFLRSLIMHGAVGTALGGVTTVVGEPQNLLIAEKAGWEFIEFFLTMAPVTMPVLVCGLATCIILEKTKILGYGAEMPEEVRVILQASSDHDNSRRTQYDKAALIIQVIVSLILVLGLAFHWAPVGLIGLMVIVLLTAFNGVTEEHRIGHAFEEALPFTALLVVFFAIVAVIHEQHLFSPVIGWVLAMDESVQPGMFFLANGVLSMISDNVFVATVYINEVRAVLDAGSISREHFDKLVIAINTGTNLPSVATPNGQAAFLFLLTSAIAPLIRLSYMRMVLMALPYTLVLTAVGLWGVVYMI

SEQ ID NO: 37460 - DNA, 1587 bp, Vibrio sp. Ex25
  CDS (1)..(1587): transl_table=11
atgccgatatcgctcggaaacgcttttatcaagaactttcttggtaaagcgcctgattggtacaaagttgccattatagccttcttaataattaacccgattgtattcttcctaataaacccatttgttgctgggtggttgctggttgctgaatttattttcacgcttgcaatggcattaaaatgctacccattacaacctggtggtttacttgctattgaagccatcgctatcggcatgactagccctgcgcaagttaagcacgagttggtggcaaatattgaagtattactgcttctggtatttatggttgcgggcatctacttcatgaagcatttattgctgttcatttttaccaaaattttacttggtattcgctccaaaacccttctatcacttgcgttttgctttgccgctgcatttttatctgcgtttttggatgctttgacggttatcgccgttgttatcagtgtggcgatcggtttctactctatctaccacaaagtggcgtcaggtaatccgattggtgaccatgaccacacacaagatgacacgatcactgagctaacgcgtgatgacttagaaaactaccgcgcctttttacgctcattgttgatgcacgctggtgtaggtactgcgttaggtggcgtaaccactatggtaggtgaacctcaaaacttaattattgcagaccaagcgggttggttatttggtgaattcctaatccgtatgtctccagtgacgctacccgtatttttctgcggtctcatcacttgtgctctagtcgaaaagcttaaagtgtttggctacggtgcaaaacttcctaacaacgttcgtcaaatcctcgttgactttgacaatgaagagcgcaaaacgcgtaccaatcaagacgttgcaaagctatgggttcaaggacttattgctgtttggttgatcgtagcattagccttacacttggcggcggtaggcttaattggtctttcagtgatcatcttagcgacggctttcactggcgttattgaagagcattccatgggtaaagcgtttgaagaggctctgcctttcactgcactacttgcggtatttttctcgatcgttgcggtaatcatcgaccaagagttgtttaaaccagttatcgacgcggtgcttgccgttgaagataaaggcactcagttagctctgttctatgtcgcgaatggcttactatcaatggtgtcggataacgtattcgtcggtacggtttacatcaatgaagtaaaaacagcactcattgaaggtctcattactcgcgagcagttcgacttactggcagttgctatcaacactggtactaacctaccatctgttgctacgccaaacggtcaagcggcattcctattcctactcacctcggctctcgctccattaattcgtctgtcttacggtcgaatggttatcatggcgctgccttacaccatcgttcttgcgattgtcgggctaatgggcattatgttcttcctagagcctgcaacggcttctttctacgatgcaggctggattttacctcatagtggtgatctgactcccgtagtctctggcggtcactaa

SEQ ID NO: 37461 - protein, 528 aa, Vibrio sp. Ex25
MPISLGNAFIKNFLGKAPDWYKVAIIAFLIINPIVFFLINPFVAGWLLVAEFIFTLAMALKCYPLQPGGLLAIEAIAIGMTSPAQVKHELVANIEVLLLLVFMVAGIYFMKHLLLFIFTKILLGIRSKTLLSLAFCFAAAFLSAFLDALTVIAVVISVAIGFYSIYHKVASGNPIGDHDHTQDDTITELTRDDLENYRAFLRSLLMHAGVGTALGGVTTMVGEPQNLIIADQAGWLFGEFLIRMSPVTLPVFFCGLITCALVEKLKVFGYGAKLPNNVRQILVDFDNEERKTRTNQDVAKLWVQGLIAVWLIVALALHLAAVGLIGLSVIILATAFTGVIEEHSMGKAFEEALPFTALLAVFFSIVAVIIDQELFKPVIDAVLAVEDKGTQLALFYVANGLLSMVSDNVFVGTVYINEVKTALIEGLITREQFDLLAVAINTGTNLPSVATPNGQAAFLFLLTSALAPLIRLSYGRMVIMALPYTIVLAIVGLMGIMFFLEPATASFYDAGWILPHSGDLTPVVSGGH

SEQ ID NO: 37462 - DNA, 1503 bp, marine gamma proteobacterium HTCC2143
  CDS (1)..(1503): transl_table=11
atggcgcaaaccatgccccaagcctttatggccaactttttgggccaagcaccacaatggtacaagcagacgatcatcgtctttttgattttgaatcccattcttctttacactgtcggccccttcgtaaccggctggatattgatattagaatttatttttaccttggcacttgcgttgaaatgttaccccctgcaaccgggtggtttactcgctatagaagccattttcattggcatggcacctcccgaagcggtttatcttgaagcacaaagtaactttgaagtcatattactactgatgttcatggtcgctggaatttacttcatgaaagacctactcctctacgtcttcacgaaaatccttcttggggtaaaatcgaaaaaagccctatcgttattattcacctttgtagccgcagtactcagcgcttttctagacgcacttaccgtgacggctgtactgatcagtgttggtaccggattttatgctgtttatcataaagtcgcgtcagggaaaaaactgcatcatgcccacgatcatagtgacgatgaaggcgtcattgaatatcaccgggaagatctggagcagttccgtagctttctgcgcaacctgctgatgcatggagcggtcggaacagctttgggaggcgtgtgcacattggtaggagaaccgcaaaacttgctgattgctgaaaaagccggttgggattttatccagttttttgttcttatggcacccgtcacaatgcctgtcttagtggctggactgattacctgcttccttcttgagaccactcgcactttcggctacggcgcacagctaccttcagccgtacgtgaagttcttgaggagttttctggtgaagaagatcgcaaacgcactcttagggacaaagcaagcctcgttgtgcaagcacttgtagctgtatttctcgtcatagcactcgccacccatatcgcatcagttggtattgttggcctcgctgttattgtcctgctgacggcctttaacggcattattgaagagcaccaactaggcagtgcatttgaggaagcactgcctttcaccgctctattagtggtattttttgcgatagttgcggtgattcatgagcaacatctgtttacccctgtcattgatacagtattggcaatggacagcgatatccgtccgacgatgttctacatcgcgaatggtgtgctgtcgatgatcagtgataacgtttttgtagcaactgtctatatcaatgaaatctctgcagcattgcagtcaggcagaataacgcgagcagaattcgatgtcttggcgattgctattaataccgggacaaacatacctagcgtagcaacccccaatgggcaggcggcctttttgtttttattaacctctgcgctggcaccgctaatccggttgtcgtacggcaagatggttataatggctttcccttacaccatcgtgatgggtggcgtgggcatggctgctgtctatctggttttttaa

SEQ ID NO: 37463 - protein, 500 aa, marine gamma proteobacterium HTCC2143
MAQTMPQAFMANFLGQAPQWYKQTIIVFLILNPILLYTVGPFVTGWILILEFIFTLALALKCYPLQPGGLLAIEAIFIGMAPPEAVYLEAQSNFEVILLLMFMVAGIYFMKDLLLYVFTKILLGVKSKKALSLLFTFVAAVLSAFLDALTVTAVLISVGTGFYAVYHKVASGKKLHHAHDHSDDEGVIEYHREDLEQFRSFLRNLLMHGAVGTALGGVCTLVGEPQNLLIAEKAGWDFIQFFVLMAPVTMPVLVAGLITCFLLETTRTFGYGAQLPSAVREVLEEFSGEEDRKRTLRDKASLVVQALVAVFLVIALATHIASVGIVGLAVIVLLTAFNGIIEEHQLGSAFEEALPFTALLVVFFAIVAVIHEQHLFTPVIDTVLAMDSDIRPTMFYIANGVLSMISDNVFVATVYINEISAALQSGRITRAEFDVLAIAINTGTNIPSVATPNGQAAFLFLLTSALAPLIRLSYGKMVIMAFPYTIVMGGVGMAAVYLVF

SEQ ID NO: 37464 - DNA, 1506 bp, marine gamma proteobacterium HTCC2080
  CDS (1)..(1506): transl_table=11
atgcaagaatcagcgagtcaggctttttggcacaactttttgggatcctcacccacgtggtacaaacaggccattattggctttttagtactgaaccccattttactcgctgttgcaggcccattcataaccggttgggtattgatcggcgagtttatcttcaccctcgccttggcgctgcgctgttatccgctgcagcccggcggattacttgccattgaggcaattgtcatcggtatggccgacccccacaccgtgtaccacgaaactgcggcaaattttgaggtcattctgctactgatgtttatggtggcgggcatttacttcatgaaagacctgctgctctttatgtttaccaaaatcctactcaacgttagatcgaagaaggtgctatcactccttttttcccttgtggccgctgtactatcagcattcttagatgccctgaccgtcacagccgttcttatcagcgttagcgtcggcttctattcggtgtatcacaaggtcgcctcaggtaagcaccatggtgaagatgatcatgatcacgccgatgatgagagcgtccatgacaatcatcgcgaagacttggagaactttcgatcatttctcagaagcctaatgatgcacggcgcggtgggtaccgcccttggcggcgtttgcacgctagtgggcgaaccgcagaatctgctaatcgccactgtagctggctgggatttcatagaattcttccttttaatggcgcctgtgaccatgccggtactcgccatgggtttactaacctgtttacttttggaggtgacgggctccttcggctatggagctcaattaccgtctcgagttcgaaccgtgcttgaagagtttcaagaaggcgagatggcaaaagcgactccacgaagtaacgccaaattagttattcaagcaagtgtcgctgttatattggtgatcggactagccctgcacctggccgcagtgggacttataggtctgttggttattgttttacttacggccttcaacggcattactgaagagcaccaaattggacatgcttttgaagaggccttgccctttaccgcgctgctcgtagttttcttcgccattgtcgcggtgatacacgagcaacacttatttactccagtcattgactgggtactgcacctcgatgcgagcattcggccctcaatgttttttattgccaatggcgttttatcgatgatttctgacaacgttttcgtcgccacggtttacattaatgaagtcaaggcagcacttgatgcgggcgaaatcactcgggctgagttcgacagcctggcggttgcgattaatacgggaacaaacttgccgagtgttgccacccctaatgggcaagccgcgtttttattcttactgacttcagctgtcgcaccgttaattcggctatcctacggtcgcatggtcgtaatggcactaccttatacagtagtgctcggctctgttggcctcgctggggtctatctgttcatctaa

SEQ ID NO: 37465 - protein, 501 aa, marine gamma proteobacterium HTCC2080
MQESASQAFWHNFLGSSPTWYKQAIIGFLVLNPILLAVAGPFITGWVLIGEFIFTLALALRCYPLQPGGLLAIEAIVIGMADPHTVYHETAANFEVILLLMFMVAGIYFMKDLLLFMFTKILLNVRSKKVLSLLFSLVAAVLSAFLDALTVTAVLISVSVGFYSVYHKVASGKHHGEDDHDHADDESVHDNHREDLENFRSFLRSLMMHGAVGTALGGVCTLVGEPQNLLIATVAGWDFIEFFLLMAPVTMPVLAMGLLTCLLLEVTGSFGYGAQLPSRVRTVLEEFQEGEMAKATPRSNAKLVIQASVAVILVIGLALHLAAVGLIGLLVIVLLTAFNGITEEHQIGHAFEEALPFTALLVVFFAIVAVIHEQHLFTPVIDWVLHLDASIRPSMFFIANGVLSMISDNVFVATVYINEVKAALDAGEITRAEFDSLAVAINTGTNLPSVATPNGQAAFLFLLTSAVAPLIRLSYGRMVVMALPYTVVLGSVGLAGVYLFI
